United States Patent Application Publication US 2025/0361538 A1 - sequence listing, part 2

SEQ ID NO: 2 - DNA, 4463966 bp, unidentified (residues 1,487,990-2,975,978 of 4,463,966)
  source 1..4463966: mol_type = genomic DNA; note = Genomic DNA of Bacterium
tcttattgccgtaacagggttttgagccgaacgaaccatgcaacattctgcacatcgcgcaaattattgcatgccagacttttcaataccgtgtttttccatcttgtagtatagattacgaagtgacacacctaatgcctttgctgtcgcagttttattcccttcataatggtcaagagtttgacgaattgtcttcttttcaaattcatcgactagctgagacaacattttgtcaggtgttcgttctacggacagcacatcagcgtcttttttctcactcaacaatgatgggagatggtgcaaatcaatcattgtttcagagacatccatatgaatcacaattcttcccaaaacattctcaaactccctaacattacctggccaatcataagattttaaatagtcaacagctacgtctgttatccctttaacatttctcccataatcttgattaattttcgtaagtaaatgtttcgcaagggcggcaatatcttctttccgttgtctcaaaggggctatttgaatcggcagccgatttaatcgatagtataaatcttccctaaatgaaccatcgattattcttttttccagtttcgcatttgttgctgcaattattcttacattaattgaaatcggcttcgctccacctacacgaactatttctcgttcctgcagaacgcgaagaagctttgcctgagtacctagagatacctctcctatttcatcaaggaaaatactcccgccattcgcttcctcaaaaagccctcgtttaccgccctgcctagcacctgaaaatgcgccatcttcataaccaaaaagttcgctttcaaatagtgattcagaaatagcagcacagttcactctgacaaatttgttgtatttacgatcacttgcattatgtatggcatgagcaaatagttccttgcctgttccagattcaccacgaagaagaacggttgctggcgtcgaggctgccagtttcgcttgttggacagagaaagtcatctcttctgacttcccgataatgtcttcaaaggaatacttcgcttcaagtgttctgattatttgtctcgctcgttgaagttgattgttcaatgagtgtagttctgaaatgtcatgaatcacaccgacacttccttttaagagaccatccactataactggtgaaacattaacaacaacttctctttttgcgggaccgactttcatttgcacgccacgcactggttttctcgttctgagtacacgcatatgcatgctttcaccttcagaaatatccgtattcgccggctttccaattacctcgtcacgctgaagtcccgttaatctggtgtaagcagggttgatcataagtccttttccagtctcatccactaccgagatcgcctcgtcagaagactgtataatagcttccagcattgattgaacactttttaaatttgttacctcttgtgccatctgttcaattgcggtcatatctttaaaaacagccaaagcgcctatgcgtcttccttcatcatcaaacattggaattctcgtggtaataattttcttaccatttggaagtagctgttctttattaatttccgcttttccagatgaaagaacgcgcggaagcctacttgaagccataagagacccaattatttttccacccgcaagttctttgctaattcccgttattttctcagcacttcgattaaataaggtcacttcctcatgcacattaactgcaatcataccatcatgtgttgaatctaaaataatttcttgttgtttggattgatgtcgtaacgtatcaattaatacttctttttcttcaataagttttaaaacaatattagcgaccgatcccggaatcaggacagtatgcttttctcgcatgtctcttatttcttcaaaaaccgcttcatctccggtagcttctacaatgacatcgatttcaaattgatttaatgctactttccaatcttcaaatacagctatcccactattacgagctttaagaataccaggggcgccttgatcacaatccaccattgcaataactttcatcattttagtttcctgcaaaatctgtagaagcgccaatccgcctcttccagcacctacaatcatacatgttcgcaactttttcatcacctgcaccctatacatgcaatatatttcatactaatcatacatctcttttttaattttgacaaattatgcacggttgatcttatcgtttttttgtaagttgtaagcatcaatggacacttcattcctacttcgctacaatagcactagtgatgtgtagaaagggtgcaccagttatgaggttagttgctttgcttgtcgtattaattccaggaatcaccggcgtcataggtatcaaattaatgagagatgttcttttcggtgtattaaacccaccgttcacttctcttgttgttcaattcattctcggactcattttccttatcgctggccttgctttcgttggtggttttattttctaccgtgatcgcaagcgaaataaagtacagcaaagattctcctctaaaaaacagtgatttttcattgaaagatcctaaatatgaaaacaaagcccacttcacaaaagaaggggctttgtttttacatatttaattagcaacggtttgttaagcataaatcaatcctcgtgtagagataaattgatttatgcttaattgcgaattacctgctatgagaataattgtccatgttgtgctcaatccgaagcttatcagcaaccattgcaatgaactctgaatttgttggttttgctttagacatactcacagtatagccgaacaagtttgaaatagattctacattacctctactccaagcaacctcaatcgcatgacgaatcgcgcgttcaactcgggatgatgttgtattgaattttttcgcaatatcaggatataggactttcgtaatcgaacctaatagttcaatatcattataaaccatcgtaatcgcttctcttaagtacatataacctttaatatgtgctggtactccgatttcatgaataatactcgtgatgctcgcatcaaggtttctagggcgactttcacgctgaggacgcttatacgagccattatttgttgtaaatgttgttttcttaccactaacttgccttacatgacttgctaaattatccatgtcaaacggctttaaaataaagtaggatgctcctaaatctaccgcttttttcgtaacatcttcctgaccgaatgcagtgagcataataacgctacaagtataattcatttctcttaaacgttcgagaacagccaggccatctaaatgcggcataataatatcaagtacaagtacatcaggttcttgatcttcaagaacttctaagcattcctggccattggaagcggttccgactacctccatatcctcttgtcgtgacatatattcctcaattaaattcaccaattcacgattatcatcagctagacacacttttattttttgcacggctccgtctctccttccacaagtttggttaccgtagtagtatagaaattcaacggaagttgtaaattccctctaaaatttctaaaaacatttaaaaacaatatttattcttcatcattctctagcatacttcaatttactacacataactacattttctgaatactctttcaattttgtcgaattttcttcacccaaagtataccatggtttgaaaatgaaagaaagcgaacattgagcttttttagctcgctgttcgcttttcattacggctttcttcataaatattaataccagcttcttctaacatccattcaatatgaacgccatagcctgaagtggagtcattaacaaacacatgagtaaccgctccaatgacttttccatcttgaataatcgggcttccactcatcccttgtacaatcccgcccgtttcttttaataattgaggatcagttactttaataaccatcccttttgtagcagggaacttctgaggaattgaactgataacttctacatcatattcttttacctcactgccttttactactgttagaatttttgcgggaccttctttcacttgatgagatagcgcaataggcatcggcttatcatacatgcctttttttacttcctgattcatttctccaaaaataccgaaaggactgttccgcgttattgtaccaagcttttgatccgttttagaaaatctcgctagtttttcaccagggtggccgttgctacctttttcaattgatgttacagaagagggataaatctctccccgattaacaacaattggcttcttcgtatccatatcagatataacatgtcctagagcgccatattttttcgtatctggatgataaaacgtcaacgttccaactcctgctgcagagtcacgtatatacaacccaatcctgtatgcttcattttgtttatctttgacaggaaccaacttcttactaagttcttcattttctctaacgatcgtcacttctaatgctttgccattatttgctgcttttttaacaattgagccaatgtcgctcattttttgaacggcttgaccatttatctttgtgataatatcgcctacttgaatgtccgctatttctccgggtgaccgatctccttgattcgtatgaattaaatggtggccaacaacgagtacaccacgagtatttaatttgacaccaattgattgcccaccaggtataactttaaaatcaggaagaactttcacatcaacttttttaattggaatatttccaacagttaaatccagaatatcagaaccgcttttgtcgccgttaactgcaagttctttcccctgtgggttaagacttgccacttcagtgcttccaagcgttgcaacggcagtagtaacagaggaaattgttgtttgatctccttcaaacatgataatttcatctggaattgataaaaataattgtactggttttgaaaaaccaagtacgattaaacctccaaggagaactacacctaacagctttcgaaacatctctatcttcaatccttcactctcctcgctcttgctcacacctccaacatggctgtatctataattttgccttgagtcgccgttattataacctctaaaaatgaaaatgctaccctcagttggatagcattacatatcatgatttaatttggtttgcttgatataacaattcttttgcatgtttctttgtaagctccgtcatctcggcgccagcaatcattcttccaagttcttctatttgttcatttgtacttaaatttccaacacttgtctttgttcgaccttcacccgtttcttcttttgaaatataaaggtgatgatcggccatcgctgcaacttgaggaaggtgagtaataacaagtacttgggacccggcggaaagacgctgtatcttctcagccatcgcttgggcaacccttccacttacaccagtatctacttcgtcaaatatgattgatgtaatgccttgatgtttcgagaagatggacttcaacgctaacatgatacgagatagctcaccaccagaagccgttttagaaagctccttaagcggctcgcccggattggtagagatcataaaatcaatatcatcttgtccggatcgatggaaaaagtctttcttactttcatcacgttcattaaaatgaattgcgaattctgttttctccatataaagatctctaagctcatggtgaattgatccaacaagctcactagcaactttttttcgaagtccggtcaaattatgagcctctaccgttaaatcagcttttatgccctttaagtcggcctgtagctcttctacgcgatcttctctgtttaataactcatctacttcatcttcaatcgaagctgcatactccaatatgtcttctacagattctccatactttcgctttaatagttgaatttcgtttagtcgttcttctacaaaatccaatcgtgcgggatcaaattcaagttgatcacgatatgtatttaatttacctgccgtttcttcaagcagataaaattgattggctacttcttcatgatatccctgcagttcttcatcaaggtccgcaaccgactccagttgtgacatcgcaagtcctacccagtctagtcctttattatctccatgtagggaatcataaacatcctgaagagccgtatatagtttttcaaaattgcctaatcgtaatttctcgtccattaactgatcatcttcattaggagaaagctcagctttcgtgatttcttcaagttgatattgaattaaatccagtctatgagccatctgttgttcattctcagttaaatttttcatttgttgctggatttttttgtatctttgaaagatttccctgtattcaaaaagagctggaccaattgatcgttccccaaactgatcgagcaaagtaagatgcttatcagattgcattaaatcctgatgttcatgctgcccatgaatgtcaataagtgtttgaccaatctctcgcaaaattccaagcgtcactaactttccattaactcggcagatgcttttacctgtatgtgaaatatcacggcgcagtaccaccatgccatctgtaaactcgattcctacatcttcaagtttttgcaccgttggatggtttgtatcaatatgaaataatccttcaatttctgcttttttcgttccataacgaacgaattcagctgaacctctcccaccaactaatagccctatggcatcaataatgatggatttaccagcacctgtttctccagtaagaacggttaacccacgctcaaatgaaacggtaatcgcttctatgatcgcaaaattacgaatggatagttccgctaacatattctcccacctttaaagatcctcattcaatattctacagcatatcaataaaccgttgtgataaaattggggcggcatcggcgctcttacaaatgattagaatcgtatcatctccgcttatattccccataatctcttcccagtctagattatcgattagagcaccgatagcattagcgttaccaggaagcgttttcattacaataagatgatccgcatgatcaatactaataaacgcgtcggttaaagttctttttaatttttgaagcgggttaaagcgctgatctgctggcagactgtatttatacctgccgtcgattgttggcactttaacaagatgaagctctttgatatctcttgaaactgttgcttgcgtaacgttaaaccctgcacttttaagacaatagacaagctcatcctgtgtctcaacatcttgattggcaatcatttcacgtatcttgatatgacgttgtcccttattcattgtataacctccggcaagtaaaatctgacagccttattatatagtcccaagccttttttgtatagaccctcataaatattcacttactaaaagaaaagtccaccgttccaaattcagaaaacctgatagaatgatgaacgagaaaaaggacacacatcgtgtatcctttataatttctgatgtgcttcttcaacaacttcttctgcagaaggaacattttcgactatgctctcctgtttccagccaagatataatagaaattcgatatttccttcgccaccagttattggtgaatatgatataccgtttacttgatagccttcttgttcagcgaaatccatcatttctttcaatacacgatgatgaatttttttatcacggacaattccttttttgcctatttctccacggcctgcttcaaattgcggtttgacgagagcgattacttcaccgttctctttcaaaattccttttaagacaggcaggattaatttcaaagaaatgaacgacacatctattgtggcgagatcagggagtccttgaccaaaatcatctctgaccgcatatcgaaaattcgttctttctttcacaaccacacgatcgtctactcgcagtttccaagctaattgattgtaacctacatcaagtgcataaacgagcgaagcgccattttgaagtgcacagtctgtaaaaccaccagtagaagaaccaatatctaaaactactttgtttgcgggatcaagagagaagacgtcaatagccttctctaactttaaaccgccacgtccaacataacgtagcgtatctcctttaatttgaagaagaatatcttctgggactttcatgcccggcttgtccatcctttccgtctctgaaaagacaagacctgccataattgctctttttgctttttctctcgtatcaattaaacctcggtttacaaggagtacatcaagtctttctttttttgccatgcttttttatgccctcttttgttttgctggagtcattttctttgctttctcagcaatgtcatctggagttaatccaatttcttttaataactcacttacactaccgtgttcgatataagcatccggaattcccattcgttgaataccaccgtgctgatagccactgtcattaacatattctagaacggcactaccgaatccaccttgaagaatagcttcttcgaccgtaagcatcggtatgccttcttgcataagatcagcaatcattttctcatctaaaggtttaatgaagcgagcgttaataacccgagctgaaataccttctttttctaatttatccgcagcactcaacagatcttgtaacgtaggaccaaatgacaagagagcaatatccgtaccttcacgcatcacttcccagctgccaatttgaatttcctttagttcttgatccatctttgtaccaatgccgttccctctaggatagcgtacagcaattggtccctgattgtacttcaaactagtataaaccatatgctgcaattcattctcatctttcgccatcataaggaccatattaggcaagtgtctaaggaaagagatatcgaaaacaccctggtgcgtttcaccatctgctcctacaagcccagaacgatcaatcgctaggaaaacattcaagttttgtctgcaaacgtcatgaacgagctgatcataagctctttggagaaacgtagaataaatcgataataccggttttaattcctgagtagcaagtcctgcagccattgtagtagcatgctgctcagctataccaacgtcaaaaagtctttctgggaattgtttttcaaacgcttcccacttagagcctactgtcattgctggagtgatgactgagatgcgatcgtccttctctgcaagctttcgcaccgtttcactaacgaccttactatatccaggcgctgcgactttcggtttgatttgtttaccagcttcaatcttataaggactcacaccgtgccaaacgccaatttgatcgctttctgcaggttgatagccttttccttttttcgtaagtacgtgaataaggaccggtccctttgtcttcttagcatatttaacgttttccattaacgcttcaacgtcatgaccatctactggtccaaggtaggtaaagccaagctcctcaaagaaaattcctgaaaccaacaaatatttcaaagcatctttcacacgctcagccgttgaagctagtgctccaccaaacgcagggatttttttaagtaaatactcaagctcatctttcgctttatgatatttgccagctgtgcggagctttcctaaaatgttatgaagagcacctacatttggagcaatggacatttcattgtcatttaagatgacaagcatgtctttttgttcatgtccgatatgattaagagcttcaagtgccatcccacctgtaagagccccatctccaataatcgcaactacactttcgtcagagcctttcatatctcgagcagcagccatccccattgctgctgatagtgaggtagagctatgcccagtttcccagacgtcatgctcactttcatttcgttttggaaaaccacaaagacctttatatttacgtagcgtatcaaatctcgaagctcgtccagtgaggattttatggacataagcctgatgaccaacatcccaaataaatttatcttttgggctatcataaattttatgaagcacgattgtaagttctactacgccaagattaggtccaagatgtccaccagtttcggatagtttgttaattaaaaagcttctaatctcttcagcaagctcggtcatatcgttcatatcataattctttagaaacttaggattctcaatcttttctaaatccatgggaatgtcctccccttcttatttcgatttacggtttccctttttctttttggattgtttgtccaccatcttgatcttaaatgttttttctacatagtataaaaatctacctacttgaaagatgatacctgtagaaaagtggatggcaaacgtttttccgagcgcttttcctccaaccgttaacgcagcaatgacgcttgtaaatactactgatattatatattgaaacaaagatccatcgctatgtccaagctgaagtgttaattggacgacaacggttgcagaggctgtaccacttataatacccgatatatcaccaattacatcattacagaagcttgcaacacgatctgcgttacgtgtcacaaagatcgcatgtttcgcaccagtaagacgttctgcggccatcgcatgaaatggcacttcgtttgcggcagtagaagctacaccaattgtatcaaagaatatcccaattagaacgatcaacagaaccacaatcataccaattgcccatgaaactccacttaataccgctgttgatataattgaaaaaatagccgctaacacaagtgtgataacggcaatagctaaactccagtttatggattttgatacggaagctttcatatctactccttgtccattatataatcacataaaaataggtattcaactaacaggacatcaaggggtcagttcgtttccccctgttccctgtcagttgaatacccctgctgtattatgtatcgcagagtggtcacttaaagagtaaagactgcggcttaggtccagtaggttttcccagattgatacctcaacgtcgccgttcaggcggtttccctttacatcaatcttagcgtagtcaccatgcgctagactggattaccacttagtccgcactataatcccctttaagtgtcactcggaacagtctaggagttttcctcaacagttccacacatttcctagcctcttttgcagagcagatttcatatgggtggtaggaaaaaagcggccggccgagctgcaaatttccaataatccataatcccctctagctccactcaaggcaggctacgctgttcaactgcgttcccatgcagctgcaacaggttcataccccaattcatagcaggcagcgttaaccgctctgctacaagaatgggcctccgcggaagcagggtcaacgcccacatgcctttgtggatcgccctgcgaccttaactcccagcatcgacccaagtctgggcgactcaagccaacaccaggaacttcatcgatgtgccctatggcggatttttaggcccgccttcagaaatggcgaactgactagaatactgcaccactcagtcttaatctattataccacacattgtatttatgctcaattatgtgttagtggtcacgctctacaataaatttcgcaattgattgtaacgtttctttttctacgttagcagcagttagatgggctaacccctctttaaaatggtgattaagtttttcttttgctccctccagcgtgagaagctttggataagtacttttttcgttcgtttcatcactaccaggaagttttccgatcttcccttcgtcgccttcaacgtcaagaatatcatcgctaatttggaaggaaaggcctatgtgttcgccaaaagcacgtagatgctcacgttgatgagttgttgcatgaccaattattgccccagccataatggagaatacaagcagttttcctgttttatgttgatgaatgtattcaagttgttctagcgttaattcttgcttctccccgtctaaatccgccatttgtcctcctaccattccggaaggaccagcagcgtgtgataacaatttgatcaaatcaactttttgttcacttgttaaattggaatctgcaataagttcaaagctttgggttaatagcgcatctccagcaagaatagctgtagcctccccaaaaacgatatggtttgttggtttacctcgacgtaaatcgtcatcgtccattgcaggcaagtcatcatgaataagtgagtacgtatgaatcatttcaactgcacatgccactggaatggcttctttaatggagtgaccaaatgcttctacggtagcgagcattaatattggacggatacgttttccccctgcgtgaatcgaatacaacattgaatccttcaatgattgtggcatctccaagcggtcaatgtatgttggaagttcttcatccaacagtttcttacattcgttcatataggaactgagatctgaagtcacgcttcatcctcctggacagaaaaacgtttgatttcaccgttttcttcaacgatttgatccattttaccctcaacagattgtagcttctcatgacatacatttgataaattcattccttcttgaaagagtgaaatcgctttttcaagaggtacattaccttcttccaatgctccgacaatttgctctaacttttccatcgcttcttcaaatgttacgttctcatttttctccattcgaatcactctcctctaatccccatacatggcaatcaatttttccatctgtcatttcaagttttagaacatctccaggttgaacctgatgaacagatttaatgagttcttcttctttatatgcaaggctataaccacgctccattactttcaatggacttaaagcattcagtttccctgcattaagcgaaaaatcacgttgttttccgagtagaacacgttgcatttctttatttaaagaaagcttaagctcttcaagctcttgacttgcttctttaagaagcttttgtggatgctgcttcattagctgcttatgattacgtgctactcgctctgttgtatatgataataatcgcttcatatttcgttgcattcgttcaacttgcaagtcaagctcttgctccttttgtttcaataattgatcaggataacgaaatgcatatgacttctggagatttgacaaccgatctcgatccgtagttaacttttcttgcattactctcattaacctatgtactcgttggtcaacccgctctttcaattctactacgctgggtactgccagttcagctgctccagtaggcgttggtgctcttaaatctgatacaaaatcagcaattgtaaaatcggtctcatggccaactgctgatataattggcacttttgaatttgcaatgcttctggcaacttcttcttcattaaacgcccataactcttcaattgatccgccaccacgtccaacaatcagcacatcaatcatattcatggcattcgccatctcgatcgcctgaacaatcgatcccttagcacgacttccctgaacaagaacgggaaacaccgttatccttgcagcaggataacgtcttttgatcgttgtgaaaatatctcgaatagctgctccagtcggggaggtaatcacaccaatttctgtaggatatcttggtatttgctgtttgaggttttctgaaaacaatccttcaaattcgagttttcgtttcaattcttcataagctaaatacaaatttccgattccatcgggctgcatctcttttgcataaagctgatattgaccatacggttcaaacactgatatctcgcctcgaataaggactttcatcccgctttccggcttaaatttcatatgacgattgtttccagcgaacatcactgcctgaacacgcgacttatcatctttaacagtaaaataaagatgccctcgattgtgaagcttcacattcgataattcaccacgcaaccagacatcttgaagtgctggctcattatcgatcatccgcttcacgtgtctcgtaagggctgtaaccgatatatagcgatccgctttcacaacgttcccctcctcattgaattagcttttttgtatgattttagagaggactccgtttacaaagcgtcccgattcttctccaccgaacaattttgctagttcaactgcttcattcaaactaacatttactggtatatcatctctcatcactatttcatacgaagccattcgaagaacagaacggtctacattaccgattcggctaaaggtccagttaacaaggttctctttaatgactgcatcaatcttttcgagattctcaagcgttccgaagacaagctcagatagaaactcgtcaccttctccctcatttaatacgtgttgcagggcctcacgtggatcggtgtctgttacatctatttgaaacaatacctggatggctttttctcttgcatgtcttcttttcattgctatactccctttacgcttatattgctataccaataaataatagcatattgtgaaggacaaatacaggttttgcaatgtccaattgttttcataaacttaggaaggttcatgaaaggtgctcggatgagtaaaatttatttcattcatgagtggggtcacattcgtaaaaaagagccaaaaaataagcagcggggacatgccccgctgcttattcttcgtcttcagtttcttttttatcaaacgtgattccaacaacactcacattaactgcgctgatttctagcgcagtcattgttagaagtgcttgtcgaatattttcttgcaccttctcacaaacttcaggaatggataaaccatagcttaccacaacgtatgcatccaggataatgccatcctcatcaagctctaccttgacaccttttcgatgatcttttcgcccaaagcgttcgacaacacctgaagcgaaattccctctcatttctgcaacaccgtcaacttctgaagcagcaatactaccgattacttcaataacttctggtgatatttcgacttttccaagcccagtatcgtgctcttccatttcaaatgattgaagttcattcatattgaacacctcacttagaattcgttgattgttctgttaaatcatatttctcaagaaacttagtattaaaatcgccacttacaaatttctcgtgattcattaatcgcatatggaacggaatggtcgttttgacaccttccaccacaaactctccaagagctcgcttcattctagcaatcgcttcttctcttgtatcagcgtaagtaatgagctttgctaccattgaatcatagaaaggcaaaatatcataaccaggatagacagcagaatccacacgaactccaaatccacctggagggaggtacatgtcgacctttcctggagatggcataaatttcttgtcagggtcttctgcattaatgcggcattcaatcgcccatcctttgaacgttacatcttcctgggtgtaccgcaacgtttcgtcagaagctgctcgaatttgctctttaattagatcaatacccgttaccatttctgtcacaggatgctcaacctgaatacgtgtattcatttccataaaataaaaattccctgttggctcaaaaataaactcaactgtgcctgctcctgaatattgaacagcttttgcggctcgtacagcagcatcgcccattttttttctaatcgtttcatctagagctggagagggagtttcctcaacaagcttttgcaaacgtctttggattgaacaatcccgttctccaagatgaatcgcatttccatgattatcagcaagaacctgaatttccacgtggcggaaatcttcgataaacttttcgatgtagacaccaggattaccaaatgctgttgatgcttcttgttgggtaatgttaatcccttttactaattcattctcatccttagcaatccggatacctttaccaccaccgccagcggttgctttaataatgacaggatatcccatctcattagctagagctaccgcttcgtctgcaccgctaacaattccttctgaaccgggtacaattggaactcccgcttccttcattgttgttcttgcaacgtcttttgtacccatacggctaatcgcttctgggcttggtccaacaaatgtcacattacattctctacagagctctgcaaagtcagcattttcagaaagaaatccataaccaggatgaatggcgtcaacacctgttacagtcgcaatactcatgatgtttgtgaaatttaaataactgtctttcgatgctgttggtccaatgcaataagcctcgtctgctaacctaacgtgcagggcctctttatcagcttgagagtacaccgctaccgtttcaataccaagctcttcacaagctcggataattcgaacggcaatctctcctctgttcgctacaagtaatttcttaatttccatgccatcatcacctatgctttcactaaaaacagaggttgtccgtattcaactagctgtccatcctcaactagcatttcaacaatttctccatttacctctgcttctatttcattaaaaagcttcattgcttcaatgatgcagactacgctatcttctgaaactttctctcccgttttcacgtaaagttccgattcaggattcggacgagcatagaacgttccaaccattggtgattcgattttatgtaatgattcatcttgtacttcttctttttcagccgctttaggttcttcttttacaggagaagaagccggcatagtttgatcaacaggctgttgtgcaatagtttgctgtacaggttgttgaacaggtgcttctgcatattgcacttcgtttttctttaatacaatcttagatccatcactttcatattcaaattcatcaatgcttgattgatcaattagtttgatcaattcgcgaatttcttgaacttttaacaagatttccactccctgtcgtctttttgctaattttagatagtaaggaggttttctgtatagaagacactctccaacttatagcgattatagcataataataatgaccattagtatctccaataaaacttacagtcaatcaaacctctaattaagaccattatataacagctggtcctaagcctatttatcatatcatatcttacggttacttggtagaagtcaaacttgcattacctcctccactaagggtaacaaataaagaaatcgttttcactactattttttgaaaacgcgcctaattataaaaaaagagatggagtaatctccatctctactttgccacaggctgaaattctacagcgattctatgaccttcccctagctgttcttctgctagcaccataatgttatttgcttcttcatttgatagctgatccgctttaacaattactcttactttctcgtcgtcaagcgtataaaccactgcatcgctatacccttctgactttatcacattttctaaaactgattccttttgagacaatgccattaattcttgacgttgttcgtgcgcttcatttcgtaagtctgctgatgcttcgcttgcaatcacagccgtataatcttcaatcgctgcatctcgctgttcttgaatttcaagcctaagcgcagcaaaggcttcatcgccggaaacattcatcgaaacggatttatcttcaacaccattcgtttctttcgcttcttctcctttcgccccttcctcgctttgctcctgatctcccacatatgccacattatccgtaccaggtgtcatgatgtaataagctgataaaacaataattaaacttagcattgttaataaccataccgtttgcttttttaagaccattttatgattccccctttagttttttcggcaaaaccatcacccgatgacttttcacatcaagtagtctcgtcactgcatcgacaatcatttttttcacttccatgttttctgctccgaccgccacgacaactacacctcttacaaccggcttcttcgtacttactacgatcggtccttgaccattatcattctggacaataacgacttgttcatcgcttgattgttcttcaatctttctcgaacctccctcgtttggagattcataagtatatttatcagtagaagtgctgtttttctccacaactttttgctctgtagaatctaaattaacaatgacagtggcgtctgacactccagccacttcgtctaacgcttcctttaattgtgtttcatacatattttcatattctgacattgacgagggactggactttttttgactaaaagcttcttcactttccgatgaactctcctgctcattgaacacttgctggcccgggtcaggtgtcgagaagaaactaccggaaaacatgaagatgacaccaagccctgctgcaataattaaataataaagcgggattccttttttcttcttcggttttttcaattgatctagccagcttgttggtttttcatccatgttacctattctcctcccttcacctgaacgccaacctggtttggatataatccccattcatcagctagaaaataagcgactttctttgactgtgcatctgttgagtgaacctcttcttccaaaatatcaaatgataccgatacagcttcgacttcctgaacatccgtttctaccgccttacttaccgttactgcaatttgttcaatattcttttctccctctgcaccttttagctcaagacctacatgtgtaatttcaaggttaaactggtctctcaactccttttcaacctggcttttcatttggacagccatttgttcttcaatatatgcagcattggatgcttgtatttcacttttctttgattctatctgattttccattcttacatccggagtcgaatctgtgagagccgctgaccttaacattgaatcaaaatcttttgtgaagattgttagaataggcgatagaataacagccattaacattaatccgatgaccattttgacatatcgctgcatattggaatttggcaacagcaattcaagcacggtagcaagtaaaataagaacaatgatattcgtgatccatcccgtaataactgccacttcaaacctcctaacgcaccattagcgtaatatttccagatgctataataattgttaccgctaagaaaaacatcaatgaaacaatggcaagagctgcaaaaataaataaaatactttttgatattacattaagagactggataattggtcctcctcctaatggttgaatgacagctgccgcaatgttgtaaatcagcactagtgataaaacttttagtgcagggaaggcacatatcaatagtaaaatgacaaccccagctagtccaaccgtattttttaagagcactgaggcacttagtacggtatctgttgcgtccgtgaacattcgtcctacaacaggtataaaattaccagttacaaatttagccgcacgaatcgtgacaccatctgctacggcagttgaggcaccctgcactgaaatcacgcctaaaaacactgcaaaaaatactcctagtgtaccgatcgctacgtttcgtagtaaattagaaagctgagtaactttgtactgctcactaatcgtacttacaatggcaagaactgcggacagaaaaagcattggtagtacaaacttctgaataagcaacccaccagtgttaactaaaaacaggacgattgggtgaaaaaaagctacagaagccacgccaccaacagaagcaatcaatgctaaaagtagcggaattaacgctaagagaaaccccatcatattcgctatcgcactttctgtatattgaatcgccacatgaaaactattaagcgcaagaataattaaaaccatatagataatgccatacgccactgtgcttactgctttatgttcaaaggcattttgcatgttttgtaacagaatgctgaaaatagttaacaatattaagctaccaagcaatttgccgtggacaagcaattcatgaaaaagaaatttcaacaaacctaataaataagcttttaaagaaaattgtttttctccttttataaattccaagaaggaacctttctggctttcaggtaaaaagccaccatactcttcgatcacttcgtcccaataggcctgaatctcttgtaagccgagtgtattcaactgcttgtctacaatttgagtagttagcagctcatcttcttcgccctgcgcaagtgctgtagattgaaattgcaataaggtgaagcagaggaatagtagcatcaacatcgtttttttcatgtgaggcatgtcctgctcctccctcttatgatggtaaaagtttaagcaccgtttcgataatcagtgtaagaatcggtatggccatcgctaagattaacaatttaccagcaagttcaatcttcgaagcaattgccccttgaccagcatctctcacaatttgcgcaccgaattcagcaatataagcaattcctataattttcaacaccgtttcaacatagacaatttccacatttgctttcgatgccaaactttctaacatttcaataatatgttgaatttctccaattaaatatagaaaaatcaaagcgcctgtgaaaaccgttattgtaaaggcaaacacaggcttttgttctttgacaacaatgacaaggaaggtagcgattaaacctaaaccgacgatttgcaaaatatcaattgcagtcaccccctaaccctggaaaaggaagacccctcgtattttctgaaaaagatcgtcaatgattgtgattaccatataaaggacaacgataaaaccaattaaggtaacccagtgcgcatattcctctttccccatttgcttaagaatcgtatgaagcattgccacaatgatcccgatacccgctatttggaaaattgtattcacatcatgattcatttccgtttcctcccaatgactaaatcaatagaatgacaagaagaatccccccaagaacaccaagactcttaaacatccgttcatacttcatttggttgtctcttgcttcactttcttctctttctaaatgaatcaaggcaagtttgatttgtttctgttcatgctccctatcgtgttgtccaatagtggcaccaagttgtttcattacttctttttcttcttgcttaaaagccgtatacttccaaacctcatccatactttccatccacgcttcataagctgtgccttgtccagcatcgagctttttccgaaatgaatcgaaaaaccaggaaattgggtggcctacctgtctacaaatgtgactacaggcaacactgagcggtgtcattccatatacaatttcagcttccaatgactgaagtgccgcttttaactgccgcaattgtcgagatcgttcgctcacagttcttgaccattccacacctgcccacgtactcgctaaaataatgagcactgcacctaatagcttcatgctagatcacctttttacgtcgaatttccttacccgttttatctttgatcgcatgaatcgtcccaggaccatttttacgtgacagttcgacaattctttcaaaagatccagagttcaataaacctttcatacttggccttctgtgtaaatcatccatactcgttccgtggacagttacaacaagattaataccagcattaattgcttcaacaatagcttcactatcttcttttcgaccaatttcatcaacgatcaatatttctggactcatggaacgaatcatcatcatcattccttctgcttttggacaagcatccaaaacatcgacgcgatttcctaaccgatgttgagggattccatggacacaaccagcaatttcagatcgttcatcaacaatccctactttagctgacggaatccttcttacgtcatcgccttcagccattattcgagttaaatcacgtagcatcgtcgttttaccggattgaggtggtcctagaataattgtatttgtccaaccccctgcataaagatatgatacaagcggtacagctataccaagcttttgttttgcaattctgacattatatgatgcgatgtcacggatcgctttaacatgtccgtttagcgtaatgacttttccagcaagtccgacgcggtgtccgccttcgatcgtgacaaaccccttttttaattcttcttctaacgcgtacagggaataatgactaagtttatttatcatttgtgaactatcatcttttgatataaagtatgtttggccgtttaagagaggaaaattcggttttccattgatcattatttcaagcggacggttaatgcgcattcgaatttcttcaattgttgatctttccatctctgtgtattgacccaggattttctttacgttttccggaagcacacgaagagcttcttccacgaatgtccctcctcccactgcttgtttctctctacactactattcctattacgatcgaaatatgtctctatcaaatctatgagagagtcccaattaaaataaagcctacaccaattacaatgaaaagaatttttgtaattgatagatctcctgctagaccaattagtcccgctgtcatagtaactacaaggatgattggccccacgatggctaaaaatgcattgatcaacattgcggttttaagatcatgaataactagaatcaatacagctgcaatgagctcaataacaccagatagtatgcgaagtaaacccattacaagaacggaatgaatcatcctaaccctccctaatctgtacaacttatgatgacaccgagtatttcagaagaataagttatggatcaattcttaaaagaacacaaaaaaaccaccctaatgtgggtggttatcttgcttttaaaccgtgtaatataaattgaactgttatttcaatttctttctcatcatcccaatctcgatcaggaaccatcatatatctcgctagaaaaaaaccgagaatggcggttaatgaaagtcggattgcagaggaaggtgggatttcaatcaattctcctttttcttgaaagtgaacgactacttttccaaatcgatcaaataaatctttcgctatatgctcgataaattgtgtgcgaagctcttcatggaaaggaatttcctgaataaggattttcacaatcggtaagtgcttacgaataaatgtttgcctatttcttacaactgcctttaagaaatcttcatagtgctcatagtcttgttttagtactttatctaaatcttttacgataaaaggagcaacaagatgactcatgacaggtgtaacaatagctagaagcaaatcttttttcgtgcgatagtggcgaaatatcgttccttctgctacaccagcacgcctggcaatttcgctagttgacgaagcagaaaaccctttttcctgaaacatctcaaccgctgcttttacgatgcgcttttgcttctcagttaaatctccggaatcgctcacttcttcatcaaaaagccattccatgctattctctaccttcttcatatgctccccctgattctaaattcgtcgatgtttttttagtgcgtatatgtttaaaatcataaaaacgattgaaaatccaagtaaaacaagtaaatcaatccatatatctgttaagccttgccctttaatcataacacttcttagggcatcagctccataatacaaaggagttaacggaccaatccagctaagatagtttgaaatcgtatcaagattaaatagtccagagaaaaagatttgcggaacgacaacaagaggaataaactgaatcatttgcaattcattttttgcgaatgaggatagtaaaatgcccaatgttagtgcactcaacgctagcataagtgtaatcagcaagacgtaaaggaaagctccttccatcatgagatcaatcacataaatactatataatgctattatggccgattgaagcattgtaaataatccaaaaccgattacataacctgttacaagctcccacctttttattggactagccaaaactcgttcaagcgtcccttgtgtcctctctcttaagaaagaaactccagcaattaaaaacacaaaaaagaatataaagaagcctactagaacaggtccaaagtgatcaaatgaactcatgtttttcgagccaaacaaataggatacttctaaatccatttcttgattgtttcccattgaactacttcgaatcatatctatgactgctcgattaatagaaggatcgctcccctcaagatatagctttttcgcaccattcccaaaatcaatcacagcatcataatcttttttcaaagcagattcaatagcttcatctgacgcaatggtttttacactagcatggttttccatttgttcaacgatcgattctggggtgtttcgtacgcctagtttcaattccaagtcttctccgttaaaaacaagagatagcatggttaaaatgataataggtgccacaatcatcaaagccatcgttcgtttatcacttacaaactgcctcaatatccgtttcacaactgcgattattctcatttcaccccacctccaaatgaaagaaacgcttcctcgattgttactgaatcagtttgtttttttaattcatccggtgtaccgactgcaatcaattgaccatttcggatcatgccaagccttgaacatctttcagcttcatccattacatgcgtcgttaccagtatgagtactccattacttcttagtttttcaaacgtccaccaaattttttgtctaagagagggatcaattccaacagttggctcatctaacagtaaaatatcaggattgtgcaacaaagcaatggcgagggataagcgccgcttcattccacccgaaaaatcttctactttcttttgaagttcattttctaaatcaacgagctgcatagcctctttaatacgttctttttgatcacgtcgatggacaccgctgagagttgcaaaaaacttcaggttctcataagcagttaattcaccatacaaagcatccgcctgcgccatataaccaattttcttcatcatactaaggttaggcattttcgtatctagcaccttcacctcaccttcagtagcctcttcaataccacataaaagttttactaaggttgtcttaccagagccggatggtcctaaaagaccgaatatctcaccgcggttaagtgaaagtttaacatgatctaaaattgtagttttgccgtagtcctttgtaacatttgcttcaatcgcatctttttgcatttgacccctcctaaaatgagtgattactcactttattttatcacgaaatcattctttgtaaagtgagtaatcactcatttttaaatacaaaaaaaccgctcatacagagcggttttaaaaatcacttcactatcctcgtgatacatattcacctttagaagtatcaataatgagaatgtctccctggttcacaaagaacggtacttgaaccgttaaaccagtttcaacagttgcaggctttgttcctcctgaagctgtatcccctttaataccaggctcagtttcagtaacaacgagttcaacagtatttggtaattccacaccaattgtttcttcaccgtaggtacgaatggaaatttccatgttttcttttaggaatttgagttcataattaatttgctccgcaggaagttccacttgctcataagatgttgtatccataaatgtgtgcatatctccacttgcataaagatactgcattttacggttttcgatatgagctttagaaaccttttcgccagcacggaaagttttttcttgaataccgccagtacgaaggttacgtagctttgttcttacgaaagctgctcctttaccaggcttcacgtgttgaaaatccattactgtccagatcccattatccacttcaattgtaagaccagtttttaaatcgttaacagaaatcataggtagtccctcactttcattattcgccgagaatcagcaattccttagtggaatgagatagcgtctcattgccagtctcggtaatgactgtatcatcttctattcgtactccgcccttaccagataagtaaatacctggttctacggtaacgaccatacccggttctaacaccgtatcagatttagatgaaagcccagggccttcatgtacttcaagaccaacaccatgcccgagtgaatgcccaaagtattcgccgtaaccttttgcagcaattaaatcccgggatatagcatctgcttcttttccactcattccaggcttaatttgttccatcgccttaagctgagcttcaaggaccgtgtgataaacacctttaagttcttcgccaggatctccaacagccacagtacgtgtaatatcagaacaatatcctttataataggcgccaaaatctagtgtaattagttcgtttttgccaataactttatcacttgcaacaccatgtggaaggcttgagcgaatacccgacgcaactataatatcaaatgaagacgaggttgcgccattttttctcataaaaaactcaagctcattggatacatcaagctcggttaaacccgtgcggatatagcttgtgatatgttgaaaagcagcatctgctatttcagtagcttctttcaaaacgtttaattcactagaatctttgatcatacgttgtttctcaagaagtccatttataggaacaagacttgcttcaactttggattcatatgttttaaagatctgatatgtaacttgtgtttcttcaaaccctaactttttaacgcctagcgcatttgctatttttgccacttcatctacaataggccctttgtgttgtacaatctcaaaaccctttgcttgctcttttgcctgatcaatatagcggaaatccgttacaaacttggcttctttctcagtaattagaacaacgcctgaacttcctgtaaactgagagatatacctgcgattgcttgttgatgtaattaacatcgcatcaatatcatactctttaaatgactgacgtagattctcaatacgttccaaaacttcgtcctccttcagaattataaaaatgattgcaacgctagttcataacccactaatccaaatcctactatctgccctgcagtgacaggggaaatgacagacgtatgtcgaaaagtctctcgcttatgtacatttgaaatatgtacctctaccactgaaacaggaacactagcaattgcatcacggattgcataactataatgagtgaaggcgcctggatttataataatacccgaagcattctctgcttcatgaatccaatcaattagatcgccttcgtgatttgattgacggaaaatcacagttgcctcattttcactagctaattgagataatcgctgttccacattttcaagcgtttcattcccataaatgtcgggttcacgtttacccagtcgatttaaattaggtccgttaagcacatagaatgttttcatgccagtctccttaatcacgacgattcggcagttctctttaactcagatgttgcaaaaaaaagagaatgttccatgaacattctaccatagcttcatttgtttgaataggaagtgcgcttttgctggttctcgtgatactcaaaagagatcgaatagccaatgaatactccataaagcaaatagagacagattgttgtgataactgtattgcgatctagttttgtaattgttggcaagtcaataaacattggattaagcaagtagaatacaataatccatagtacaaccccataagcaagccctgctagcatattattaattttcacaagcgttattttatataaaaatgcgacgagaatggaaacgagtccaattgtaaggataccaatccattgacctagctgttcattcttccactctccaagtgcccatggtgaaagaattaacgaaggcggtattttcgtgaacttaaacaagtaagttaaatacccaataagcccccaaaacagtccccccgctattccaatagtaacaatttttgatgtgaaagaaagaggttgctcttgcttattttgttcaagctgctcgttttcttttgagtcctgctcgttttcttttgagtcctgctgcttttctttttccattacattcacctcatacctagcatttcctactgtacacgaaattatttattagaaaatatgtgtattgaagagattaaaatcgctaacgttggggaaaatgattattaacatctcttatctagaggtttttgcctatttcttgtagaatggtattaagtacatttatttaagagtataacgtttcaaaacattctacttcatacttaggttggtgagagatattgtcagatactaataagcctgcatatggcgggcaagcggttgtggaaggtgtcatgtttcaggggaaacatacatctgtaaccgctattcggcgaaaggatggatcgattgattatctagaagttcccaaacagccgaaaccaatccgaacgaaacttaagaagatccctttcatacgcggagttgtcgcaatcattgatgctagtggaaacgggacgaaacatttaaatttctctagcgagcgttacgatgttgatccttctgaagatgaggaagttcttggcaaagaagagccttctaaactaactctcttattaggtgctgctgctataggcgttatttctttcgcttttgtgaaaacgatcttcaccttattaccagcattagctgcagcttcactggagtttatatttccaggtcatgtggttcagaatttaatagaaggtttcattaaactgattttactgctcggctatatttatttcatttcactcacaccaatcgttaaaagagtgtttcagtatcatggtgcagagcacaaagtgattaatgcttatgaagcaggattacccattacaatcgataatgtccagaaacaatcacgactgcattatcgatgcggaagtagctttattcttttcacagtcgtcattggagtgtttatttatctattagttcccactgaccctttatgggtgaggttattatatcgtgttgcattaataccagttgtccttggtgtctcttttgaagttcttcagctaacaaacaaagtgagagacatcccagttttgaaggggcttggctatcccggattatgggtacagctcttaacgaccaagaaccctgatgatcagcaagtagatgtagcgattcactcatttaacgaactactttctcgagataaattacgagaggaagatgattcaagcacaaaagttgtttaaagatgaacaggaggtgaatcatttgtcgcgccgtgttgttcaacctctgatttatttattaataggtctcgcagctattggttttttatggaaaatattcacagacccaagcggacttttcaagcagcttcttatcactgcagccattgccgtcgtgatcatctttattgccaaaaaactgatggcaaaaaaaatggggcaacaatcaactgcctatcaaagagctgcaaaacaatcttcaaaattgaaaaagaagaaagctgcacctagaagaaatgctactcacctgcgagtcatcccttctaaacgacttacgcctaggaaacgttcattacaagaaaataagaaagaaaatccttttacggtcattgaagggcgtaaaggcaagaagaaaaacagagctctgttttaacaattgtgactttaaagtgaaaccgtgcttttagcaagagttttcatttgaatttaaggtgaagagcctttaaataagaaaggatggctgatattcagccatcctttcttttcatttcgggcattttccgccacgtattgagaaattgagaagttcgctccttacctaacatgattaatttcttctgcccctgtctctctaatttaaatgcagtggttatatcttgattaatcggaatgaatacgatattttgagctttttgctcttcaatgtatcgtgcatcatgagcccgtttcattgtttcaaaaagagcctgatacatgtcaacggcatttgatattttattttcagaaatttgattaaagtttgcactcagttgaaaccctagcacagggcgaagcggttttttattatcaggcggttgaaaaacccacagtggaaaattactcaatatccctccatctaccatgtaatgttttttcccattaatggaatagagaggctgaggcttaaaaaagaacggcaaacttgcactcatacgcactgccttagcaactgaaaattgctctggcacaaatccatagtgggcaaggtcatcaggtaatacaacaagccttcctttcgtaatatctgatacgataatcttaagagaaccttcaggcagatctccaaatgttgaaatccccttttttttcaataattcccctacccaaagttctaggtcctttccagaataaagaccaagattccaatataacatcaaccaacgaagaagcgggaatgtaaaacccgaatttttctctaatagtgaagtcaaatctgtattaagcaatgtgttttctaattcattccccttataccctgcaatgatcaatgcagcaataagagcaccagcactcgttccagctgttctcttaaatgcaagcccttttttctccacagcttgaagtgctcccacaagtgcaattccttttactcccccacctgaaaacactccgtcaatatacacatccctacctccttccaaccttattaaagcctaagcttataagctgagatttagtacagaaaaaagatattgtttcatattgataaatcctttattgaaaaaaagaacaatccgattacacctcggattgttcctcgtgagcttcttcatttttccgctggacttccctaagttcatccactcgtccattcgtttcttcaaaatattgcactagatctccaattcgatcaatggcgtcccaacttaaatgatgctcaataccttcaacgtcttcgtatatgttctcttcattaaccccgataacacctagaaattgttcaagcaaagcatggcgatcaacgagtcgcttgcctagctttttccctttgggagtaagcatgaagccgcgatacttttcgtaaacgacatatttacctttatctaatttttgaatcatttttgttaccgaggagggatgtacctctagtgcttccgcaatgtctgatacgcgagcatacccttttccgtctattagtgcataaatacgttcaatataatcttccatacttggagtagtggccattggattccctccatcttttattccatttaagccagttaataaaagcatacaccatagtatgggcggatacaaggaaaggttccatatgcttttattaagagacaaaccttggtgaactacctaaaagagacacaaaaagatgaaggataaacgtttccgcttatccttcgctccctgatcctaaagtccgcacttcagctgcgcactacaattatcacatgtattacatccaccgatttcttttacttgccctttccgacaaactggacacgtatttcctacttcagacccgattgttacatcagttgaacgaaggtcagtgattgtatcaacaagaacaacttgtttcttttcttgcataccatcctcaaattcaagctgctcaaatgaattatcctcagctttaagtgttagaacttgagaatcacggctaccatctacataaacggtgcctcccttagccccgccattataaagacgctcataaacagcttctacttgctttacagaatacccttttggcgcatttaccgttttagagatcgaactatctacccagcgctgaatgacacattgcgtatcagcatgatcttcaggcgcaagttccattgcggaaacaaaccattctggcaacttctctggatctgcttctggatttctctcgtagtattctgcaagtatgtctgctttcacttcgataaacttaccgaggcgaccactgcggtaataagagaacgagaagtatggctcaaggccggtagaaacgccaaccatcgtccctgtactacccgtaggcgctacagttaataggtgtgaattacgaataccataatccataatgctgtctcgtaaatcattcggcatttgttgcatatagccagtgttgacaaaagcttcacgtaacctatttgtttcttctgctgtttcaccttcaaggaacgggaaactgcctttttccttagctaagtcaactgaagcacgatatgccgttgtagcgattgtttcaaatatttgatcagttaacttatttccttcttctgagccgtacactgtttcgcaatagatcaataaatcatgaaggcccattactcctagacccacgcggcgctcgccaagagcttgtttttcgttttcttttaagaaataaggcgttgcatcaattacgttatcttgcattcttacgcctacttcgacagtttctctcaatttttcgaaatcaactgttttcgtctctttatttgccatttcagcaaggtttacagccgcaaggttacaaactgaataaggcgctaacggttgctctccacaaggattcgttgctaccactttttgtccataagatgtagcgtttgttttttcattagcattatcaataaagaagattcctggttctgccgagtatgttgcacaaatattgataagatcccatagctcttttgcctgaactttacgatacgttcttacagggaatccttgttctttccaatcacgaacatcacctgattcatgccagttctcattgtaaaaactcatttgttctttcgtatagttttctacatcaggaaagcgcagttcatactcagcatcattttcgactgcatccatgaaatccttcgtaagacaaacagaaatatttgccccagttaagaaatctggattatgaacagaatacgtaccaccagtcgctaatttctcctgtgcgtcctgcatcaccttttcttcaaaaccgcctgtaccagggatactccgataatttaaaatgctttggtacatcgatctttcagcatcagaaagaggagtgaatttcagtttatcttctgcaagctttttaatttgctcgtcttttgtgttttccaccagaaaacgaagaatacgtgggttttgcatttttgaaatgataaattcaataatatcaggatgccaatctgcaagcatgatcatctgtgccccgcggcgtgatccgccctgctctacgagatgtgtaagctttgcaatatcatcaagccatgaaacggatcccgatgactttccattaactcctcttgcaagagtgttcctcggacgaagagttgatccatttgttcctaccccgcctccgcgactcataatttccattacctgtttgcggtgctccgaaatgccttctcttgaatcttgcggaaacggcataacataacaattgaaataggttacttcagtatcagcacctgcgccataaagcactcgtcctgcagggacaaagttcattgatgaaagttcattatagaaacgatcttcccaatatttcttttccccatccgtcttctcaacatctgctaagccccgagcgttccgtcgtgcaatttgctcatagtaaacttcaagaggcttctcaataacgtccaatgaacgtacaattaagccagactctctctcttcttcagtatccaggacaccgacatagtcttcatgaacagcaactgtcgctttctttgaagctagatccagtttttcaatatatccaagacctcgtgctgggaactttggatcttccttaatcgttaagacgacaaaatcacctttttgtaacgtctttttttcagtatctttaaaggcatagcgatccagcataacaagacgacttacacccttgtgactaagatgcatatcctctgtaatcggatgaacctgcgcgaacatctcaatatctttatttaactgttcgatgttaatggaccttcttttttcattggtttttattgtcatataaacccctccgtttcgacatttatacatataagagcaactctagatgtatgtaactgtgataaatcgtcttgattaatagtagcacatgtccatcatgcagacaatcattttcaaccatatatagtgttcagaattctttacccaatactacatatagtaaaacggcagatgttcgtttgatttgtcaactttcaaattaagtgaaaatacgagattacactcgataaatcaagattgaattacaagaacagagaaaaaagatgaattttgtctattgcacatttatccacactctgtcttttgatcttagcctatcttttaataaaatgcgtttagtttattgcaacaagaataactttagaacatttgttcctctatagtcaataggaaaaagcacccatggcaggtgctcatttactaaagttccattcgttacttgcatacttctccatcgctaaatggttcacgtaggcttcttgttcttctgatagctcaaatgggactaactcaatgttaagtcctttttgaaagccatcataaaaggctttaatcgcttctgaaattgatatcggtgtatggcgaagtgcattaatagccaccgctttttttctgaatcctctttgcatccgttcacgaatacggtcatttttaaatttaaagcaatcaaacaatttatcttcatcaatatctagcaaaatagacccatgctggagaatgacacctttctggcgcgtttgagcactcccagccactttccgtccttctacaacaagttcataatacgagggagaatcaaagcacacaccagacctcggagccctaagttcctctttttcttcctcagtttcaggaacagaaaagtaagcatttaaaccaagtttttgaaaaccaatcaataggccttcagaaataacacggtacgcttcccttactgtagttggcatatcagggtaatcttcagatacaataacgctgtatgtaacctctttatcatgaagaacagctcttccacctgtcggtcgtcttacaaagcccaatccatagttctctacggcttccatatttatatctttttcaatacgttggaagtaaccgattgatagggttggaggattccacccgtaaaatcgaatgactggaggtatgctcccttcactgtgccatttcaataacgcttcatctagtgccatgttatatgctggagaacgttctcccgaatcaataaatgcccattgcttcattatcggtactcctttatcacagttagtttctaacacctctcctattctagcagaggtgaaaatggatgaccaatgaacactctcttattttacaaaagaaaaatcgatacgtgacaggcattatttctaaccatgtttctttttaaacgaaaataaaagcctaacaacctcaggactacctataggaactagaaaataatatttcgcatttaactcggtaacctgcagatgaattttttatttattctttttttcttttgcggaaaggggaaaagacgtgtaaacttaaggttgtcgattttacttgaaagggtgtaacaaagtatatggaatggattatcgcattactcgtcgcgatcattgtgtatgttgtcattactcgctacatacagaaaaggaatttgaaaacgttaacggaggaagaattccgagcgggctatcgtaaagcccaattgattgatgttcgtgaaccaaacgaatttgataacggccatattctcggcgcaagaaatattcctgttagtcaactaaaaatgcgtattaaagaaattcgcaaagaccagccagtctatatgtatgattacaatggaattattgtagctcgtgctgccagcatccttagaaaacaagggattaaggacctttatcagttaaaaggcggcttcaaaaaatggggcggaaaagtaaagaagaagtaaaaagcagctgcatagcagctgcttttttatttccgaaaagtatttaattacgctgatacgaaaggtaggttacgctttttggtatcgtaatattggttttctagcagcggtcgtttcatccagtcgaccaatgacagttgtatgaggagcttcctgaacaatttcagggttatcttctgcttctttagcaatctgaagcagtacatcacagaattcatcaagcgtttcttttgattcagtttctgtaggttcaatcatcatacactcttcgacattaatagggaaataaatcgtaggtggatgatacccaaaatcaagcaaacgcttggccatatctaacgttcgaacacccagtttcttttgtttcttaccagaaataacgaattcgtgtttacagtgctgttcatacgggagcacaaaagcatcttgaagacgtctcatcatatagtttgcgttcaaaaccgcgttttcagatacttgctttagtccttctggccccatcgtacgaatatacgtataagcacggacgttaataccaaagtttccataataaggtttcactcgaccaattgattgaggacgatcatagtcaaaacgatacacatcattttcttttacaagaactggtttcggaaggtatgggattaaatctgatttaacgcccacaggtcctgaaccaggtcctcctccaccgtgtggtccagtaaaggttttgtgtagatttaaatgcactacatcaaagcccatatcccccggtcgagctgcccccataatggcattcatattcgcaccgtcataatagagttttccaccggcatcatgaataattgtcgccatctcggtaatttgctcttcaaatagaccaagtgtattcgggtttgtaagcataagtgctgccgtgtcatgagttacaacacgctttagatcttcaagatcaactaaccctttttcatttgacttaacggtcactgcctcaaaaccagcaaccgtggcagaggcgggatttgtaccatgggcagagtctgggacaatgacttttgtacgattaaaatccccgtttgcttcatgataggcacgaatcatcattaatcctgtccactcgccgtgagcacctgcagctggttgcagggttacttcatccatacctgttacagcgacaaggttttcctgaagattgtacatcatttctagcgcaccctgaaccgtctcctcttcttgaagcggatggacaaaagcaaaaccaggataccttgccacatcttcgttaatttttggattatacttcatcgtacatgaaccaagcggataaaacccagaatccaccccgtgattacgtttcgataaggctgtatagtgacgcattagctgcagctccgacacttctggtagctccggttcagttttgcgattaaattcctccggtaaccattcatctaaattaatgtcaggaacatcaagttcaggaagactgtatgaaatacgctccggttcacttagctcaaatattaacgcctggtctttactcattttgctccccccacttcttctacaaacatatcaatttccgcttttgtacgattttctgttactgcgacaagcatgtgattgttaagttcagtataatcgcgaccaagatcatacccgccgatgattcctttggttaataacttgcgattcaattccttgattggaccgtcaaccttaataacaaattcattaaaatagacgccattaaacacagtctctacacctgcttcttcaagacgtgctttcgcataatgagctttttttatattttgctctgccattttgcgtacgcctttctttccgagcgcgctcatagcaactgaggaagctagcgcatttagtgcctggtttgaacatatattggacgtcgctttatccctgcgaatatgctgttctctcgcttgtaacgtaagtacaaaaccacgctgtccattatcatcagttgtttgtccaatcaaacgtcctggaactttccgcattagttttttcgtcactgcgaaatatccgcagtgaggtccaccaaattgagccggaataccaaacggctgacaatctcccacaacaatatccgcacccatctcaccaggtggcgttaagcgcccaagcgccagtgggttacttgaaacgacaaacattgctttttgctcatgtactagcttttcaatatctggcaatggttcaagttgcccgaaaaagttcggatactgaaccatcacacacgcagtatgttcgtcaatttcttgcttcaacttatctaagtctgtaactccattgctcgaatcgacttcaaccacggataagcgttgccctctagcataagtatcaattacggcacgcgcttctgggtggaccgttttagatacgatgatttttttcttttttgtttgtcctgcacttagcagacccgcttcagctagagccgtaggaccatcgtacatcgaggaattcgctacttccattcctgttaattcactaatcatcgtttgaaactcaaaaatagcttgcaattccccttgagaaatttcaggttggtacggcgtgtaggctgtataaaactcagagcgacgaataacgtgatctacgacagaaggaatggcatgatcataaacgcctgcaccgaggaaagacgcattttcgagagtattcgcattttgggatgatagctttgtcatgtaacgaatcaattccggttcaaaaagctgcttttccaccttaagttcgcctttaaaacgaatggcttctggaatatcctcaaaaagatcttgaacagagtccaccccaattgtttcaagcatttctttcctgtcctggtcagtcgttggcaaatagcgatgtttcatatgttcatttcctcctcagtatccgtttatttcttacgtttatagaatggtgatggaataacttttgcttttacacgcttattgcgaatttccacatctagctcagtatccatttctgtatactctttcttaattagcgcaagacctacgttcttttttaaagttggcgactgtgtacctgttgtcacttctccaatcagttgttcccctttataaacagggtagttcgtacgaggaatacccctctcaatcatttcaataccaaccaattttcgctccaagcctttttcacgctgacgaaggagagctgatttaccaataaaatcagcctctttactagttttaacagcaaaaccgattcccgcttcaagcggagagatatctttagttagctcctgtccataaagagccagcttagcttcaaatctgagagtatcacgagctcccaggccgcaaggtaaaatattttcaggttcacctgcagataaaattgctttccagagagcaggagcatcttctgaagcggtatatagttcaaatccatcttcacctgtataaccagttcgagaaactaacgttttaatatccgcaatcataatatcagcttgaaatttaaagaaaccaatcgatgaaagatctgtatttgttagacgttgcaaaatgacctccgcttttggaccttgaatcgctagttgagccatctcattcgatatattgttaagggatacaccttcaatgatgtgttcctcaagccagtcaaaatccttaacggtattcgctgcatttacgactaataagtaatgttcctccgagtatttgtaaacgagaaggtcgtctaccgtaccaccatcctcatagcacatcgcagtatactgggctccattcactttcagtttgctaacatcatttgtcatcatcttctgaaggtaatcaagggcttttttacctttcaagtcaatttctcccatatgagaaacatcaaataaaccagctcttgttctcacagcttcatgctcttccttaatactagaaaattgaacaggaagcgcccatccaccaaaatcaatcgttttagcacccattgacttatacgtttcaaataacggggttttcaataactcactcattctattccctcctataacatcgaaatcaaaatcgtttcatttaatcctaaccaactatgcaaaccaaaccatgtgcagccattaaaaaaggacagagaaaacccgctgtcactagcgcgttttctctgtccttttgacctgaaagtttctcctcgcatcagagtgcgaggattacatctttggcggcttaaagaagctctctccagaggtgcgtctaacaagagtctttttgcctgagagattcacaaatttgcttgctccttcggcgctgcatctagcagtctctcctcttgccttcattcgcttattttcagttttaaggtattggattgtacggattgattcatactattaatgctttcgatttcaatcctaccactaccataggagcgttggcaacaatctttttaataatggaagtattttaactactatattaaacacgaacattattatacattaaacatatatcattcgtaaataacgatttaaaagaaagggttttcattttgagaactgaattacaattcgatcaagagtggacaaacaactttctcaaacaaattgaagaagatggaccatgggctaattgggagctttttaaactggctatcgaagctgaacaacaccgagcaatcccatcctttaaaggattacaggctcctacataccttcctgacttaacaccacacccttatcaactcgaagctgcacggcgagtcgttgaggagatgaacggaaaggctattctagcagatgaggttggtctcggaaagacaatcgaagctggtcttattattaaagaatatatgattcgtgggttagtaaaaaaagttcttattcttgtcccagcctcgttagtgtctcaatgggctatcgagcttaacacaaaattttatatacctgctgtcgttcaacgaaaaagctatgtttgggatcagtgtgatgtcgtcgtttcctcgattgatacagcaaaacgtgagccccatcggtcaattgtttatgagcaacattatgatatggttatcatcgatgaagcacatcgtttaaaaaacaaccgaacaaaaaactatgaatttgtccaacatttgcctaagaagttctgccttctattaacagctactcccgttcaaaaccgtcttgatgaagtttttaacctagtatcattactaaaaccaggtcatctcggcagctttgagaatttcgaaaaggattacaaaggaaaagaaaaaaatgctgaagatgaagaaagacttcgcacacttatacaaaaagtaatggtaaggaatcgccgtgaggatactggtatggattggcctgaacgcattgtgaaaactgtaccgattactttctcacctgaagaagaagatctttatcgttcagttgaagcattgaaaaaggaaccgatttcaacccgtagtcaattttcgattattaccttattaagagaaatttgctcaagtcgtgaagccgcctatatgacgttaaaaaaaatgcttgagaaagattctcttgatgaagtcacacaaaccttcatccactccttaattaaaaaaattgaaggtgttccaacaaattcaaaagcacaaaaagcccttgaactaattcaatcaattgaaggaaaagtcattatcttcacggaatatcgggcgacacagctatatttacaatggtttttaaaggagcacggtatcacttccgttccttttcgaggtggatttaaacgcggaaagaaagattggatgagagagttatttaaaaatcacgctaaagttcttattgcaacagaagctggcggagaagggattaaccttcaattttgtcagcacgtcattaactatgatcttccatggaatcctatgaggattgagcaacgcatcggccgcattcatcgacttggtcaagaaggcgatgttcacatttataattttgcaacaaaacatacggttgaagaacatattctcaccctgttatacgagaagatccagctgtttgaaagtgtcataggtcaactagatgaaatcttaactcgcctcgggatgcgtgatatcgaaaaacatatttctgacattctacttcattccgaaagtgaaggggaaataaaaattaagatggataatattaaagaactaatcaattatcaaaaggaggattcagatgcatcaagaaaatattcataactatttgcgttcgtattttctcgcgaatgattgtcgtattctgcacgaaaaacctggcctcctcgatgttcaactaaccattgaacttgataaagagttaatgaaccgaccattttattggcattatcttgaaaagacaggcggaacgccacgaccgatgacgcttacgttaattacaaatcaaactattgaagagaaaggtgagtttgttcattttggggcaccaagacttcatcaaattttttcatcaacaaaaaaactcgcctcttccattcgtctgtatgaggatgtacaaacgagtcagcaacagcaatatccccttcatccctggctttgtcttaatataaaaatttcgtatcaatgtgacagaaaaaaacaccgtcttctttcacttggacttcaccttgttagtggagcggtagtcgatgactttcacaatttattactagaaaagtcgcttaccccaaaaattcctgactacgcttttaccgtaacacctatcattaaaccagaaagtggatttaaaagactcgaatctgttgtagaaatgctgctcacaaaagaggacgtacagtgggctgaagaggcaaggataagatgggcttctgatcagcaccttcttgatcaattttacgagggcaatacgaatgatcaacggtatgaagtagaaaaagaggcacttaggaaacagtatgagccaatcattactgcagaaattattaatggaggtattttccaccttgtgcccggtatcgaatcacaaccttatcccacttaaaaaagctcggactcaactgtccgagctttcacgcttctttttcttcatgaacatcgataccgacattggaatgatgccaaaccatcgaaacaaaaaaggctgcttttttgcctttcttacagcacgctgctgctgtctttcttcttttggttgatcgatatatgagacaacttgttgtgtcatatatttcactaaatcatttgatgacatcttgatcacccttttatcattgtcttcattattaagggtgtccaaatatttagttttttatcctatgcgttgacatatttcggcgacaatgtcttttactgaacgattcgtcgtttcaatttcataatctgcttgacggtataacggcagcctttccatgaatatggcgttaatcttattttgcttgttatctccggcaagcaatggccttgaagtatcgccttctaaccgcttaacaatttcttcaggctcacagtgtaagtagatcattgttccattctgtttcataaaagagcgatttttttcacttaagacgatcccaccgcctgtactaataataatattttcagttggaagatctttgagagacgctgcctcatatgatcgaaatgctttctccccctcactttcaaaaataactgggatttctttgccttgcattttcgtgacatgcttatccgtatcctctgaaggaagagctaactcttttgataactcttcagcaacagttgttttccctgatcccataaatcccgttaagtagatcgctttcacgtttatccctcactccattctaagacttctttcaatgtttgattgtattggaacatcgcaaaaaccttcgtttcattttgagttgttccatttagcgtgatgtaaataacttctgaaggagaagactgaatcgcggcgtgaaccgtgccttcttcgtaagtaaaagttttctcggtagtttcgacatctgttttctgtatatatgaaattgtatctttcattcctagcactagcaaggaatgctttttgaattgttcctcttcacgatctagaaatgctcgttcgttcattgtcgcatgacataaatgaaaaatgaacccaagaagaagtgtgctaattagcatcatcattgcagtcatatagccttgctcatccagttgcttaagacatttgaaaactaacttgtttctctttttttccattatttagatccacctcgatcattactctcctaccggagatctcaacggtaaattctctaatctcttgtaagacaatttcatgaccggcattattgacacgccgacgtatggaagatccatacctttcgtacttaacgatcgctccatcttttttcgttagttcaatactttccttactacgtacaatttgagtggcttctcgcacttctttagaaaacaagtgaaaaaacaaacgtgcttcttcttgctgaaaatctgcccctgagttttggatggccgcgctcattagtaaaggaagtacccatacaatagccaacaatatggtcaaggttagcattagttcaagtaacgtaacccctttttcattcctcataaggcaaacttctgcatatcaataattcattctttttctcttcattataagaaatgcacaacccattcggtgtttctgtcaagaaaaaaacagtgccttccactatttcttgcttaggaggtatcacattgtttaacacgaagtcattccagtaataatcgagcaaaatgaccgcttcttttctcgtctggatgttcattcgctcctcataaagttgagcataaattggcaatgaagcggaagataaaacagtaagtatagaaagggctgtcaaaccatcaagtaacgagtaaccattacaattttttaatatagaagcgacctgctcccacttgtacaacaagcttatactcctccttacccgccttcatataaagggtacctgccttttgaacatttccattaccgccataaacaatttgataccccattgttccttcatcaattgtgatgtgatctggaatctcattcgttctcactaccgttgaagcagtaccttggatactataaatacctttatttggggagattgagaatcgataagaagaaccatttacataagccagttcttgagtatacctaagatccgattgaatctcttccaggaaatgttttgtcaaagaagcattttgcgtaggtgtaacgtggagaaaaaccagtgttaaaagaatggataatagagaaagtacgatcatcatctcaatcaaggtatagccaaaagaatttattaataaataaaaccgcttcattcccctgctaaatccacttttccatctgtgatcgttaaggcctctcctcctggacaggtggtttcctccatatcaagatactcctctgtaacaagatcatcaattgaagctggaagtttattttcatttgctttgtatgctgctacctgtgtttgagcgactttaatcgttgcctcacaacttttctcttcaaccactttgttatttttcgtcaagccaggaacagcaattaaaagaagaacggaaataatcatgataactatcatcatttcaatgagcgtaaaccctttttcttgtttaaataagcttatccattttcttaatttcatttattacttcccccttaaatattttgcaaataataaaacatgggcattagaatggacataaacattaacatcacgacaagacctacaccgacaaaactaacaggctgcaaaatcataaaccctttcttgacaagctcctcaaatcgttcgccaaccacctccccatatagaataagctccctgccgagattaccacttacttgtccatgcattaaaatttctttgaactcaggtacatataaactagtgtgatcaaataaaccttctaacttttccccgcgcattaacgacagggaaacccgattagcttcctcttgaaaaaaaacaaaatgcgattgctttgttaacagcgaaaaagcctcggcaatggaaagaccactttgaagtaatagacctaagtgaagggaggtatgatgagtgaggtagagagggataaagaggtgaacgaatggtactttactataaataatcattttctgtactgcagaacttcgtttgtttttcactaacgtagaaagataaaatgcaatggaaagtacaataacacctacaacaatagcgggcataaaccgaacaagctccataaaaaacttcgaaataaatgggagaggaacatcgagcgtttggtacaacgtattaaattgaggcaataagtactttcctaccacaaataacataatggccgtcatccaaaatagaaagattggataagcaagcgtactgcgtagacgtttttgccattcacttcttgttttcattaactgtccagatgcagatatgcctgtcgcaaaatcacgctgttcagacatatacaagtaagataatatatctcctgggaagttaaaatcagctagaacatcatgaaaggagtccccaccttttaacctcacaataatcatttcaatgtttgatcgaatatgatcattctgatataaagcataaacctccagacattttgaaagcgaatacccctcttcaagcatcttccctacccgacaaagaaagtctgcttttcgatcaagcttccatttggatcgtctcacggttaaataatcccaactccttctctacggtttctttttgaatatagcctaaggcataggctctaagaatgtaatctttaattgtggattgacctggtatggttaaaagctctggataatcgagggctttttgaaggtggagacctgcgaggatttcaacaacagcaagctttctacgagttcttcttttaagacattcgagagaacacacatcacaatagggacactttaatggaactaaccgctgagttgcaacgcctcttaacgtctgggtgatgttatgaagtgggataccgaactcgagtaatcttggaatgcattcaagtgtacttcccgtatggagtgtggagacaaccaaatggccagtcatactagctcttattgcgagttgagcagtttgttcatcacgtatctctcctacgacaagaatatcaggatcatgccttaaaccggctttaaaaccctcataatacgaaagtccagccttctcgttcacttccatttgaataaaatcaggatttctcttttcgatcggatcttctattgtgagaacacggcgatgtcgctttacgcttaacgtttgaagtaaggaatacatggttgtcgttttacctgatccagtagggcctgtgatcataaataaaccactgttacagctaacaatctgaagaagtcggtttgcaattgagggaaaaagaaaaagttctttaaaggagtgagtttcatcttgtggcaaaatacgaataacgagactttcgtggtacggagttggaattgtagagagacggagatgtagttttcttgggtaaagaatcatatccatggcaccattttgaggacgacgtttttcaccaatgtccattccgctcagaaatttaaaatgagacaatagcttttcagcgacactcatcggtaaccataaagcatcataaagtcgattatccacccgaaattgtatggatgcacctttctcctttggatgaaaatgtacatcagatgcccccacttccatcgcttgtttgataatgtctttccccttttcttcaatattcagcaaaacacaccatcctttcgtctaaattcacgattttaaaatcgtaaagaaaaggattcgccaggtgaatggtaaatccttcttataaaaattataaatatatatttatttatctgtaaactctttaataattaaattaaacaaacgctcttcttcaagaaatgggtaatgattgctttcttcaaaaacaaccaactttgcattcggaatcatactggcgatttcttcggaaaaagaaaggggacactgtacatcatatctgccacaagcaataagagtatgcgtagtgatctcagaaagctgttttgttacatcaaactgtaaaatttctctagcaaagaaattcattcgagctgctgccatctttttatgtattggttttgaaaataagatcctatattgctctggtcgataaagagaaagtttcgtcctttcctcagttatttttttttcgttcattttgctcaagataaggatcttttaaccgctcaataaactgctgcatcacctcatattgaggatgttcaacatgatagatacaagcggaagaagaagaggcgtattctctagcagcagctcctacaatgattaatcctgccagcgaatttgatgcatgaatcccatatacgcagccgagcattcctcctgtagaatgccctgcaaataaccattttcgaatttgcaacgtttcgcgtatgctttcaagatcaaacaccgtttcaatcataaaaaattcgtacggggagttaacagagtctgagttacctgcttctttaagattcactaaatatacggtatagttttttgtaaatacatctgcaaaataatcgccactgttattaaatttggaataaagatgcgtcacgcaaagtggcggaccattacctttcacaaaaacctcaaacttacctcgttctgtttcaacgaaaagttgtttccacattacggatcctccaaactgatggaacttttaaaataaggatgacagtctactcaagaacgacagctgtgccgtaggcaataatttctgatgcacttgccataacagctgaagactgtaacctgaaagccactatcgcattggctcccttgctttctgcatcctttaccattcttgcgattgctctttgtctagcgtctgtcatcatttcggtatactccgttatttcaccgcctacaattgttcgaagacttgcaagtatgtccttccccacgtgcttagactgaacagtgcttcctctaacatatccaatcacttctttaatatttttatttgcaacttgatcagtagttacgatcatcatcattttgttcctccttctccctattccttcgatctttaataagcaaataaatcaagaaaccaagtgaaagcgcatatccgatcattacgagcggaacccatgatgtattgataaaaaacataacgacaatcagaacttgaaagattgaagcacttattaacaataatattttcattgcgcctatcacccgctttctacatccaccttaagaataccttattttgtgtgatttttcttgtcctgttttgccaactttatgccaaaagaaaaaagcgatacgcagagtcgtttccgcatatcgctgtgacatggattatgatgttatcttattcaaccaattgaccggacattcctataattaaggtgatttttttgccttctgctaaaaataagtataagtatctaaaccactgctcatactactagagcacgaaatcattgggctatagccaagcggtaaggcaacggattttgattccgtcatgcgctggttcgaatccagctagcccagttaagaaacgacagcaagtttctttttacgttgttttaaattttgcaaacccgatttgttgtaacctacaattaattttttgccgttagtcacgattgggcgtcttagaagctttggttcattatgcattagttcaagcatttcagtaagggtaagatcatcaatttcaacatttagcttcttgaatgaagtgcttcttctcgcaagaatttcttcaataccatctgtagataatgtaatgatttcttttaactcgtcaatcgaaggtgtatctttaaataaatgacgctcttcaaaatcaacaccattttcttttaaccatgcttttgtttttctacaagatgtgcaacttggataagtataaaacaataatttatcttccaatttaaatcctccccgattcgttttccgttgataactaactttacccacattatacaacgattaaacaaatattgtacaagaaaaagatttgtatttttgtgaacgatttgggataataaattggaacccttttcaaggttaaataaggaaagtcattattttgccatgagactagcatttacttttccacaagaactcatatataatacgatatgtatggggaatgaacgagcaagggaggaacttttatgcctagaatgtaccgagttttagctttctggactggcattttctcactcatgggctttgttggtgagatgcctgtattaggattgctgttccttggccaggccggcatgtttttagcgttaagttatctaaacttaacagaacgtacttatttgtatatttttggtgtatacttaactttgtttatggtcggtttttcctactggtcagtgttcatgatgacgcctggatcaggcggacattaatccgaacgaaaaaagacgatgcttacgcatcgtcttttttttggaacttttcttgaatcattactaaaaattgattcgactcggcaagccaccttactgctcgattttgtttatgttctctagaaaaaggatcatccgggctcgtttgctgaagaaattggagcaaaccctgtttcaaaagatattttccttgaggcatgcaatccacccacagcaatccatggcttagaccaatgtttttaattgcgtcaatatgaacatgagttgttatatctatttcaccaggcgtctgaaagacattgtcaatgaactgatgttttttatatcctctaacactgcctctccttctttcaggggctttccacccctcatttgtgtatccgtaatctaccgtaaagacttttccatgagatagccaacttcctacctcattcaaccattctcccatggcaagcggaatttcgatccgttgtccatcactaacctgaagctcgtgacacgctaaccagttcagaatctccgggtctgtacagggaatgtacacctcttcaaaacaatcatgatcattcaaaccaacacagacttcaactagttcacgttgtttttcaataatacgtacaggaaacgcatcaagcaattcatttgagaataggatgccatttaacttcggcagctctttcttaattgcagcaagtgaaggatagatccgcacggtatgatgctttgtgcgatcagcaattaattgctgatgataatgactggactccaatacaaaataagttaacttttcataaaacttatggtccacggatttcacttcatcaagaaaggaagaaatgaagtttccatcacctgaaccagcatcgacaataaccggtgcatactcgttctcttgtatgtcttttatgagcacttgggccattacgcgtgaaaaaatgtcacctacgcttgtcgaggtaatgaaatcacctcttttccccgtctttggtccattcttctggtaatacccatatttttgatgataaagagacagtatcataaaccgctcgaaagtgattaaaccatttgggctctgttcaatttcatttttaatgacagtttttaacgacattgcctataaagaaaatccatttaggaatgggttttcagtcatctcagtttcaattgttgtagcagggccatgtccagatgctacgacggtatgttctggtagcacaagtaggcgattatgtatgctcttaagcaattgtctttgattccctcctggaagatctgttcttcctatacttccagcaaagagagcgtcaccggaaaagacgatattcgcttcttggaagtaaaacgatacgcttcctggcgagtggcctggtgtctctagaactgtaaaattaaatgaaccgattgtcatatctccttctccctcaatgagatggtcagcaggattacctgaaatgttatcaacaacgggaaaaagttttgacccatttaaagaaggatctgaaagccaatttgattcatacgcatgcaaatataccggagctttataagtatcccttagtaaatcaacggcaccgatatggtcaaaatgagcatgagttaaaagaatagccaatggttttagctctagcttttcgatctttctcttgattcgtcctccctcagctcctggatctataagaagagcttctttattttcattccatatgattcctgcatttgcttgtacaggaccaacagccatttgtttccattccattacattcgcctccattgaaagattatgtatcttattctacactataaaaaagattgattaaaaggagatgattttactgaacttcgtgtatggcattgaaatgaaaccacctgttaataaacttcctgggttcatagcgcaaattgtcaaaaaaacggctgatctagctaacgtgatggaccgagataaacaacttgttattatatcagatcgaaccgaagctgaagcgcttcagaactactatcaatccaaaggtgttctcgaagacgttcatccactcattcacctttctcaagcatctgaatgtagactttctttcacggactacggcttcttttctcaaaacaatgaactttatctctacaaagaaatgattgcttggttcaggataattaaaggagaccaccaacaaaaagaaatggcgcttctacaaatggaagaacatatcatttgccgggatgaacagcttttttttgtcgatcgaatgcacttagaattaatgcaggttatcgctcgagcttacaacattgaacttacatttccgagtgaataacacctcgacaaacgaaaagaaaacggttaaaataagaaaggacttatcgtacataccatgcaagaaaaatttacgattcaaccatgcaacagtcattttacgggtatactgataatgagtgcatggatagggaggtattccaaatgggattagcaattatttttgcaatcgttactttattttgcgtatggggtgtttttcgttcccttcgtgaaaagaactttatgggccttgcctttgcaggattaacagtgcttgtattcggcgcctttactgttgctacaatgatcgatattcttttcggatctggtggcggcggaggccactaaaaaaacagccatttcggctgtttttttatgtctaagaagcacgtgatacctcatgtcacttttattttaaatgtcttttaactgattcgagtttgtcctccattttcacctttttatcgcggcgatcatctatacgtagattggtggctacacgctcaatacctgcctgaaaaggcgcttcatgaatcgctttaacaacatctaggagatcagaaatatccccttcaataagagtactcataggtgttaaacgatatgtaatccgatcagaaaacgattcaagaacctcctgtacatccgctacatacttactaacacttggtgtttccgttccaattggaatcactgtaacatctacaattgccattatttttttcctcccttttcttcaagtaactgcatttttcgattaaagaaaaaacgatacgttactaatgaaataatcatcgcacaaatggacacagatgaaaagatactaatcgaaatgacgatctgatagcgaatggcttcaattggtgaagccccaccaagaattaatcctgtcatcatccctggcaattgcacaaggccaatcgtctttaatccatcgacatttggaatcatcgcagcgcgaatcgtttttctaataatcatttgggaggcctgtgaagcatttgctccaagcgataatgctgcaagaatttcccctttactatcgtgaaattcgttcttcattctctcaaatgcaagaccagttgccaccatactattaccaataatcattccactcatcggaataacctgttcagatcgaaagggaataatatcaaatacgatccataacgacaaaacaaacacttcaataagaataagcgaagagagcgacaggagaaaagcatacggaataccttttcctctctttgatgcttgaagagaagcaatgactagcattacagctacccacaatcctaccccctgccaatctggcattgaaaacagaaatgtgagaacatagcctataaaaaacaattgaacgaccccgcggatagaagaccatatagctgatttgccgatcccgagcgaaaacaaataagaaagcgaaacaggaatcatgacaaatagaatcattgtaagcaaagaaaggttcgatatgttcgtcataaattacccttcaagaaagtgctttaaagtagcggattttggttgatgaaacaattcggttgtttttccttgctcttcaaccttcccttcattcataaaaagggtatagctaccaagtctttctgcttgcttaagatcatgtgtaatcattaaaatcgtcttcccttcttcattcacgagcttatgtaacaattcttccatcaaatccactgtccgcatatcaagtgcactggtcacttcgtctaataacaatacctcaggattattagcaagcgttcttgcaaatgccactcgctgctgttcaccaccagataaattttctacttctttcgttaaaaagtcttcaggtaactgtactttttccaataacttaacaccatcattgggttcccattttttttgaagggaaggaccaaactttaaattatcttctaccgttccatcaaataaatgagcctgttgaaacaccataccaatgtttcgacgcagctccgatataggaaaatcactaattcttttccctttaaagtggatttcaccctcatctggatcttctagtctatttagcaaaagcaataaactactcttacctgcacctgagggtccgatgattgtcgttaaactgccttccattaatgaaaattgaacatccgttacacgttcatttgatacattttctacttcgattagtttattcattgaacttcctttcttgaaatcgaattgcttcataaacacccttctcaaagtcccttgcttagtctatgtatttttcccctcctcattcgaatagcaaacttattcacatacaaaaaccctgcagaagcagggctaagatttcatgatagaagtttgtgtttgacgataagcagcatggtttgtaggcccaattccttttcctattgggaggccgtgtgtaatagcagccgtaatatattcttttgcaatagctacagcctcagggatcggcctgcccctagcaagttcagctgcgatacatgctgaaaacgtgcaaccagtaccgtgtgtatgttttgtttcaatacgctttgattcataatgataaaagcattcatttacatacaaaacgtctatagaagcttcccccgtcatatgcccacctttcacaagaacagcatctgcaccactttcgtgtagggactttgccgcttcttccatttcctttattgaagtaatgggtccacagtttaacagtgaggctgcttcaggaagattcggcgtaataacagcaccaagcgggaaaaggtgctctttcatcgcaagaatagcatctttttgtaatagggaagccccaccttttgcaatcattactggatcaataacaagatttgggactttatattcctttatctttttcgaaaccgcaagaatgatctcacttgaaaaaagcattccggttttaactgcgtccgcgccaatatctgaaaggactgcatctagctgtgattgcaccgcttcgaccgtttgcggaaatacatgatggaccccaagcgtgttctgagccgtaagtgctgttatcgcactcatcccaaacacgttgcgctcttgaaacgtttttaaatcagcttgaatcccagctccgccaccactatctgaaccagcaattgtcagtgctttatacattagaacctctccttattagatagactgaaaacgatcaggacgaaattgaccaattgcaatttgttgaggaacctgatcaatttcatccgctacaatttttgccgtaatcgggctcagtaaaattccgtttcgataatgtccggttgccaaaataacccctggtttctcaattaacttcccgataagtggaaaaccatcctgtgtagccggtcttaatccggcccatttatgaaatggatccatcttctcgagcacaggcatcacctttttgctccacttttcgagacgaccaatcccatgttctgttacgttcgtatcaaaattagcgatatcctccgaggcaccagccacgacagaaccattagctttagctaccaaatacccctggcttgtaaagacaatgtgatttaatagcggggcgtcatatgcacaaatttgtccgcggatcggatatacaggcaatgtaatgccaagctcttttccccaatacatcgaccaggcccctgctgccagaacaacctgatcactttcaattcgctcctgctttgttacaacagcataaccatcaagcgtcgcatctcccgcatattcgatgatatgaacacctagattacggcaggcttgtaaaagagccgccacatagccaggggaataaatatgagactcttcgggacaccataaagcggcaacaacatctctagagagctctggttctttaacccttacttcttcagcacttaagatcgtcgattcaacgttaaacttccgttgccatgcctgttttgtttcaagagaaaggcggtctgcttcatgataaatacaataaagactaccactttcattgtactcaaaatcaatatccgaataacgtttaacctcttcttgccattcaggaaaaatctgcaaactcctttggcatagtcggaaaaaatcgtcagggtcttcttcaatttcagaatatggagcaagcattcctgctgctgcaccagaagcctgtccaccacattgttgcgcttcgaccacagtgatgttatgtcctcttctttgacattcaaatgcaatggataaaccgatcactccgccaccaataaccgtgattctggccataaagatcccccttccttacctttgtattggactactggccgtcgcatacttctttttaggaattctacctgcgctataagacaaccttccagcatggatcgcatgttttacagcttccgccatcataactgggtttctcgctttggctatcgctgtatttaacagcacgccatctgcgccgagttccattgcttgtgtaacatcagcagcacttccaaggccagcatctacgatcactggcactgtaagcttctcagtaattcgttcaatattataaggatttaaaatacctagacctgttccaatgggagacccacctggcatcaccgccgaagcaccagcttcttgtaatcgataacagagtgcaggatcatctgaggtgtacggcaaaacaataaacccttccttcgctaagatttctgttgcttttagtgtttcgattggatcaggaatgagcattttttcatcttggctcacttcgatcttaatccaatcacttagtcctgatgattttgctaaacgagcgattcgaatcgcttcttctgctgatgttgcacctgaagtattcggtaaatattgaaatggtttttcgatgtgttgtaggattgcatcttcgtttggtgatgaaagattcactcttcgaatcgcgaacgtcagaacctccgcttcggaaacctcaatggccttattttgaacatatggatttgggtatcttcctgtacctagaaacagcctcgatgataattgtttccccgctattgttaatttgttagtcattttctcagcccccacctacaaagtgaacaagttcaatttccatgccatcttgtacattgatatcattccagttcgatcgatcaataattgttccgtctacctctgttacaaccagaccttcttgcaaaccaaaatggttcacaacatccttcaaagtaaccacgtccagatcgtgcttatcgccatttatttgtaatctcacttctcgatcacctcgctcttaatcgcttgctgaaataattcacatgttcctttcacatcctcacttcctactacttcgctaatcacacaaatacgttttgcacccgcacgtaagacgtcagaaacattgtgtagttttattcccccaatggctacaaatggaatagaaatttcagaaatcacttccttgatataatcagtagtaacagggtctaccacgtcgcttttactgttagtcggaaaaatcggacccgcaccgatgtaatcagctccccccttttctgcagcacgcgcttcttcgatacgatgagtagagattccgattattttatctggtccaatgatttttcttgccgtctctaaaggcaaatcatcttgccctaaatggataccttctgcatcaacagctagcgcgacatcaatatgatcattaacaataaacggtatactgtacttttttgttaacgcttttaactttagtgctttttcaagcactattttttttgaatttgttttatcacgtagctgaataatatccgctccacctcgtatggcttcctccattacgtcgactaaatctcgacctggatgaaattcttctcctgtaatcacatataattgaaactgcttcatgactggtttcctccaatatcgttatgactcacttcacatttctacaaaaaggagataaaagacgctagaacgtgaaaaacccccattccgcgtatggaatgggggtagtataaaacaccctaccgacttccctacgctggtatcaaccagatcaggttcaagggtaaaagaaataacggtttctttttctcagccttcccttacttgaaggcacccctagtcttagaaattatgaaattacttttattatgacaaaaaagctcttagaattcaagctcactacatatatagtgaagacagaaagatacctattgtattttgataaatatcgttaaattggctaactggtaaaggattctctcctttcccgatttcaacagtgaaaccaggtcttctaaaatcctgtataaaccaatccttgtaacctgcaaaactatcaacataccgaatgggtaggtagccacttaaccgagaaaattcagttacaagaatttccgactcagggggttcaagcccttcaaatccccaaaagattacttccccctgcgaatggaatgctagcgctctgtcaaatttctttcttgtagttaaatcagcaattgcaattgcttctggttcagtaagcggtgcttttcccgggtaatttcttggagatggctttgttggtttacgctcagcttctacttcccatttagccgggtattgattatttaaatcgacacctcgaatgttcgccttccaacgactaaattgatcactcccattgttaatatcatttgcaagagaacgatacggttcctcttcaggtaaaccattaatcacaagatcaacaccatctggattgaccattggaacgagtgacaaagaagtggattcatagagcggtgggagatagacaccgctaagctgctgactacttgttaattcacgtgcataatcatcgataaatttcatgattaaagttgtcgttaaccactcatttgcatgaaacgagccattcatgtgaacttttttcgccccagttcctaccactaattcaggaatgggttttcccattacagtttcaccaattagtcctcttttaataaatgggtagactccaagtattttgcggatatccttaacaagggtctcataatcataattttgattggggtttataagagaccatgtgacacgaatcgggatgttcactttctcacccggctttagcgaaaagggattttgatcatttagcaataaaacaccgtctaaaggcgcaccataccaacccgctattttccataatgtatctccttgtttgatggtataactttttgttacataaccagggatttgtatttgttctccaatcatcaactgatcaggatcttcaagattgttgctatctaaaatgagacggagcggtatttgaaagacacgactatatttccaaaggctgtccccacttttcactctaattttcatacttcaccctcccacatgtcatctccctcttacaataatatgactagaaggggctcctatgcttcgtgaataaagcttttctcagaacaagatgtttattatctccacttcttgtttagatgcatagaaaaaaaccacactttaaatgatattatcccttttaagtagacattcaaaaaaacctccatgatatggtggaggaaagaatgatgcttggaggggattttttctatggctaaaaaagggcagaggtttgagacgtatacagacgagtttaaacagaacgccgtgatgaaatacattaatggttctcaaagttacaatgctttagcggaagaattaggaataaaaaatagtacacagctgaaagtctgggtgaggaagtggaaaaacggtgagccgtttgatattcgaagtcgcagtgaggaaaatcctatgcatggtaggccacgcacaaactttaaaacaattgaagaagagagagattacctgaaagcgcaggtggattacttaaaaaagcagtatcaaaatctcgaaaaggagggaaaatcacgcaaaaaataaagtatgaaaccgtggaagatttaaggaataaagctcctgttacctggttgttagagattgcttccctccaaccatcaagctattacaaatggagatctagtaaagtaaagcgcgaagaaagggccaatcaagatcatgacatccaaatgcatatgatggggattcattttcttcatccggaaacaggttaccctactatgacgcgtttattgaaagaaagtggttaccacatcaaccacaaaaaggtgtatcgattgatgagcgagatgggcattcaatcggtgattcgtaaaaagaggaaaaggcatggatacactccgtctgtgatcaatccaaataggctaaaacgaaactttaaagcaaatggaacgaatcagaaaatggtgacggacattacttatgtatcagatggtaaacgattttattacttatccgtgattcaagatttattcaacaatgagatcgtaagctggaagctttctaaacgcaacgatttagcgcttgtactagatacagttgcccaatggacaaagaaaaaagacgtaacgaaagccgttctccattcggatcaaggctttcagtatacgtctaaggcatacaacactcgaatagaagaatacggcgttaagggcagccactctcgcaaaggaaactgcctggataatgcctgcattgagtccttcttttcgcatctcaaaacagagaagttgtacatcaatcagtgtaaaacagaaaacgagatcagacaagcaatcgaggattacatctaccactataactacagacgtttccagaagaaattaaagcaacgcgcgccgattgaatatcgacacgcgttggcagcgtagtttttttatactgtctacttgacaggggtaagaccaaaaagcgtggtttttttctggtagtttattttacctcggcatcttcttgttgctcgccatgctttcctaagaaacgaagcagatcgccgtatacaattttatctgagtaagcgagatctgtttttgccttttccatgtatggttcacaggcagctttatccgtttcttctcctgtttccttatcataacaaacatttttcgtataaaggttattttctgtaatgaaacttccatcacgaagtatggtgaaattatcctgttcttctgcaaacaggtcattaccaaacttaatcatatcttttgtttcaattccgagaaggtgcatgattgtaggcttcaaatcaatttgtccacctacttgatccattacttctccttcctggccagggatatggataatgagtggaaccttttgtagttctgtcgattcaaatggtgtaatttcttttcctagaaactcgcccattgctttattatggttctcagagataccatagtgatccccatacataacaaagattgaatcttcatatagtccttcttctttcatgcgctcaaagaattttttaacagcttcatcctgatagcgaaccgttgtaaaaaatctgttgacagtaccatcgtctgaagtccactctggaatatattcatcttctgattcaagagtgaaagggaaatgattcgtaagggtaatatatttagcatagtaaggttctggcattgtttctaaatatttaatggattgatcaaagaaatattcatctttcaatccccatccgattgaattatcaggtgtgactgtaaagtcattaatgtcatagaacttatcgtatttaagggcatcatacatgacgtcacgattccaaaaacttttattatttgcatggaaaacggcattatagtagccattttcacttaaaatttctggagacgcattgtattcatttcctgagtgcgtaaagaacaccgcaccgctcggtagtccataaagagaattttcaagaataaactcagagtcagaagttttcccctgtgctgtttgatgatagaaattagggaaataataactttcatcaataagatcattaaggaatggagtaatttcttttccatcaaccttttcgtttatcacgaaactctgcgtagactctagagagacgagaataatgttttttccttctgctttaccgaacatttcagggtttggttcaacatggttggctttcacatagttttcaatatcgacaatttcactaccgtcggcaaaggctcgttgtgccttcgctttcgattgtagaacagcatcataaacatgatagttataagtaccgatatatttaataagcatttcacgatcaaacgtccgagttaagagttgaggacgctctgtttcagcaaggccgacattaatagcaaaaagggcgatggcacttgcaaatacaatagcgatttcttttttcttaactgcgtatgtttttgttttacgtacaaataagtaagctgagagaagaatgatatctataaacagcaagaaatcaaaaccgcttacaagctctgcgatactgttaccaagttcacccatgttattcgtttggaagagaagcggtatcgtaataaagtctgtgaattctcggtagtagacaacatttgcaaataaaataaatgacccgacaaaattaatgatcagcaatattctattgcgatacttaggtgaggcaaataatgcaaaaccgaggaataacaagacagagctaatcgggtttaaaaataagataaacccttccattttattttcaggttcaatgttaaacgcaaattcatacactagatacgtttttaaccacagcagaaatgctacgactagaaaaaacgaatacttattttgtagctttttcatgttttcttagtacctccttagttggatataaggaaaagctaccatatctttctacgaccatacataatcgctatgatagtatgttttcgaaatttaatcaactaacttttgtccttattttagtatttctttcaacatttttttgattctatttagtgcggccattactaataacgaataagttgtccaaaaagtttcatctgtgcaaaataatcataaaaaaagaagagatcagactccactgatctcttctttacccctatcatgacagggataaacgcgaaaaaataggactatttaactaatttggttttaacaagccaggccccacctataactccagcatcattgccaagtgtagcaattgcgaaatctgagccttctttcaccctcggtaaagcatatttttcaaattggtgctttagtggtttcaacaaagcttctcccgctttagaaacgccacctccaatgacaatcttagatggatttaaggcgtttgctaaattagcaatggccaaaccaagatagaacgtaactttttcaactactttttcagcgtaagaatcattcgcttctgctgcttcaaaaatgtcacgagaagtaagttgattctgctccttatatgtatgataaagaacgctttcttgattagatgtaaggtcttccatcgcaatccgaacaatgccagttgcagaagcaacggtttcaagacaacctgttttaccgcagttacatgaagcacctgcttcagggacagaggtaatatgtccaatctctcccgccattccattcgttccatgaataatcgtaccattagtaatgatgccaccgcctactccagtaccaagcgttacgcaaagtaaatcacgtgctccatcacctgcacctcgccacatttctccgagtgcagcaatattagcatcattatcaataataaccggtaatcctgtttcaacttcaagcttatcttttaaaggaaagtttcgccatccgatattaacagcatggtagataaagcctgtctccatctcaatgaaccctggagctcccatgccaattccagcaaatttctctttgcttatttccatttcttccattttatcgtcgattgctcttgcaatatgcatcgtaatatgtcgacccgcttctgatttatccgtcggaatttcccatttctttttaatttctccgtaaaaatcaaggaacgcaagtttgattgttgtgcccccaagatcaacacctatgaaccatttttcttctttcatcatcatccgcctttcatgatcttgattttattttaaaggaaatcctttcttttccagaaatttcttcatgtacgctcgaacaggactcgttaatttatgagccatcatcgctgtccaaccacctgtgcgctgtccagccgtccgatacgtataataagatgaaatcacttcatcatatttcgttaattcatctttaaaaactttctcattttgttcatattcatctacgtgataaatgttttctagaggcaaacgcggtttaatatcaggttcctgatcaggatatcctacgcaaagaccgaacaatggaatcacgtattgaggtagtttcaataaatcatttactttttctagatcatttcgaataccaccaatataacaaattccaagacccattgattcagcagccacgctcgcattttgcgctgcaagagatgcatcgattaatcctaccatgaatttttcggtagattgaaccgtttctgtaacatcggttccgtgcatttctgccgtagcatgatgacggttaaaatcggcacagaatacgaagaaatggccattctcttcgacgtaactctgtccccctgccagctctgctaattgttttttcttctctctatctttcacaccgataatagagtatgcctgaatgtaacttgacgttgaggcagactgggccgctttgacaagaatattaatttgatcttctgttagtggcgtatctttaaacgctcgaatagatcgatgagcgagcatcgtttcaatggtttcattcatgtttgtctctctccttgttgatttcatttcgtaagatcattctggcgacaaggtaatcttcttttacgagaatcttcatatcatataattcttgtaactcatcctccattaattcaagatctccaagtctactaccagtataaacgatcatgccatagcgttttaaaagttgttgtatatcataaaatgttttcattttcctcaccattgctattatagcaatccatactcctaaaaaaaataaataagcacaaaaaaggacacattctttagtaaagaacgtgtcccttaacgatctggatcttttgtatgaaggactgttggccttcgatttttaagaggcatcggcgctcggaaaataacatcgcgaaaagcacgatatgaaaaaggaataaacggccacaggtatgggatatgaaaagattttgtacgaatgagaaggaccatccaaagagtgaagccgacaacaaaaccaatgactccaaaggccgctgttactacaagtaacagtagtcgaaacaaacggttggcgagactcaattcataagacggcgtcgcaaaggtacctaaagcggcaagagctagatataaaataacctcattaatgaataatcctacctcaacagctacttgtcctattaatatagctgatacaagaccaagcgctgtcgctaaagacgttggtgtatgaatcgttgccattctaagaatatcaattcctagttcaataagtaaaaattgaacaaataacggcagggtccccccctgatccactccaatgaactgcatatgcgagcctaataaccttggatttgtagcaaataaataccagagcggtaagatgaaaatcccgatccatacagcaataaaacggacaagccttaaataagcacctacaagcggtttttggcgatactcttccgcatgctgtaagtgatgccaaaatgtagttggtgtgatgagcacacttggggagccatctacaaaaatcaaaacgtgaccttcataaagatgaatggcagcagtatctggtcgctctgtataccggacaaggggatacggatttaaatgcctaccacaaataaactcttcaattgttttttcacccatcggtaaaccatctgtatcgatgttactaaccgattcctttatcctcttaacaatttctggatccgcaatatcctcaatgtaactaatacaaatatctgttttagaccttctaccaacttgcatatattccattcttagtgttttgtccctaactcttctcctggtcagtgacgtattaaatataattgtttcaacaaatccatccctagcccctctcgttacacgttccaaatcaggctcttgtgggccacgaactggataggttcttgcatcaatcatgataacttcgctcatgccttctacaacaagagccgttggacccgctagaacaaggtccatgacgacatcaaggtcgttctgtcgatcaatttcaacataaggaatatgaactttcatgagcttttcaagcggatctggatcaagttgttctggctcaagtcttgataataatttcattaaataatgcagaatatcatcttttacaaaaccatcaattaagaacatcgccattttccgacctgcatagtcgagatcaagttgaatcacatcaaagcttttaccaactcctaattctttatgaagaaaatctatatttttttcaaatgaatgactaactggatgaataatctttttttgagacattggtccccctcctcgtttccatcattcaccaatctcattcgttacatacctatcaaataattgggcaaagaaatgccagccttctctttgagaaggctggcatttacttcaatcaatcatctgtgataaaagatagcgataaattaaatgagctgtatgaagcattgaatcctcatgggtacgctcataagcatgagaagcatcaataccagggccaattagagcatgccgaacatctacacctgcacggatagctgccgatgcatctgagccatagtaaggataaatatctagcttgtactcaatatgatgttcttctgcaaggctgaccaaatgttctctgaggcgataatgataaggaccactcgaatctttcgcgcaaatggaaactgtgtattcatctgaggattgcccatcaccaagtgcccccatatccacggctatgtattctacagtttctccaggaatattcgaatttccaccgtaaccaatctcttcgttattagaaattaagaaatgtgttgtatgaggaagcgttttgttatcttcctttagtttttttatatttgcaagaagcagggcaacgcttgctttatcatctaaatgtctagacttaataaacccactctctgttaactgcacccgaggatcaaaggaagtaaaatcgccgacgcgtattcctaatttcttaacgtcttcagcgttagtaacacgttcgtccaggcgcacctccatattttgttcatctcgtttgatctctccattgtttttataaacatggacagaggtttggtgtaaaagtattgtgccagtaaaacgcttaccatctcctgtaattatttcacagtactctccttctatcgcattaaatcgaaagccaccaattaaagataggcgtaggcgaccatcgctcttaatttctttaaccatcgcacccaacgtatctacgtgagctgttaacatgcgttgtctagacgaatcagcaccttctatcgtagcaattagcccacctttatgatttcgcatcgtttctacaccaagttcttgcattcttccttccacccaactaattacttcatccgtgtaacctgatggacttggaatactaactaattctctcgtcgtttgtagaagctcttctgcatggaataagtctttcattgcaatcatcctttcaaattagcttgtagtaggggaaaaaacgatcttcatatttttgttttctatctcatacatatgatgacaagcttaatgaatcggagggctccggatgatcaaaagaattcactacgttatcatgcttggtatgattagtttttttgcgctcatccttgttaatacaagtagtaatcctgtcagggaatcatttacgtatttccctcccgatcctgacgttacatttgattcagctagtacatctctcactattttaacgcaggaagatgaagatgaatacacattgaactggaagactgagtcaactctttcagaaacggcatatttacgtcaagatttatcatttctttatgaagagggacgcttaatcgactccatgtccacttggaaggagaatacggcaagcattcggcaaaaaaaaggaatcacgagtgaagatagtggtcattatgaagccatcacttaccattatggggaaatccactacccaaatgatgtgataaaaagcgctcaaaaaatgagctacgaccagctatacgtaattgattccccaatgaccccactagaatcattcaaacaagcttcaagtgaagaagaaaaagaatggcaatacattcttgatcatgctatagatcagcaagctcaattggttttcaaatctatggtagctgaatataacttacaccctaatgattatacgattttatcactgacttcattagatcaatatgaaaacaaagcacttcctggcttatctcaaaagcaaactaccgatgctattggaggaatatgggaaggattatataagaattattttctaggcatcttactccctaatggttctactgaaacacctataggaagcactattccagtcatactcgttcataaacaatccccctatctacttatcctattccaaacaaaaactggaaaaaacgttcaattaatccaataccttaacgagcccttactagagcgtaaagatgaatcatataactaaaggaaagtgcctgctaatcaaataaaatcttcttcaattcatcataagtaacgatttcagggacttgatcgacaagattctgatcaaccctttcgtttcgagaattaaaataaatagcatcaaagcctgcttctaatgcaggtttaatgtcatgctcaaaggtgtcgcctatgtatagagatcgaccggtactacctaaaacgtagtgaaagagagaagtttcgggtttttccaaacctacaacttctgaaatatagatgttttcttgagggatccaccgaaacagttgtagtgcctcaatctttgctgtttgggtttccttctcaccgttcgtaatgatgcctagttgaatccccttatctttcaataaagataatatagaatcactttcaggatataactcagcgaaagaggcaactttggactgatattcttcttgaaaatcaagtgcttcttgttcagagcatgttagatcaaaaaattcattcgtcttacaaaaccgattaatctgatagcgctctcttgaccattctcctttttcataaaattcccaaaaatgatcacagttacttttgaaaacagtaaaccatttatgaactgtaagaggtgattttttcttatgcaacatattctttgcacaatgcaaaatggtttttttaaaggctttttcatgatcgtaaagggtattatctaaatcaaaataaatgtgggtccatttcacataaagcgcctccaatctgagtggaatcaaatcttactttctaatccttcttcttattttactcttttctatttttagaagaaaggaaaaacctccaccctttgaggtagaggttatgataaaaacgagctaaaaagtttgttacgtatacctgggaattttaacgagttgcctacgatgaagcgtctaattaccgcaacacccagtaggccatttaataaccgatagcgatattcatatatcacaatgactaaagataagagaacgagtaactttgttattttcatcatacgcctcctgaaacagtactatacttctactgtttgcaggtaatggcgtttttatccatagttcctatccaagtttcttattattccagtagcccaatattactgtgaatactggggataaccagaggaagatggcaaatggaagatagctcattaccggtacccctagcgtatctgcaaagaaagctcctgaaacgccccaagggattaatggatttattaatgtcccagcatcttcaagtgtgcgagaaaggtatttccgatctactcctgctttatcataaaaaggctcaaacgtttggccaggaagtaaaattgacaaatactgctcacccgttaataaattcactccaattgctgatgttgctgtcgcagagattaaatgccctcgcctgtttagaagcttagttaaaccgctcatgagcgattgaataatacccatggcttgaagaacaccaccaagtgcaagtgctaaaataataagggacacgctccacatcattgattgaagtccacctctattaataattccatttacgagatcactggacgtttcactcgcaaaaccattttgcatggttcctattatagaggagggtgaataaacgccttgtgctaacattgccacaataattcctgcaagtaatccagcaaataaagtaacgagaacaggcactcttttgacagcaagtacaaggacaagaagaggtggaattaacgtccatagcgatatatgaaattcgctttttagaaccatcattgcgttgtttagatcctccggattaacagaagaagataagtttttactcataataaaaaagaaaataaccgttacgataatcgctggaattgttgttcgcatcatgtgtcgaatatgcgtaaacaaatctacttttgccactgcaggtgcgaagttagttgtatcagaaagtggagacattttatcaccgaaacatgcaccagaaataacagctcctgctgctagcgccgggcttactcccattgcagcacctattcccatcatcgcaactccaattgtacctatcgttgtaaaagagctcccagtaaagcttgagacgataatggtaacaatcaacgcacttattaagaaccattcaggttggataaactgaagacctccatacaataatgttggaaccgttccactttgcatccagacagcaatcatcataccaacgacaaaaagtattaaaatcggttttaatcccgttgtaatgctctctagaagagccttctcaattgtgtcccacttcatcccgagtaagagtcccattattcccatgccaagtacgccagcaaggagtggaatatgaggctctacctttaaaccaataatactaaataacatccaactcattagtaaaccaataacaacaagcgcgattggaaatgatacttttttcattttctttctctcccttaatctatgtgttctcatcgattagttttgctctatctgtatttttccattaaaaaaagcccttcatcaattgaagggacgaagttcttcgcggtaccacccttattgacagcgttagctgcccacttataccccttttaacggatgggatgccgcgtactagttcatcagatgtaatttcacttctagacgctctggtttacagcaaccaccagatctcttctgctgctcttctaaagaagttacttgtctgaatcttcacttttgtacttttatgcttttgtgcgtttaagtaacatcgctattttatacttgaatccatccttctgtcaagaaaatgacggatgtaaaaaagcaccagccatacggctgatgcttttttacattccaatataccttgcataaagtgcttttgctcttccgctatcttctgttccttgaacaagaacccgaccgtctggaaataatacaagcctctccccttcttccaactgagctttaagtaggaaaggtgttttctttacttttgtcgttttttcaagttttactgcccattcttttagatcaaaatgactttcaagctgtatctgaatcgtttctctcccacataaagaagtaatatcctgctttgcacctgtttttaatgatggatattcgttagtttgacaagttggacaatccgtctttggtgaagaaaacttcatggcataactatgattttgccaaatatccattgttattaagctacgatggagcttctcataatcccccgcaatatatttcatgatctccgttacctggtacgacgcgataatatctacgataggagagataaccccgatcgtatcacacgtctcacctgtcgttccttctcctccctgaataaagcaccgtaggcaaggagtttcatctggtacaaataaagctgtcattcctcttgaactaacggcccctccataaacaaatggaatttgatttttataacaagcatcattcagaagaaatcgcgttgaaaaattatccgtcccgtccataacgaaatccatgccgtcaataaattcagtaatgttacttgcgtttacatcagctgttatggcgtcgatttcaacagcggaattcattttttttaatttgttttttgcagcaactgttttcggtaacgctgcagctacatcctcttcgtcaaataacatctgtctttgaagattgcttttttctacataatcacgatcgactattcttataaagccgaagcctgctcgaacaagatgatttgctatagcagtgccgagcgcccccattccaacgataagagctcgcgactgactgaatttcttttgccctaattccccgataggagaaaaaagcatttgtctagaatatcttttgaagtgatccatttaatctgtctccttttgaacaagtttaaattcttctcgtgtatttacatttaaaaattgtttttctcgattttcaacttctacaaaatggacatcaatagatttgaggagatcattcattctccttttccctgatgaaagtagctcttcgatgacaggctgacacgaagaatggtaaagagcacaaagaggctggcgccttcctgaactgacaggtataattgccattgcatcacgatgcattgattgctcttctattaaaagcgaaaataaaccatctgttacaaacggcatatcacaagctactgtaagataataatcaccattcgattgatttatcccagaatagatccctgctaacggacccatcccctcgaaagctgcctcatcttctattactcttatattttcagttacctgcatgttaaactgctttaataaattcattttggttacaatcatagcttcatctactacaggatgaagctgatttaacaccacttgataaaatggtttgtcataataagtagcaaaggcttttggagacccaaatcttcgagactcccctcctgctagcaataaaccagttattttcataacaacgctgcacctccaacgagtgcgccaataatagacgagacgaaattgactacatcattattcaaaccttttaagccttttattttgtgagtcttattttcacaatgaatatggtgctcggtttttgttccacacctttggcattgaaactcttcttgcaaggttcctccaattaacgtatcgcttaaacaaccgacaaagcctgcgagcgttacaaaggctagtgcttgaaaagataagtcaaaaacgaaagcaccaacaaccccaattaaacccgctcctagaatagatgcaaataaacctagcatactaactgctccagaagtgcctggtggaacaaatttcaatgtttttatatgaagcggtctacgcgtcgatagaacgcccacttcagatgcccaggtatctgaattagaggtagcaatcgctcctagaaaaatcaacaaccatgcatctccaggaaaaatgatcatcattactccagctaaagcggcaaccccgccgttagcaagaacctgatattgatctctcgacgaacctttttctacaatttcttccacgttatcttttaactccgttttatacttactccaaatcgttgaagacagaaaaaagatacccagaaggaaaagccctttccatgcaaaaccaagtgcaatggcgcaccctattcctgtagcagcaactgctccttttttcgaaagagctttagctttgtaacctagaaaacctgtcatagcacatataaaaaagtaaataatcatttaacgttaacaatctgttcatctgtgatgattgcttccacaggtaaatcaaacgtttcggttggcacattttcaacaacttgaaattggtaagcaagcgaaacagttgagtttgaatagttttgtaaatatcgatcatagtagccgccaccaaatccaattctaaacccattccgatcaaaaatgaggcctggtacaagcaaaagatctatttcgtcaggagggcacatttctgttttattgggacgtggttcttctagaccaaaatatactttttctaattgatcccactccgttaaataataaaaagtcatctgtttagttttaggattacacttcggtactgctactctttttccactattccatgctttttctatgattgtttttgtatttatttcacctttcatcgcaaccgttaagccgatcgtttctgcattagtgtacggtttatatgtataaagacgatcaagtatttgttgatcaagattcactttattagcagcagttatttcttttaattttattttcatatttgttcgccactcgtgttttgattgcatcatcattcctcctacttttctctcttactactagtttacgggaaaatgtgcaaataaaaaagcagtaggataacctactgcttactttgtttcgcgatgtaacgtctgctttttaagtcttgggctgtattttttaagttcaagacgatcagggttagtacgtttgttcttcgtcgtgatgtagttacgatcgcctgtttcagtgcaagccaatgtaatttgtacgcgcatgaatatccctccaaatcctatcaaactgttcatttaacaacatactttattatgataacaaacaaatctcattcaatcaagttgtttttgttgtggaaagtgcttcatatttttcaaggtaatctttcacaacatctacaaacgtagcatgcgaccatgttaaaggcgctactgatagtggttttcctgtatacggatgtacctgctctggtagtataccacttgagagggcctgtttatatacccaatctatgtgatgttttgcatcacgtaattgtttcagggtttgggcacgggaaattttccatttagcgatccacagagtacaaattacccaaggattacccggcacttcttcaacattttgcgattgttgaaaataataatcgcttacataacgcgctacaccaccaatgctcgtttttacagaaagtcttttttcaatctcttccatcgtccgaaccatgcgagggtcattagcaggaaaaaccccaaatgcaaataatccaaataggctgctttctattgtataatctttcgttatttcacctgtttcattatttcgataaagtcctcttaagaagcaggaacgcgtttcgtcatagagatgttcctcaatcccctttttaatccgctctgcccctttataatagctctcagcacgatcatcttctccgaacaaccttgcaaacgaatgagcagccatgagaccaccatagcaagcggatgctgtaaaactaaaaacaccaaatctttcttcccaaagatcataagaaggaagtggcagatcgagggtttcatccataaactgcaacaaaaattttgcaccgggtcgaactaaaaacttataaagcgattgagcaaattcaatatcacctgttgattggtaatgttcccagaacgcccagagaacaagagccgtctcatcctcttgtatcggaagctgagttttctttaaacgatcgacataaggatgccagctcgaacctacagagccatcaggattgtatttatgatgtaaatacccttcttttgaaagaagttctgcacagcagcgataaaagtttgtaaccattccatgataccctgctttagacatggcagaagcaattagcgcaccatctctaggccacatgtagctatagtgatcgcggttataatgcaaaatatctgagtcattcgctgcgataatcgtaccattttgattcgtttgtgttcgcacaattaatagacttcttttataaagagataggatatttggacctaaatcagtctccggaagcacggatttgtttacccatctattccaatacatacgaattttttcaaccgttaattgagtaccaatctcgctcacatattcatgaatgctactgacttcttctttcgttctacctactgtcatccagtaataagctgttttttgttgatgcggttccaactttgtttcgagtgaaaaagtactatcaactgaaccttgcgcaattggattaacatgtaaatgaccatcttcagcatcacgccacgtgccttcagcagcttgaaatcgctttaccccagtcgtgtactgttcaattccctctccatctagctcaccattgaacagaaaatatctgtagcgtttataatgaatcacagactttgtatccggacagaagtaagctgtgtcgcctacttctgtttcataaatatttaaatcttgatggaaaaaaagtcttacatcgcgactttgattttctaaattaacaatcgtaattttacgaatcattagcatttcacgttgatgcacgccttcttcaaaaacaagtttaattcctagatgaggatgtaccgcagtactatacgtcacgagggtatcctgatcataatttggctggatatcccattccgatgaatgtagccatgaaaatttcccatctacccaaaccccgattcgatttgcatgaccttgaacatgattttgttgccccacatagggataataaatatctcgaatttgtagaaattgatccatattgataagcagttgaccgtttccaatgactaaatgtcttggcattttgctaccccctatccatctcctacactagtctattgcagaagtggacaggtcattacttaacctttctaaatagattaaaaaaccacactcaattggtagagtgtggttctttgattaagcattcaggtcgtagcgcttccctttcacaacgtagatcacgctttctgaaatatttgtgcagtggtctccaatacgttctacatagcggcagataaaagaaagctgttgaatttggctaacactttcaggatgttctgtcatcaattcaagtaattcttttaccagacgtccatacatattatcaatttcatcatcagcatccgcaacagccattgcctgattaacatcttcatcatagaaagatgcaagcacttctttcagcatgttatttgctttctgagcgagcgctggaatttcttcgattggctttacaaatggtttatcgccaatacgaataatcgactttgcaatgttaaccgctagatctccaacccgctcaacatcagttgtaattttaagtgcagaaataagtcttcttagatcggttgcaagcggctgctccttcgcaattaaccaaatcgctgtttcgttaatctcttcctcaaggcggttgattttataatcattatcaataatttcaagtgctttatcaacatcctgattctttaatgcagtaatcgcttcatcaacagccacctgcgctaaagagcctagctcaagaagcttagtctttatttcatctaactgttcttggaaattttctcttactaccataaatgctcacccccgaaataattaaccgaaacggcctgtaatatagtcttctgttcgcttatctgtaggattagaaaataactggttcgtatcagaaaactctacgacttcaccgtttaagaaaaaggccgttttatcagagatacgagctgcttgttgcatgttgtgcgttacgataatgatactgaaatctttctttaattcttgaacaagttcttctactttaagagtagagattggatcaagcgcagatgttggctcatccatcaaaataacatcaggctcaattgcgagacagcgagcgatacaaaggcgctgttgctgaccacctgataaaccgtaagcattttcgtttagacgatcttttacttcttcccaaagtgctgcaccttttaagcttttttcgacaatttcatcaagtacttttttgttttttatgccgtgaattttgggaccataaacgacattttcatagattgattttggaaatggattcggcttttggaaaaccattcccacttttgtgcgcaaatcttctactttgtatttgttctcaaaaatgtttttcccacgatagttaatatcaccagacatttttacaattggcaccatttcgaccattctattaagagctttaataaacgtggatttaccacagccggatggcccgataattgctgttacctgtttttctggaatttcgaatttaatatcttttaaagcctggtcttttccgtaccataaattaaaattttgaatgctatatacagaatctttttctttaatctgttcttctgaccgcggagcttttacaaccttcttttcatccataattgttttcattttcaaaaatcccctttacacattgatgagagctttacgtatctacagtcttttagaaaatttatttcgaattaagacagcaattgaattcataatgagcaacattgcgagaagcacgataatacctgctgctgctacatcgtggaattcggtttgcggacgacttgtccagttgaaaatttggatcggcataacagtaaatcctgacaagaaattctcaggcaagtaggcaacaaacgttaatgcaccaatcattagtaatggtgctgtttcaccgattgcgcgtgataaagctagaattcctcctgttaaaattcctgggattgctgctggtaatacaacctttttgattgtttgccatttcgtagcacccatcgcataagaagcctctcgaagttcttttggaaccgaacgtacagcttcctgagcagcaacaacgataataggcaaaattaatagactcatcgtcaaaccaccagcaagaacactacgccccatttccatcatccgaacaaatacagttagtccaagtaagccaaaaacaatcgaaggtacacctgctaaattggaaatgtttatttgaataaacgttgtaaacttatttttctttgcatattcttcaagataaatcgcggttccaactccaattgtaagtgccactggagcaataactgccatcatccataaagtgccgaaaaatgctgctttaatccctgctttttcagggaaacgagacgcgaaattttgaaagaactcaagatttaagtaaccaattccttgagtgaatatccgatataacaagataacaagcaccacgagtgctaacattgttgcaccaaagaaaattcctttaagaatcttattttgtgctaatctggtttgcattttactttttacttttgcctgatctactagttgcattagtattcctccctgaatttacgagaaatatattgtgcaatgaggttcatgataagtgtgaataggaagagggtcataccaacagcataaatactgtagtaaatcgtcgttccaaaaccagcatcaccaagacttacttgcacaatataagatgtcattgtctgtatagactctgttacatctaatgtaagttttggtgttgctccaccagcgactgttacaatcattgtttcaccgattgctcttgaaattgcaagaacaaatgaagcaataattcctgataatgcagctgggagaacaactttcatagcaacctcaaatcgtgtagcaccaagtccgagtgcaccttcccgaatagcgttcggtacagagctcatcgcatcctctgagagagatgcaatcataggaataatcataattcccacaacgatacccggactcaatgcgttaaaaatagggagactcggaataacattttgtagcacaggtgtaacaaaagttagagcaaagaaaccataaacaatcgtaggaatacctgctagtacttccagaatcggtttaatgattcttcttacactatcacttgcatattcactcaaataaatggctgccgctaatcctaatggaatagcaacaagcatggcgatacctgtgatcattagtgtcccagagatcagtggccaaattccataatccgggttgtctccaaaaaacgggtaccaatctttattcgtaaagaactcaacaatagatactcgactaaaaaacgtaactgtttctacaattaatgtgaaaacaataccaagcgttgttaatacagagataattgcacataaaagcaataagcccggtacaagtttctccataaacttcgctcgtgattgatttttctcttttttgtctttaatcatctgacgaacagagctttgcatttattactccccctcacaaagagcaaaacaggataaagtgaggagccgtaactcctcaccagtctgtttcattttattcttacttaccagcgatttcgtttagcttatccatagcttctgtatacttttcttcaggaagagctacgtaccctacagcttcagccatttcaccagcattctcaagtgcatatttagtgaaatcatatacagcaggattttcttctactgcagagtgcttcacataagtgtatagcggacgagaaagtggttcatatgttccatcttggattgtttctgcatttggttctacagcttcaccgtcaccattaacgattggaacaacgttaagtctatctttattttctaggtagtaagcataaccgaagaatgccataccgtttttagaaccagttacaccatttacaagtacattgtcatcttcagaaagtgttgcttcttttaccatttgctcatcttctagtactacttcattaaagtagtcatacgttccagaatctgtaccagggctaaataattcgattttttcttcaggccattcagggttaacgtcgctccacattgttgcttcgcctaaccagattttcttaaggtcgtcaattgtaagctgatctacccaatcattctcagagttaacaacgatagaaagaccgtcttttgcaatttcaaattctgtgaagtcaataccagcttcttcaagtgcggctgtttcttcttctttgattggacgagaagcgttactcatgtctgtttcaccagcagagaatttctcaaatccaccaccagaaccagaaacacctacactaacttttacatcaggttgtacagaagcatattcttcagcaactgcttccatgatcgggaatactgtagaagatccgtccattagaacttcgccagatacttcttcaccagaagcttctccgccgctgtttgtgttaccggagttatttccgcaagctgctgcgaaaatcattaccatcgacataactaccataagcataatgcccttgaacttcatgttatttccccctaatggatgtttgtacttgtgacgaaccaggttgttttgtgtactggcctctcaatcacaattcttagaatacagcccagatattaatgttgtataaaccaaatgtaaagagattgtaaatgcttgtaggaaaacgttttaatttctctttttttggggaaataatagattttccccttctattcgctttaaatttcatttcatccaggatgtttctgttgttaatttgtccttataatataaaaaaaaccgcttttcagcggtttttttattcttacttattcaatttcttcttcttcatatccaattggtttcttagcttcatctttcagttcaaaataagcatctagaattcgaccacctatttttttgttcacggaaccagaagaagaatcattcacttcgggaacaactaccgaaatcgcaacttcaggattgtcataaggggcatagccaactagtgttaaattatacccatctccaatctgcgctgtccccgtctttccagctgcttgatagtcatcactttggaagtaaggatagtgtgtgcctgcagtaccattttcagtattcataaccatccacattcccttttggacatgagccacttcttcttcactcattttaattttgtttaacacttctggagtattttggaacagaatcgtatcagacaaaccatctttttcagaaggttcatggacttcttttaatagatgaggttcaatacgataacctccatttgcaattgtagaggtatattgagccatttgcattggtgtatacgtatcgtactgtccaatcgcaaaatctagaattttaccaaattcacttatcccaccatttaaccctgaactttcgccaggcaagtcaattcctgttttcactcctaaaccaaactgagagaatgattcttttagctcatcataagctgccgggtcataaccactactttcataaggagcgtagtcataatcagccatgctcatcgcaattttccacatatatacgtttgaggatctttgtaaagcaacaaggtctgaaatacgtcccatcgcattagccgtataagatgactttttaccttcatctttaaagtataaaacttcgtctacaagagtcgtatttggattaattactccatactgataacctgttaacaccgttgctcctttaactgttgatcccatcgcataagagtctccaatcacaccaaaagtgcgatctttgaactcaccattattatattctttacctgcaaaagacaggatttccccggtatttggatccatcatgacaacatagcctctcgttgctccatattgcctcgcatcgttaagctcttcatcaaggattttctcaacttctttttgaagatcaatgtctaatgagagtaccaaatcatttcctctttgtccttcaatcacttttggctcgcctactggctcacctgatttatcggtgacgtaagtttgcttttctttttgaccttttaggtactcttcgtattcttcttcaagatagctaatgccaactttgtcatttcgctcataatctcttaatccataataactcaattcatctttaggaataggtccaaccctcccaaaaatggtttgaagggtatctccataaggatattctcttgtggcgtctgcttgtatctctacgcctggtaaagaaccaagattttcactcactttagcaatttcatcttcagttaaaccgattttaattgtctgagacgacaaagcataaccagtgtccattgctctttttatagcagcaacttcaagctcttgtggattgtttttaatttcttctagatctttatcagtaatacgttcaatttgtagctgataagcttcactagactccatctcatcccattctttttcggttaactttgccttcgctttttctggattcgtgacaatccaataatcttttaaatctcgatctataacatcttcagtatctttctcaatatattcagctaatttttgagctagttcaagcttttcagcttgttttgtattctgtgttcgaatatatgtaagagcaaactgcggattattatctacaagaactcgtccgaaacggtcatacattttcccgcgaggtgcagttgactctgcagtcacgttttccgtttgctcagaaacacgctcgtattcttctccatttacaatctgaataacacccagtcgaagaattaaggtagaaaacaaaaggaaaaccgataaaaataatatatttagcctaaaaggtacatgatttttctttttcttagctttcacaataaactcccttcccttaaacaaatatagacacctgtttcagacaggtgtctctgatctctcttctccttactatacttagtgataataaaaaagtaaagggactaatgagctattgtaatgggtcaggagacggttctgccacagtcgctggagccgatcgaagttttcttacgaacaggtaaataaacgtatgtcccgctccaacaattaataacaaaattggaatacttttttcatcgttaaacagagacactgtaagtaggaataaaaggattgatacaattcgaccaaggtttaagtaaacctctcgaacaactatatactcaatacgcatttctgcagcattccatgctttaccaatgacatcataagttagtgaaatgtacggaacaagaagtagtggataagcaagagagatacaaataccgtacattaacaatcgcgcaaatgttagatctgttacaagtaagaatacagatgcataaagaattatccccccgtataagattgctttttttcgaaaccttggttttattaaacgagtcgccaagtaatacgctaaaaaggaaactgcggagtttacaagtccaaatgtaccgatagcaagttcactttccgtcgtaataaaaacaagtacgacgataatgaaaataaaagtaccttctcttatcccttgaaaaaaatgcgcgtgcaaaatatttagccaatcggcgttcgcttttctttcttgaaaaattcgggtaaatgaaaagttgcctttagcagaccgtcgttcaagaaagaaacttaagattacggctgcaaaaaacaaggccagtgaaactccaaaaattaccttatatcctgtaaatgcttcgagacttgaaataatcacacccgcaaaaatcggaccaatcataccggcaaaagaagttagtaagccgagaaacccattaaagaaatcccgcgtttcaggctccgtaatttcaaatgttaacacattaaacgccagccaataaaagccaaacccaattccaagtaacgagccaagtaagaccaataaatggctcgcattttgacctaaagaaaggaccgttatataaaagagggctagaaaaatgacgcctattcgtaagacgatcactctatccattttcttcgcccacctgcctgcaagaataaaggtaagcggctggctaattacagcggaaaggttgtatataccgatatcagcaaactctccggattgcttccacaaatacacattcacaaacgtatttgaaagtgcaatgctcagggcatataaaccaccgattgttagcaataacaacagatcttttgttacttctatctcaccaatcatatgttttatcactttcattaaaaactccccttttttcatccacccttattttgacttaattcttgctcgttatgcggaagaatcaaaaaggataaactatgtttgaaaggggactatgtatgtattattttctatatcgaacagattatcttagtaaacagctacgtaaccaactagttcaaagcattgaaactttagttaatgaagatagatgttcttttttcatttctaagatgacgcactatttccttattagttatcgaaataaagaagtgtcactcaccctatctgatcaacaagtacttgtaggttcacctaccgactttgaaaatggttgtgatttcacggattatttaataaatcatatcctttatcaattaggatctatttatacgctgattgaatgagaaatgaaaagcccccggcaaagtatgccgagggctaagataacctattttatttagctgcttcgtaacgcttagcaacttcatcccaattaacgacattccaaaatgcgctaatgtaatcaggacgtttgttttgatacttcaggtaataagcatgctcccaaacatctaatccaaggattggtgtaacaccttccataactggagtatcctggttaggggtacttgttacttcaagctctccgccttttactacaagccaagcccagcctgagccaaagcgaccagcagcagcgttagcgaaatcttctttaaagctttcaaagctaccaaatttctttttaagcgcttcgctcaaatcacctgatggctctccaccaccgttagggctaagaagttgccagaaaagtgagtggttagcgtgtccgccaccattgttacgaacagcagtgcgaatgccttcaggaagcgcatctagattgccaagaagttcttcaagactttttgatgcgtgttcttcgtgaccttcgagtgcaccatttagttttgttacatatgcgttatggtgcttgtcatggtggatcttcattgtttcttcatcgatgtgtggttctagtgcattgtagtcgtaaggtagttctggtagttcaaatttagccattgtgaatctcctcctcaaatataatatgtaacttgctgttagggcaacgttaattgccacttaaacatgatgacgtcacaagtttacattagcagaattgtcatgcgttttcaaataataaacatttgaatctccgcaacacagataaagtttcccctcattatatggaattaaacatcttaaagaaaaaattaataatcaagagtgtaagctaaggtacttaaaacataaaaaaactcgtcattaaatgacgagtgggatctttattgagtggtggctccggacggaatcgaaccgccgacacgaggattttcagtcctctgctctaccgactgagctacagagccaaatcatgttatcagtattaattttaattagtatgtagtttgcatttacgttaaaagtaattaggccttattatgagtttaggttgcccctaggggactccaattaaattctaacaaagaagtaattcgacgtagtcagaatttggtattggttgcgggggcaggatttgaacctgcgacctttgggttatgagcccaacgagctaccgaactgctccaccccgcgacaatataaatgtaatgatgctatacctgcttcattatgctgtgtactgtttcttcctctacaaggttatgcttcgatgcgttatccgtcgaaacaacttgttgttgattcttagatgtaacgctcgttgctccaccccgcgacaatataaatgtaatgatgctgtatcttttttcaacccattataaaaaaatggaggaggaagagggattcgaacccccgcgggcgactaagcccctgtcggttttcaagaccgatcccttcagccagacttgggtattcctccgatatgcatttggtggaccctgcaggactcgaacctgcgaccggacggttatgagccgtcagctctaaccagctgagctaagggtccctatgtaaatagtggggcggctgatgggaattgaacccacgaatgccggaatcacaatccggtgcgttaaccacttcgccacaaccgccatgcttttttatacaatcaatcatatggtagcggcggaggggatcgaacccccgacctcacgggtatgaaccgtacgctctagccagctgagctacaccgccatatggctccacaggtaggattcgaacctacgaccgatcggttaacagccgatagctctaccactgagctactgtggaatatctcttaacgacaagaactaatataccacatgattaaataaagcgtcaatactttttgaggatttatttatatccctttgaaaatcaatcatggaaatactatatcactctttcatttcaccatcaagaactacaaaacatagaccaaaaatacggtaatcatgatggcttgcagaacccctttcataactgcaccaccaagaaaaccgagcaaagatcctactccaacttgcacagactccttgaatggttttcgatgaatcagtaactctgctaccactgcgcctataaaaggtccaagaataattcccgcaaatggaatgatgaacgggccaactaacaaaccgatcgtactaccccaaatggcggcttttgatcctccatactttttaacaccaaataaattactcgcataatctgccacaaataataaaatggtaagcaatacctgaataacccagaaagaaaacgtcattgatccgaaatcataaaatacaccatacaaaataaacccaacataaataaacaggaccgctggaatgatcggataaatcaatccaacaaatgagataataaatgacgcaacgattagacaccaaaatagaatatccatatcttcactccccctctaactgtagtctattttatagtaaataacattttccttctatataaatacaaaatccctataaaaataaaaagaagcagaggcaatcctctgcttccattgtttattcttctccaataacggcttctgcgatatttaccgcatgatcaccaatacgctcaaggttactgatgatatctacaaaaacgattccagcacttccagtacattcaccttcatttaagcgaaggatatgctgtttacgaagcgttcgttccattttgtcaattttatcttccagtttcacaacttcctgtgccttcgctacatcccatttatcaagtgaatcaaaggcttcatgaagtgcagaaagggttagattaaacatttcatcaaggtctttcattgcaaggtcagtcatttttactttattgctgatttgataatcaaccaattcaacgatattctccatatgatcaccaatacgctcgatatcacgaacagagtccattaacataccatgtcgagttgactcgtctcctgacagggaagttgcggatagctgaataaggtagtctgtaatcttagtatctaaattgttaatggcttcttcatactgagcggttttttctgcgctcttctgacttttagaagtcaaatagttagaagcctcttgaactcctttataagcaaatccactcattcgtattacttcttctttcgcttgtccaagtgccactgaagttgattgttcaatgaacacaggatctagatgtttaggtttatattcaattgctgaatcatcaccaggaataatttttgtaactaatacagctagtaaagcaatgaaaggaaactgaatgacagtattagatacattaaaaataccatgtgcaaatgctattgtcatttctgaatttaaattcaatacaccttgaagataggatataaaaggggtgtatagggacaaaataattaaaaagatagttgtaccaattaaattaaaaataacatgggtaagcgctgctcttctagctgctaccgatgcaccaagtgatgctagaactgcagttacagtcgtacctatattatctccaaataaaaccggcatagccgcttgaagactcattgcatcctgggaaaataaactttgaaggacaccgatggtagcacttgaactctgaacaattacagtaaacacagtaccaattactacacctagtattggattttcactcatactaagcgtgaggtcatggaaagcctggagagttcttaaaggtttcatcccattactcattagttctaagccatagaacaatccaccaaaaccaaatattatctgtccaagataagttatctttttgtttttaacaaagaagattaatgctgcgccgatgaaaattattggtaatgcgtaatctttgattggtataccaataatgaatgctgttacagttgttcctatatttgcacccattataactccgatagcttgccttagagtcataaatcctgcatttaccaatcctactgtaagaactgtagtgcctgagctagtttgtaataagatagtaactactatccccgctagcacacccataaatgggttcgtcgtaaagcgatcaagaatgtctcttaatcgatcacctgcagatcgttgaaggccatctcccatatactttagtccaaacaggaaaataccaagacctcccacaaactgaaagatcatctcctgaacgttgagttccatcatttcaaccccttgcactcatgttttatttttttcgacaatactcaacaaagtcccttgtctattatctacatcgctcccctctttgtaaagagttaatatagaattgtaatgatattatgatgaaatcaagtttgtttcaagaaagtttcagcaagtttattgttcccatctacttatataagataaactggtttagtgggattactctcacatacctagaaaggagattttcaatttgaacgtttttaaacaactgtattatagcttattttctccaaaaatgatggcgcgattccgttttcaaaaactaggaaagccgatattgtatgtgtttctcctaatgctactttcttctgtacctatagggattattaccgcggtatcgtttaccaatgcttacgaagaccttaaaacacatatgggagatttacctgagttcactttagatgatggcacgctaaaaagtgaacagactgaaccacttataaaaaaagaagatggaaacacatttatttttgatactacagatgaaataaagcccgacgacgttgattcctatgaatcggctattgcgttcctaaaagatcgaattatcgtaatggatagtgggacaagacaagagtttaattatagtaatttcagctcaatgacttttacaaaacaagatgtaagtaaactcacacagaatttagataacttgctcccaatctttatcccactcttaatctttgtcgtctatttatttcagactggcctcaaatttatcggaattaccgttctagcgacaatcggtttattactaaagtcacttgcgggcagaaaagcatcttataaacaactttgggtactatcggtttattctgttacgatcccaactcttttctttactatcatggctctagtaaaaacaaccgtaccatttggatttcttctctattggtttgtagccatcatgctactctacctaaccattaaagaaattcctcttccgaaaaaacgtgtaacgaatgaacgacctaattcacctgaataaaaattttgattattttatcaaatcacttgcttttcgctttaaagtaatgtagattatgtaaaaagcgacacattaaaattccatatactttcaattcttatcaagagaagcagagggactggcccgaagaagcttcagcaaccaccggatattttctggaaaggtgctaactccagcaagttgaattcaacttggaagataagaagaagagcaatcaaagtcttcttcttatagagggctttttttattgcccttacttaatgaaaaggagattgattatgtcaaataaccattacgatacgctacttgttcaactcggtaataaatcagatccacaaacaggctctgtaaatcctcctgtttatttttccacttcctacaggcatgagggaattggtcaatcaacagggtttgattattcaaggacaaaaaatccaactcgttcgattctagagtccgcagtaaatgaactcgaacatggtgaccagggcttcgcctttagttctggcatggctgccatccaatcaatcatatctttatttaaaaccggagatcatattctcgtttcagatgacctatatggtggcacctatcgattatttgctcacgcagaaaagcatttcaacttatcgttcacctattttgacagccaaaatattgatagcatcgcaccattaataactccgtctactagggcaatctttatcgaaaacccttcaaatccactaatgaaattaaccgatgttgaagagattgtgacgattgccaacgcatataaattattgtcaatcgtagacaatacgttattcactcctcttctacaaaacccccttttacttggagctgatatcgttattcatagtgcaacgaaataccttgggggtcacaatgatgtgcttgcaggacttgttattgccaaaggtgaaaagctctgtgctgagattgaacaatatcaaaacggtgctggagcggttctttctccgtttgactcctggctcctcattcgaggaatgaagacattacctcttcgactaaagcaacatgaggagaatgctagagctatcgcaacgtacttaagaaatcacgacgcaatatcggacgttttttatcctgaaaaaggcggtatgctgtcgtttcgattacagtctgaagcatggattgatccatttctaaggaacttgaaactgattacctttgcggaaagccttggaggcgttgagagctttattacttatccagccacacaaacacacgccgatatcccagaaaaaatcagactagagaaaggtgtttgtaatcgacttctcaggttttccgtgggaattgaacaaatcaatgatttagtgaaagatttggatcaaacgctagcaactttcatagaggatggtgtgcgacatgactactaattcatatacatttcaaacaaaacttcttcacaacgatcataaatttgataaaagcacaggtgctgtcagtgttccaattcaacaagcatctacctttcatcaattggattttgatcagccaggaaaatatgattatagccgctctggtaaccctactcgtgaagctctagaagaaacgattgcagaccttgaaggtggcgttaggggatttgcatttgcttcgggtatggctgctatcgctacttcttttatgctcctttcacaaaatgaccatgttttaatttcagaagatgtttatggcgggacttatcggatgatccacgatgttcttgtaagatttggaattagccatacttttgtagatatgactgatttaaataaagttgcgagcgggattcaatccaatacaaaagtgatctacattgagacaccttctaacccgttgctcaaagtgactgatattcaagccgtcgttaaattagcgaaagcgaataattgtttaacattcgttgataacacttttatgacgcctgccctccaaaggccactggacttcggcgcggatatcgttcttcatagtgcaacaaaatttattgcaggacatagcgatgttgttgcaggtcttgccgcagttaaaaatgaaaagctaggtgaaaaacttgcttttttgcaaaattctttcggatccattttaagtgctcatgattcctggttagttcttcgcggattaaaaacgttacattgtcggctcgagcagtcttcaaggtctgctttccgacttgctcatgcactccttaaagaaccgcttgtagaagaagtttattatcctggattttcttttcaccaggggcattcgactcacctttaccaggcagcaggtcctggggcggtcctttcttttcggctacctgatgaaaacgccgttcgactatttacaaagaacgtgcaaattccagtttacgctgttagccttggtgcggttgaatcgattctctcttatcccgctagaatgtctcatgcatcaatgtcagctgccgaacgaaacaagcgtggcattacagatggcttgttacgtttatctgtaggtcttgagaatactgatgatttgcttcaagactttaaacaggggtttgctgccataaataaactttacacccccgtctcaaaagccggaggtgccaaaggatgagcttactagaagatctagaacacaaaattttgattggcgacggtgcgatgggaacccttctttactcatacggcatcgaccaatgttttgaagcactcaacctttcacatccggatcaagtattaaatgttcaccaagcttatgttcatgccggttcagatgtgattcaaaccaatacgtacggcgcgaactatagcaagctatcaagatatggtcttgaagacctagtaaaagaaatcaatactgaaggcgttaaactcgctcgaaaagctgcgacagactctacttacgttcttgggacaataggaggaatacgggggataaatacacgatcgacgccgcttgatgaaatcaagcgcagctttagagagcagctaaactggcttctattagagggagtcgatggtcttttattggaaacgtattacgacctagaagagatcattactgtacttgaaatagctcgaaaggaaacagatttgcctttaattgcacaggtttcaatgcatgagccaggcattttgcaagatggcacttctcttgctgctgccttaaaacagcttgagaatgccggagccagtgtaacaggcgttaactgccgactcggcccctatcatatgattcaatcattagaacaggttcctctctcaaatcgttttctttctgcctatccaaacgcgagtttgcctgactatgaagaagggcgtcttgtttatcctaccgcgccagactatttcaaacaaagtgcagaagctctacgtcaacaaggcgttagacttattggtggttgctgtggcacaactcctgagcatatagctgcggcggctagtgcactaaaaggtctaaatcctattgtaacgaaagaagtaaccgttaacgaaaaagaggctaggatcatcgattttgaggaggaaaggctgcctcatttacatgagatagcaagaaaacaacgatctgttatcgttgagctcgaccctccaaagaaattatccattgataaatatcttgagggaacaaaagcgctacaagaagttggcgttgatgcgattacgctcgctgataactcacttgcctcaccgcgaatttgcaatacggcaatggcttctacgattaaagctcagcataatgttcgaccacttgttcatgttgcctgtcgtgatcggaatttaattggcttacaatctcatttaatggggcttcatacacttggaattaatcaagttcttgccgtaacaggtgaccctactaaaatcggcgatttccctggtgctacttcggtttacgacgtctcatcatttgacctaattcgtttaatgaaacaatttaatcaaggacgttcttattctggtaaatcgcttggaattaaaacttcattttcaatagcagccgcctttaatccgaacgtacgccatctagatcgagctgtcgaacgacttgaaaaaaaacagcaatgtggagcagattactttataagtcaacccatttacaatgaagaacagttactagaagtctacgaagcgacgaaacatttaacttgtcccatttacattggaatcatgccgcttacaagctaccgaaatgctgaatttctccataatgaagtaccgggaattaaactatccgattccatacgcaatcgtatgttacgcgctacagattcaatgcaatcatgtgaagaagggcttgcaatcgcgaaatcgttaattgatgctgcgtttgatttatttaatggtatttatttaatcacccccttcttgcgttatgaattaacagtagaattaacacgatacattaacgagaaaactcgccttgaagaagaaaggaagaatcgaaatggcctacacctcatttgaagatctacttacaaagagaatccttgttcttgatggagctatgggaacaatgattcaacaggctaatctgacagctactgattttggtggtgaagaatatgaaggctgtaatgaatacttatccttgacaaggccagaacttatatcttctatccatgatgagtacttagctagcggagcagatattattgagacgaacacctttggagcaactgatcttgtcttagatgaatatgatctcggtcatcttgcagaaaagctaaactatacctctgcaacgcttgcaaaagaagctgctgctaaattaactacgacagataaaccacgtttcgttgctggtgccatgggaccaactaccaaaacattatccgtcacgggcggaacaacttttgaatcactttcgaactcatatgccatccaggctaggggcttacttaacggaggcgtggatcttctactaatagaaaccagtcaggatatgcttaacgtaaaagctgcttatattggtatttcgagagcatttcaggaattagagatgactgttcctttaatgatctcgggaacgattgaaccgatgggcacaacactcgctggtcaaagtattgaggcattttatttatcgcttgaacatatgaatccagcagtcgttggactaaattgtgcaacaggaccagagtttatgagagatcatctccgctccctttctgatcttgccacaacttcagtaagctgctatcccaatgctggtcttcctgacgaagaaggaaattatcacgaaacgcctgaaagcttagcagctaaaatttacggatttgtggaaaaaggttggcttaacgttgtcggtggctgttgcggaacaactcctgctcatatcaaagccatttcagaagctataaaaggactagacccgcgaaaagctcctgcgagtcatcctcacgccgtttctggaattgaaccatttatatacgatgatagcactagacctatactcgttggagaacgaacaaatgtcattggatcgcgtaagttcaaacgtcttatagcagaggagaaatttgaagaagcgtccgagattgctcgttcacaagtaaaaaaaggtgcacaggtaatcgacatttgtctggcaaatccagatagtgatgaacttagagacattgagaattttatgaaatatgttgtaaataaggttaaaacccctcttatcatcgattctactgatgatgcggttatcgaaaaagctctctcttattcacaagggaaagcgatcattaattccattaatctagaagatggtgaagaacgtttcgaagctgtcgttcctcttattcataagtacggcgctgccattgtcgttggtacaattgacgaaaccggcatggcgattactgcagaacgtaagctcgaaatcgcgaaacgctctcatgacttactcgtttcaaaatacggccttaatgcatctgatattatttttgaccctcttgtttttccaatcggtacaggtgatgagcaatacattggctcagcttccgaaaccatcgaggggattagactcattaaatcgcaattgccagaatgtcagacaatccttgggataagtaacgtctcttttggtcttcctccagtaggaagagaagtattaaacgctgcctacttgtaccattgtacaaaagccggattagactatgcgatcgtgaatactgaaaagctcgaaagatacgcttctatttctgataaagaagtacagcttgccgacgaactcctttttcaaacaaatgatcagacattagcagatttcactgcattctatcgaggtaaaaagaaagaaagtaaagtgcagacttccacgctcacacttcaggaacgtcttgccttatatgtcgttgaaggtacaaaagaaggacttattccagatttagaaaaagctttaattcaatatgaatcaccgctccaaatcattaatggtcctctaatgaaaggaatggcagaggttggaaagttatttaatgataatcaattaattgttgcagaggtgctccaaagtgcagaagtaatgaaggcttctgtcgcttttcttgaacctcatatggaaaaagaagattcttctagttctaaaggaaaagtacttttagcgactgtaaaaggtgatgtgcatgatattggcaagaacttggtcgaaattattttaagtaataatggttttgaagtcgttgatcttggcattaaggttactccaacagacctcattaaacaggttcaagaccaccagccagactttgtcggtctttctggactactcgttaaatctgctcagcaaatggtattgactgctcaagatatgaagcaagctaatatctctatacctattatggtaggtggtgccgccttatcgcgaaaatttactgacaataaaatttcagctgaatatgacggagctgttttctatgcaaaagacgctatggaaggattagcactttcaaatcagttaagtaacgaagaggagaaaagaaaactcgtagaagaacatgcgatcaaaaaagcttcttctgagttgcaaccaaaaacgatttcaaacggcggaacagcagttgccattaaacctgtttctactgtatcgactgatgtacgagtttatcaaccgtatgatctagagcctcatattttaagaaactactcggttgcacatatcgaaccatacatcaacatgcaaatgctaatcggtcatcatctcggcctcaaaggaaaagtatcaagactacttgcagaaaaaaacgagaaagctgtgcatttaaaagaagtggtgaatcagcttttaacacgagcaaaaaatgaaagttggatacaaccttcagcaaaatatcagttcttcccagcacaatctgatggaaatgatgtcatcatttactctcctaatgatcatcaaacgatcattgaacgattttcatttccccgtcaacaaaaagaacctttcttgtgtcttgccgattaccttcgttcagtatctagtggcgagatggactatgttggattttttgcggttacagcaggaagaggcattcgagaacgttcagtagagttaaagaatcaagggaattatctcgaaagtcatgctttacaagcccttgcgcttgaaactgctgaaggtcttgccgaacacgttcatcaattgatgcgtgataaatgggggttccctgatccaacggattttacaatgcaaaatcgcttttcagctaaataccagggacagcgcttttcttttggctaccccgcttgccctgagctagacgaccagaaaaaactttttaaacttatccaacctgaagatattggggtagagctcacagatggatgtatgatggaaccagaagcttctgttactgcgatggtttttgcgcaccctgaaggaagatactttaatgttttataagaagcaaaaagaggagcccaggctcctctttttgcttcttattccatcatcaataccatcatgacaaacctattatgtaaaagtctagactaatcaatttcaggtgtttcgtttaatgcatgattcataacttttttcaatactttcttcttttcactttcacttatgttttcgctctttattgccaaccgcttttcatacaaatactccaagcgtttgctatatgactcatcatacttagaagagagatcatctcggatttttcttgcgagcagtggacttgctccacctgtaaaaacactaataattagtctccctcgctttagcgtagcaggtaaagacacgttccctcgatcagcctgatgagaagcattgactagctgattatctcccgcttgattaatgacaaattcattcacttctaacgagtttgtcgctacaataatcaaaaatgcgtcttgtaagtcactccctctaacttcccgttcaacgaaagtgatattgtcgaaattcacaagattcttgacctcttcattaatatcaggactaaccactgtaaggatagcaccgcacccaagtaaacctttaagcttcctcagggcgatacgacctccgccaactataacgattctttttcctgtcaagtttagagaaacaggatattcactcatccgctccctccctcaaatgcttctacaaccctttctttcaatacatctatcaataatttgtggtagccaaggtagtgacaaagataaaaatctggaccacctttttctagcctgcttattttttgttccatttctttcattagtatacccgtaaataaaagataaggaatgacaaacacctgactattgctgtctgattgagcctgtttaatcccttcatcaaaggttgggttcgcggctgcaagatagcacacagacactttttgaaacggtatcttcttaagtattcgatttgcgatttgatttaaatccctttgtgtatcaggatcactacttcccctccccacaagaagcgcactagcatcctttcgaagggagacatccgtttccattactctttcttcaatgacagagatcaacttatcatgaataccgaatggacgccctatgtgaaaagttatccacgggaattgtttagagacgcgctctacttcattcggaatatctttcttcacatgagtagcagcaagtaacaaaaccggtatgactacaatttctagggcaccctttttgatgcatgtggtgatgccccctaaaatatcaggctctgaaagctcaagaaaacaggtctcttgaattgggtacgaaagttcttctttacatttattaacgaattctaaagcttgatttcttccctctttcacacggctaccgtgacaaatatagagaacagctttcactttcattcacctcctataatgcacttacgacagtcttcgtggtttgtttatctagcgacattttttcgaaccagtttaatttcgaccttaagttcacaacttcccctactataatcatacttggattttgaatttccgcttttctcacatcgtctgtaattgtttcaagagttcctgtaactgtttgttgagtatgagtcgtaccccaatggacgagggcaactggggtctccttcttcttcccatacttccgaagcattgagcatatatacggtaagtttttcactcccatataaattgcaagggtatcgattccctttgcgaggctctcccagcgtaattcttcctcttctccatctttacgatgtcctgttacaaacgcaaatgtagaacttaaatcgcgatgtgtcaccggtatgccagcataggcaggtgcagcaatcccggaagtaatacccggcacaatttcaaacggaatcccgtggttcgaaagagcttcagcttcttcccctcctcgcccgtatacaaaaggatctcctccttttaatcttgtcacgacctttccttttagcgcatgcttcacgagaaaacgattaatggtttcctgttttagggtatgatagtctggtagctttccacaatagataagctcaacgccttccttggcgtactctaatagttctttgttaattagtcgatcataaaggatgacatctgcttgctcaatgcatttcacaccttttactgtaattaaatcaatgtcacctggccctgctccaactaggaaaactttccccatttcatttcctcctcgatacgatttatttcaatagaccctactgtttttttgatactcatgttgtgattaactgatgatctactagataagaaagaacgatttctgcgcacctctctcttgtttcattgtacgtatcaacgatcaattcagggttaacgggttcttcatagggagaggacactcctgtaaagtgagggatttctccactacgagcttttttgtataaccctttaggatctcgaagctcacactcatttaaaggacactttacgtacacttcaataaactcatccttcaaaagtagttctcgcaccacctgtcgatcactttgataaggagaaataaaagcagtaatcgcaaattgaccgctatctacgaggagctttgatacctctccaatacgccttatgttctccttacggtcttcttctttgaaaccaaggtctttgtttaatccctgtctgatattatctccgtcaagtacatagctttgaacgtttaattcatgtagctttcgtgatacatcattcgctaatgtagatttccccgaccctgacaatcctgtaaagaagagaacagcacttttgtgctggtttctcttctgtctcatttctttcgttactactgtatcgtgccatgttaaattattgtttactgtcatcacgaatctcctccttatgctttaactgcatttttgctcattcctttaataagtatctcaactacctcaggacgactgaacgttgcaggaggttgctcaccatttcgtaaaagcgcccgtactttcgtacctgaaagaatgacgtgatgttccttcccatgaggacaagtcttcgctgaagccatgctatcgcacttcttgcaatagaaactatgttcaaaaaagagcggagtgatccctaattcttcacttgtaaatcgactgaagattttctgggcgtcatacgtgccataataatcacctacaccagcatggtctctgccaacaataaaatgtgtgcatccgaaattcttccgaacaatcgcatggaagattgcctctctaggccctgcatagcgcatcgcagccgggaagactccaagatgaacacgatcagcaggatagtaattttcaagtaaaacctcgtagctctccatgcggatttctgctggaatgtcatctgatttcgtttcacctacaagtggatttaagaaaagcccatccactgtttcgagagctgttttttggatatactcatgggctcgatgaacagggtttctcgtttgaaatccaaccactgtctgccaaccttgatcttcaaaataagctctcgtttcagctggatcaaaatgatagcgatcaaactgacctttttcacttcttttaataagcgaaataggtccaccaatgtatacattaggtcgatcatagactttttttacgcccggatgatcattatcctctgttaaataaacatgttttgcttctactaccttatctggttgatagatcgattcaacggtcacagtaccatatacggttccttcgcttataagcttcacttcatcgccaagagagagtttcttagcgacgttatcggttactggtaacgtaatgggaatgctccatggcaaaccgttttctaatttaagattatgaacaactgaagtgtaatcactttcattaagaaaaccggttaatggactatatgctccagttccaatcaattccagatcgcttaaagctgttttatctaattctatttctttttgaattccttctatctttttatccgggttaaaacgatcgatcagttttccaccgtgtgcatgaattgttgtcatggtaatccctccaaaataaattgttttataaactttctttttcttgtaatgttcttttttgtgtacgaatcgatcgaatcaaacttcctgatcctaccgttgcaagaataacgcttccgattgcgattaacgtgtacaggtcactttctagaaaaagcttaatcatactgtaagaaataactagtgaaaaaactggtgaaacggcccatacctttaacattttcgtaatgacatctttttgccagagttgaaaaccatcttttgcagtaccaattccaatgattgaagaagtcgtaatttgtgtaagtgggactggaatcccaaacaatgaagcaccgattactagcccagcgctcgtacccgatatcgcacacccttcacctagcgaaaaacgtgtaatccggtagccattcgtttcaagtacgcggcttccaaagacaagtgcacctaaagcaacaaatgcccctcctaaccatgcaccgtgagaaagggaaagaactcccgctccgactaaggggccaactgcattggccacattattcattcctgccgagaacgcttcaagaaatccagctacaattaaaacgatagttagcgttttttgccattttgttgtaaggtttaaacgctttttgagagcattcaatcctttccccactattaaggctgtcacaaaagcaataaccggaataataatccataacagcataatgaccataacatttgaaaaaaacaatgcacggtatgcaatgcctacccctacaactgagccaacagttacttcgcttgttgataaagggatccccataatatttgctagaaaaagtgccgttgtcgctgaaatgaatataatcagaatcacttttaaactaagtactgaggtgggaataattccactgcccatcgttttaatgacattccctccaccaaaagtggccccggctactattccgaaagcacatacagctagtgctgtgcgtcttttttttatggcaccagctccataggccacccccattgatgcagctgcaccacttgctccaatattcatcgcaaaaaacagcgcaactgtaatcactaaaatcgtcatcggcttgatgcggaatcaagatgcaagccgcactctgttttctcctgacttgcccatcttcccgctctagaatcgcttccactcaaaactctttctgtgcatacggcacagccgatacttggatagccttgatcatgaagcggattgtatggtaaatccttctcgtagacgtagcgccaaacttctttccacgtccaatgaatgagtggacaaacttttatggactgaaattttttatctcgatttaaataatttgttttttgtctcagaggggactgttctcttcttaagcccgatatccaggcgcttacgccatctagttcttcatgtaaaggaacaatttttcgcaaattacaacattgccccggatccttctcccaaagtgcctcccctttacttaatgcttgctcttctacagactcttctggttgcttcatttttatcttaagctttggatatctcgcttttactttctcaatcaattgatacgtttcttcaaagtgaagtccggtgtctaaaaaaacaatctccgcttcctcatttacacgagaaatcaaatcaatgagaacaataccttccacaccgaaactacatgcatatacgatgtcttctttataagtttgataggcccaatttagaacttccaatgctccttttgtatctgaatgctgattgaattccggctcctcgcctgaccagctctcatataaccattccattacaaaacctcctattgcaatcaaattatcctaaaaaaagaggcagtcctaaccgccgtggttagaaccgcctctagtgtctctagtcagcgctaaaattaaagtcgttctttttcttttctttcaagttgaatcacctttccatcttgaatgacaagtgtaatcgatccatacttcaacgtgcttagcattcgttcaatacgcgctgcaacgtctgaaaagttctgctccttgcttcccatcatgcaacctcccttgctcatcataatctataggagaggctaaacaactaaaaaagccttcccaaattggaaagacagattaggttaccttaattcaccttatcttccaaaatggactccattttgctggaagtagcaccttgcctcgaaggcaggttgctggacgtcatcgggccagtccctcggtctctcttgataagttattttctaaatcttaactattatctaacaatctgtcaaccctagtttagagatcgggataaacggattagtaaagaatatgaaaaaaaccccgaatctatgactcgaggctcagttttatatcggatgacgtttactttcttctttcttttcttctactacaatccgcgttccatcaaccgaggtcaccacaactaccgtatccttatcgatccagcttcctgctgaaatcgcgctatactttttatcgttcatttcaattgtcccactcggtcgaaacggagtaagggcgatggctgtttctccaactaattttttatactccacattcatcgagttgtaccccatttcactactaagacgatcttttaacgtcatcttcgtccacatggacctggcaggaaatactcttaaaaatagaaaagacgccgcagtaccaattaaaaatccacttgaaacaagcagtccatacagaaaagttggggaaggtatagcaactgccgttaccatcattgctaatccaatcaggccaaacgttccgtcatttaataattttccgtctagaataactaatccaagaccaaccgcaaacacaagacccatccaaaccatagatgataatgatgttaaatggtaactgaaatagaatgtaaggatcaggattccaatcaatccaaaaatcccttttactcgaacaagcaactctccgaataagaaaagcacgctaagtaagacaacaagaaaaccaactgcaggcaaagataggatttccatcctcgctccctccttttctttccactcataatacgtttaacgagagaagaaagtttcagtccattgtcactttacgattgaaataccccttttattccatcaataagcgcaataaagaaatcaattattttcttaataaaagattgtgtttcgtctttatttaaaaattcatcaagattttctctcgcattctcgagctgactcttcatttgatcccagtcgatatcgagattcttcattcgattaaacagtgccacaagtccgtctagttcttcctgagttagttcaattcctgaatcgctagccgtttgtttaatcatcgttctcatgtcttcttctgtctcagggggatttgtagcaatttcatctttaattttcgtcattaactctgttgctttatcagcaccaatgctatcacttaattttgcagtcgttactaattcttcatttgcaacctgtttctgttcctcaggaatgacttcatctgaacttaactcatacgctttaatcaaaccagttaatgctgccgtaccggatacttccgttggtgctgtcacataaatatcggcgtcttttactcccgctgttattaaagcattggcatacatctcatctgtaacccaattgatattttttgtttcgacacttaacccagcatctttttcaccaattgtaatcgaggaggaagacaaggcacgcgttccaattaaggctttactaatataacttccaaggtatttatgctcttcttcattcgatactgtcacggtcatgacattgtctggtgctttcatttcttctaataacgtttgcttttgctcttctgataaatcttcaccaagtgtcacaatgacatcaccaacgctagcgtcagcgaacgttacaattggcacgatggacatgatcaacaacatcgacagaaaaaatggcattacttttttaaacatgttttgatctcctttttaacgtaaggcttgctcgatgagaagatgttaagacttctcatctccttgtattctactcgacacttactcgaaagaaaagataattcattaagaaacctgtcatatcatggaaggacaagcatacctttatataaaagaaataaagtcgaagggaaggtgagagcgatgaaaaagttgctaatgggactccttttactccttattcttcacaccacttactatgatttaacaactgggacactcccctcacccacagtggagtctgaagcagcagaagtacttgctccacaaaaagacgctgctccctatgtggtttacaaaatcaacgctggtgatacggttctttcattagtggaaaaagcaaatggatcggttcctgtagcaattgaaacaattgttcacgattttgaaacgttaaacaaaattcatcctacacggatacaaataggaaaagaatataagataccaacttataccaacacatctgctcagtgattatttcttgtcaatagctctgtaaagttgctacaatgggatagtattactgatgagtcttattccctactagggaagcatataaaagcgatctaaatcatgaggtaagcaatcctacatgtaaaaggagcgattttcgcatgaatgaaattacccaccgtagtaaaacaagaccggttaaagtaggtcctttaacgataggcggtaacaatgaagttattattcaaagtatgacaaccactaaaacgcacgatgtggaagcaacagttgctgaaattaatcgtctagaggaagctggttgtcaaatcgtacgtgttgcttgtccagatgaccgagctgcagatgcgattccagaaatcaaaaaaagaatcaatattccacttgtcgttgacatccatttcaattacaagcttgcccttaaagcaattgaaggtggagctgacaagattcgaattaacccaggtaacattgggcgtcgtgaaaaagtggaggcagttgtaaaggcagctaaagaaaaaggtatccccattcgtattggggtaaacgctggttcactagagcgtaaaatccttgagaaatatggatacccaacggctgaaggtatgcttgaaagtgcccttcaccacattaaaattcttgaagaccttgatttctacgatatcattgtctcaatgaaagcatctgatgtacaacttgctacagaagcttatgagctcgcagctcgctcattcgattatccattacaccttgggatcacagaatctggaacgctatttgcaggtacagttaaaagtgcggctggattaggtgttattctttctaaaggtattggaaatacggcacgtatctctctaagtgctgaccctgttgaagaagttaaagtagctagagaacttcttaaatcatttggtctcgctgcgaacgctgcaacattaatttcttgcccaacatgtggacggattgaaattgatttaatttcgattgcaaatgaagttgaagagtatatttcaacgatcaaagcaccaattaaagtagctgtgcttggctgtgccgtaaacggccctggggaagcacgtgaagctgatattggtattgcaggcgctagaggtgaaggtcttctcttccgtcacggagaaatcatccgcaaggttcctgaagaaacaatggtagaagaattgaagaaagaagtagataaaatagcagaagaacactacaagaaaatggcagaagaaaaagagaaagcggaagctaactcttaaaaaactgtttctgtagacacgaaaagccaggcacgaaagagtgcctggcttttctatttcggtcactaaaagaacggtgcgaagaataagctgatgatcattgaagcggcaccgacacctatcgcccatgatccaagcgttgtcagtccctttctcctagcaacaaatcctacgacaattcccgctgctccaagaatgacgggaagaatgaacaaagaaataacggatagagcaagcgctgctacaccaatacctactcctgttttttcttgttcctgtcttttagcttcaaagtgttcatgatgctcttcagaagttggacgttcattttcaggtgactgtaaataagggcggtccattacaccgggagctacttccgctgctgcttcttcataataatcctcttcagcgcgtacctctcgctcctcgattaggtccagatcctcatcttgtctgtcttctgtcatatacatccctcactttgccttgttatggagcatgcttagtattcgtaagaaaaccaaagaatatgtttaattcttcagtaagatccttccaactcaaggcctttgcttctgtgttatgataatacgtgagatcacaaaaaggggttttatcatgactatcaaaagactcggacttgatattgatggaacagttacaagtcctaaaacattccttccatatttaaattcatcatttaataagaaattgtcactcgatgatctaacagagtataaccttgcgaatattctcggcattcataaagatgaattcttcaagtggttacaagcaaatgagaaaaacatttatgccaacgcaatcatcgctgatgacgctcatccaacattagaatcctgggaaggaaagtacgaccttttctacatcagtgccagagggaatcaccttctagacacaacaaaaaattggtttgttacaaattctgttccgttccatcacattgagcttattggaaaacatgataaaattgacgcgattaggaaacatcgtgttgacgtattttttgaagacaaacatgataatgcttgtgccattgcagaagagtgccaaatacctgttattctttttaatacaccttataatcaaggagccgtgccttccaatgtttcccggttagaatcgtggcctgaagcacgtcaatggattcaacaacacaacaaaagcggcagagcctgagctctaccgcttttaatgtgcttgacattcgtcacagcgtccatacacctcaaatttatgaccagttacttcaaaccctgtatcccccactggaatagcttccataggacaagaatcaatatgacgtgtttttccgcagtccaggcaaatgagatgatgatgatgactttgtgttgcacagctaagtcgatagcgcttttcaccattccactccgtctcttctaaaatagccaggtcggtaaatagcgtcaaatttcggtaaatcgtatctacgctcatcccaggataacttctctgcatatgattcagtacatccctcgcggagagatacctcttctctttagcaaataacgtcacaagatcttcgcgcttctcagtatatttatagccttgctcttttaaaatacgcaatgctgtagagacattcatacttccacctcatcatgttaagatttccattgtttgattcgttttaccaaaagtacgaacagtaaaatgaatgctgataaaagaacgattgttccacctggcgcgatatcaagataataggcgaggacaagtcctccaagtacagccatctcaccgaaaatgattgaataggcaatcgtctgcttaaatccacgtgcaattcgaatgctggcggccacaggaagcgtcattagtgcagaaaccaataagacccctacaatttgcattgaaacagcaatcacaaatgccacgagtaaaataaaaatgaaatggatccattttgcccgtactcctgatacaattgcttgttcttcatcgaatgaaaggaagaacagttctttatataatagcgttacgacaataacgacaatcacactaatgattgcaactgccattaagtcacttcgactaatggcaatgacacttccgaataaataattaaacaaatccgaattaaatccatctgctaaagataaaaagacaacccctagaccaatgccaccagacagcgtaatcggaatagcaagctcttcgaaatgtttatatactttacgaagctgttcgataaataacgagcccgctgctgaaaaacccatccccatataaacaggattaacaccttgccaaaatgtagaatacttaccaagaagcaggctagcggcaattccagcaagtgttatatgtgataaggcatctgcaattaatgcctgtcttctaacaacgataaataccccaagaagaggtgcaataactccaattaagatacctgccataaaggcattctgtaaaaactcaaatttccataaagcttgaatcattttctaaaagcctccatgatcatgatcgtgacttaatacatgaacatgatggccgtaaaaacctgataattcacgttcattaaactgttcaaattcattcgtctctccatgaaaatgaagcgttttgtttagacaagcaacgtgcgtcactttgtccgtaatcgttccaatatcgtgtgtaacaagtaataacgtaatcccattttccttattcagtttaccaagaagctcataaaaatcacttgtagagttcgcatctactcctactgtcggttcatcaagaatcagaatttccggttgactgaccaatgctcttgcaataaatacccgctgttgctggccgcctgaaagttccccaatattactcgatgcaaaatcgctcattccaactaattgcagagcatccatgactgccttacgatcatttgttttcataaatttgaataaaccaagtttgcttgtcagtcccattgatacaacttcaaaaacagaagcaggaaaaccagaattaaaactattggctttttgtgaaacataaccaattttactccaatcatgaaatttactcatttttttaccgaaaatatgaacagaccctttttgagcttttaataaaccgaagataattttaattaaagttgattttccagatccattcggtcctaccaatccaacaaaggccccttgagggatcgagaaagtaatatcttctagtacatagccatctccataatgaaaagaaatgtcctgaagatcgattaaattattagaagtactcattttattacctaccatctataagaatcattacgatttacattatgtagtatacatgacatcaggagtgtttgtaaatttaaatactgatgtcactcccctttttcatcttcatgtataatgaaaacaaaattcatttttagaaaggaatttcaccttgtctttaaaagtaccttaattcatgaccatgaaaaaacccctactataaaagcagggggtgtttcgcttccattatgaccgaagcgaaggtgctatttcaactacatatcatggttactagccatttcttgaatctcgtctgaataaccacttttaggtgttccttcatttgctacataggtttttaatccaccgatgccacggttataagctgtcagcgcttcatcccaattatcgtatttgtcataaagataatcaagataagtgacagaaagggttattgaaaaataagggtcaaataatttttcttccgagtagtcaattccagccatatcagcaatccacggggcggtattcttcataaattgagccatgccatacgcatgcccatattttgtttctggcccgataagctctggatcaaacgtattacctgtttctacctttaaaagctcataagcaattgcaggatcaatatctgctttcattgactggtaagttaaaaataacccccactttttgttaaactttccttcactgtcattataaaattgctcagaatacgctttcgcttgcttccattcttctacactcactgattgcgtaccgagtgaataacctgtttctttctctaatctagttatcgctgtctgtgtcttgatctgatcgttctgggaagatttttgatccaactccccaaccgttgttttcgcatcggcaacttgttcgttaaaaaagtggaattgtacgagaatgatagctagtacaagtgttagaacaattgcagtgatcattgacagagttttttttaggttgttttgaataaaattgatagtcttgcactcctttacaactggtattaataaagctgaagagcaccagttaagtttataccctaacatttatatctcaaacctttctactattttgctcatcaatgaacatccttacataagaaaaaaggccccaattaagggagcctaatgaatcggggatttgaattttgcacctctcgtttcttgcgtgttcataatcgtgagaaatgcgtgagggtcaatatcataaataacacttttaagctttgtaacctcaagacgagtgataacaacgtagatcacttctttttcttcgtcagtataaccacctttcccaaccagttttgttgttcctctacctagtcgatcaaggatcgcatcagaaatctcctcatataaatcagatacaatcaatactgcttttgtttcatcaagaccttgaatgacggtatctattgttttaaatgcaatatagtacgccattacagaatacatggcattttcccaactgaaaacaaaaccagcccaggtaaaaataaaaatgtttgtaaacataacaaattcgccaattgaaaaggggattttttttgttaatagaatacctaatatttccgtcccatccattgagcctccatgtcgaataaccagcccaactccaagtcctaaagttagcccaccaaacaccgtgcccaaaattggctcagtggtaaatggctcagtatgatgaagaagcgtctcaaaagtcgcaagcccaataattccaaataaggttgaaaaagcaaacgtttttccaatttgtttgtagccataatacataaacggaagatttaaaacaaccaccaaaattgcaaaattaaagggtgtgagatgatcgagaatcagagaaacgccgattattcccccatcaattaactgattgggaacaagaaacaattcaatagcggctgcagcgagaaaagcgccaatcataatcataagtaatctgtaaattaagtgcgttttactttctttcctatgctgttttttttccattacaccctccagaaagttccaaagtaaggatcttattacttattatattaaaatactccttgtactaaaaggctaccaacacgattttgaacaccttcacgaggaggatgcatagtatgagataggcaaagggggcatcgtgatgaatccaatacagcttcaacttgtaaacttcaaattgaaccgtattacggctgaagaactacttcagctatctaaacaatatggtattacacttacagcaggagatgcaaagaaaattgtccaaatattgaaacaagaaaatatcgatattgcaaatcaaacgcaacgaaagcgcattttattgaaaatcagccgtgaagttaatccttccgttgcatctcgtgtaaacaagttgatgttatcttttttaaatcaataacaaaaaaccgctttagcggttttttgttagacagtcattaacttgttttttaaatcctcatcaaacttcttattacgaagcatttcaatctcaagtttatacggtgctttcttatttttcttatcttctcctacatacggagtttctagaattttgggaatttcttttaattgcggatgatgaatcactttatttagagcgtcaaaaccaatataaccaaaaccaatattttcatggcggtctttcgctgctccacgttcatttttactatcatttacgtgaagaaccttcaatcgatctatcccaacaatacgatcgaattcatttaatacaccatcgaagtcatgaacaatatcatagcccgcgtcatgagtatgacacgtgtcaaaacagacagatagcttctcattatgcgtcacaccatctataatttgagccagctcttcaaagtttctaccacattcagagcctttccctgccattgtttctaaagcaatctgtacttcttgctcaggtgtaagaacttcatttaatccttcgataatcttctgaatccctttgtctgaccccgctcctacatgagcaccaggatgtaagacaatttgacgggcacctagagcatgggtccgttcgatttcggaacgaagaaaatcaactccaagctgaaatgtttctggcttcgtcgtattcccaatattaataatatacggagcatgtacgacaatatcctgaatgccatgttccttcatatgagcggcgcccttttcaatattgagtttctcaatcggcttacgtcttgtgttctgaggggcacccgtatagatcataaaagttgttgcaccgtattttacagcttcttcacttgctccaagtagcattttatctccactcattgaaacgtgagatcctatttttaacattatcttcagcccttcccttttttaactttgtttccattctcctcatttgatgacacaatagcgacatcaaatccaactacaggatttatcataataaagcagacaaaaaccctctgtattaagagggtttttgagttattttctacgttgcttttgctgaattctgtcacgctcttgttgcattttctttttgtaccctggtttaactttctttggctttggtacaaaaacgtccggctttgatgaagttggttttttacgaggagttacaggtttcgcttctacccattccccgttcttaacctctttatatgcaatactgatcccctttgctgatagcttttgaatcgcttgttgatcagaaggctctgctagtgtataagcaatcccatcctgacctgcacgtgctgttcgtcctacgcggtgaatatagaaatcaagatcctttggtaattcaaaattaatgacgtgtgacacgccttttatgtcaatccctcttgaagcaaggtctgtcgctacgacatactgacattcagcttcttgaattttcttcataatttgcttgcgctgacgagcttgaacaccaccgtgaagtcgctctacattatgcccgttctcaattaaaaaatcagctacttcatcagctgtttgtttcgtattcgtaaagacaagagctaaataagggttaatggcttttgttacattaagcagtaactctttcttctcacgatatcgggctggtataaatatattttctactttatcagccgttacctgctcagcattgacttcaacaaatttagggttgtccatatatttcttcaaaaatggttgtagactctttggaattgttgcagagaatacgagcatttgtaactcttttgccattcttgaagcaatatagtccacatcttcaatgaagcccatatctagcatctgatcagcttcgtctactacgagcatagttgcaggaaaaacgcttaaggcttgctcttcaacaaggtctttaattcttcctggtgttccaattacgatatgtggcgtatttttcatccgactaatcatgcgtttccgatccgttccacctacggcttttttgatggaaatcgcttcttcttctgaaagcggctcgattaattttaatgcctcattatatatttgatcagctagttcgcgagttggtgctgtaatcacggcctgacattcattcttttcacggtcaatacgatgaataagcggcaaaagaaaggcaagtgttttacctgatcccgtttgtgattgaccaattgcactctcgccattacgtatagctggtacaagtctctcttgtatttcagttggtcttgtgaatttctgagcctctagcgcttcaattaagaatggcttaagccctaatctatcaaattgtttcatttttgttgttcctccatccattaatccactttgtattataaagcaaattcacgtaaagcgccatacgttcagaaaagaccttccactctgattttgcatgcactgtcatttaatagaaatattacgtttccttcgcatttttttaaaaagcaattccatgcttaaagaaggcagatctgagttaaaaacttttctattatttgtattgcccaatattgtaccttctcacaccttctattttttcagcataccttaatagtaccaacagtttattttggtcaagttataagaaggagggtatgacatgaatcaatttcctccctcccctcaaagtggtccgggtcctggcatgggctttccattttccggcggagggtttcaaggtcccggcccaggcttttcacagcctccacaaacaggaactggaggactattatctaggtttttaggcggtgggggaactcaagcagggggactccctatgcctccaggttcatttccagcaatgcagcgtggggcgatacctggttttcctcagcaggccgggatgttatcacgatttcttccaggtgccggccagggtggtatggatatgatgggcatgatccaaaatgttcaaaaagtgatgcaagctgccgacacaattaaacctatggtacagcaatacggaccaatggtaaaacaactgccagaaatgatcgctttatttaaagaataccaaaaatcctcaggggaaacagaagatgataaagatagcgaagcagacgaaacacctaagaaagcaaaaaaatcttctaaaaaaacaaaaggtaaaacccctccaataacaaacgcaaagaaaaaatcaaaaccgatttcaaatgaacaaagtattaaatcaaaacctaaactctatgtttaaccaacgtgtttcgttgagttatctcgatatctcctttataattaggagagatcagttatacaacaatccataaatggattgaggaggtactcgatgaaagtaactaaaatttcacctagaggttattgttatggcgttgtggatgcaatggtcattgcacgcaatgcagcgcttgataaaactttaccgcgcccgatttttattctcgggatgatcgttcataataaacatgtaacagatgcttttgaagatgatggcattattacccttgatggaccgaaccgtatggaaattcttaagaaggtagaatccggaacggttattttcactgctcatggcgtttcgcctcaagttcgtgagctagctgaagaaaaggggctaactgtccttgatgctacttgccccgatgtgacggtaacgcatgatttaattcgtgaaaaacaacaagaaggctatcacgtcatttatattggtaaaaaaggacaccccgaacctgaaggagccatgggaatcgctcctgaaatcgtacatcttgttgaaaaaccagaagaggtcgatgatcttcaaattaacagtgaaaagattattattacaaaccaaacgacaatgagtcagtgggatgtacaagaaattatggaaagagcgaccgaacggtacccgcatgccgttatccataatgaaatttgtaacgcaactcaagtacgtcaagaagccgtcgccgaacaggctggtgatacagatttagttcttgtcgtcggagacccaaaaagtaataattcaaaccgcctcgcgcaagtatcaattgaagttgcaggaacacctgcatacagaattaccgatatttcagaattacaacttgagtggcttgaaggagttaaaacagtcggtgtgactgctggtgcttctactccaactcctattacgaaagaagtgatccgttttcttgatcaatatgatccagaaaatgaagatacatgggtacgagaaagaaaggtaccttcatccaaaattcttcctaaagtaaaagtgaaaaagtaacaaaaaatcccgccagtactggcgggatttttttatctaaattgaaatggatctgttttctcttgagaggaaataatctctgtttcatatcgcttctcttctaggaaagctaacaatttcttacgcacgccctcgatcatgattttttcaatattatgtcctgcatctatgatttgaagcccttcgatcattgcatcatgtgccacgtggtaataaatatcccctgagacaaaaacatctgctccactaaagcgagcggcgtttataaatttattaccgtctccacctaatacagctacttttttaatcgtagattgaagatctccgacaatccggacgccacctgcactaagcttttctttcacaaaaccggcaaagctttctaaggtcatttctttttcaagttgaccaactctacctagacctaacttttctggttcattatcgagtggataaatatcatatgctacttcttcgtatggatgcgccttctttatagcatttataattgttgcttgttgatctgcatagaagatactttcaattttcacttcatctacggcttctaaagcgcctgcctcaccaatgaacggctttgcatagtcagttggcttaaatcttccggtcccttgagaggtaaaggtacaatcactatattcacctatagaaccagctcccgcgttagcaagagcatttcttacctcttcctggtgagatgccggtacaaaaacgacaaccttttttagctccctctgaaatgtttccacgagaacgctagtatcttttaatcctaacgcttctgccagcatatcgttcacaccaccaggtgccacatccaagttcgtgtgcgcagcatacactgtaatatcatgcttaatgagcgtttcaatcattttaccctgcgctgtatctaaattgatttttttaagcggtcgataaaggataggatgatgcgctataattaaatcgacaccttcatccaccgcttcttcaacaacattgggaagaacatcaagtgcagtcatcacttttttaattttcttgttaagactgccaacctgtagcccgatcgggtctccctcttctgcatatttctttttagaccaggattcaaattcttgaataatagcctggcccgaaactagcttagtcatgaaagaacctccttaataatgtcccgctcatttttcaccattgcttctttatctgaaacaccgtgtgtttttgttaacgacgttaagatccgttccctcttcgttaattcattttgccactttttccggaaggcttcattttgattttttaaaagtatcggaccaactaacatactttttcgcagctctttatcagacattccttcataaggacgcatgccatttcctgcatcgaacacaagaacttcgtaaaccttatgatcttcttcaagaatgcattcatcaactagctcccaatctaaatcggaaagtcgttcacgtagaagatgtgcagccacatttggttgtaggaccagtcgctttacgttcgttaacttctctcttccctctagtagaatatctcgaatcaattgaccgcccattccagcaattgtaatgacatctacttctccaggagaaagtacttcaagaccattacctttacgcactgtgatttctttcgtgaagccgctacgtttaacttggttaacggctgattgataaggaccttcatttacttcacctgctactgcaaaagtgatgcgctgtttattcattaaatagcaaggtaaatacgcatgatcagatccaatatccgctacactacttccttctggaacaaagtttgctaccgtttttaaacgctctgataataatttatcgttcatttcttcaccttacccaattttcttctttatagtttaccctttaccaattcttgataacagaaatttgcatcaaaaggaattaggttttcttccaaatagaaaagcttcctgttctcacagaaagcttttttcgcttcttattttttctcggaaagccactgagcaactgcttcagcctgttctccttgaatgagtcccgcaggcattccggagcctttaccattattaataatgtcgagaatttcatccttggagtactttcctccaaccgcatttagagctggtcctacctggccaccaagatcaccaccgtgacaagatgcacaattttgagcgtaaatatcttcaggtgcagctgcttcagcctgttcttgcttttcaccttcgccctcagcgctctctttgccgtcctgttgcaatgcccagaaagaaacaccaataatgagaattaatccgataacggctgtccatgcaaatggaataagcggattctttttcatttcttttcctccttgtaccgattcgctgatgtcgttttccccaaatatgtaagagtaaacaaatcataacttattttacttgaaaacgctatgaaagaaaaggggaagcgaggcaaatcacatatttgtcatagttattcactctatctctatgatagcaaattttcttaataaaacaaacggcatcagcacaattactgatgcctggtcatatcatttatttctctaatttagaatgaagattagcccactttaccgcggtttcacggagtttatatttttggatttttccggaagcagtcattggatagtcatcgacaaaaaagatatgagaaggaattttatattttgcaatttttccttcacaaaaatgaagaatatcggcaggggtgatcgtttcattctctttcaattgaatacaagccacaacgatttcgccgtatttctcatctggaacaccaataacttgaacgtcctgaactgcaggatgtgtatacaaaaattcttcaatttcacgagggtacacattctccccaccacgaataatcatatcctttaatcgccctgtaatctgcacatacccgctctcattcattttcgctaaatctccggtatgtagccaaccatcctggtcaattacctgcttcgtcgcatcgggcatgtgataataccctttcattacatggtaacctcttgtacataattctcctatctgattttcctgaacttctttgcttgttagaggatctatgattttaacctcaacaccaggtaaagcttgaccaacagaatttactctgtattcaatcgggtcataagttctagtttgggtaataactggagaagattccgtttgaccataagcaatcgtaatttcctccatattcattttgttgatcacatttttcattacttcaattggacaaggacttccagccatgattccggtacgcaaagatcgtaaatcaaatgtatcaaactcaggaagattgagctccgcaataaacattgtaggaaccccgtgaagtgctgtgcacttctcctgttccaccgtcttcaatacaagattaggctcaaattcaacaataggaacgatggtggctcctgctgaaaaagcagctaaagtacctaatacacagccaaaacaatgaaagaaaggcacaggaatacagagacgatcttcttctgttagcttcatacactgaccaatctgatagccgttattaaggatattgtaatgagtaagcataacaccttttggaaaccccgtagtccctgacgtatattgcatattgatcacatcatcaggatcaagctctttcttccttatatccaattcctcttctgactttgacttaccacattgaatgaattcactccatgacataaaagaaggatgtggatctgatccgatataaatcgcatgttttaaataagggagatcatgaaaggcgcatttcccattaacaacctggtccccgcttttcttcagatcaagaaatgcttttggataagaagtacctttgaaaccatcaattataaatagatgagtggcatcagattgcttgagaacgtactccagttcagttgactgatagttcgtattcacagtaacaagtaccgcgcctattttagcagtggcaaattgcaatagtagccattcaggtacattcgttgcccatacggcaacatgctctcctttggccacgcctaaatcaagtagcgatttggcaactgaattaacttcactattaaattcactgaaggtgtaccgaacattttcttttgcatatacgacagcttctttcgagccaaattgattaacctgtctttcaagcatcgccccaatcgtctcatgaagcaatttcgtcatagtcgcaccccttttaattaacatgttttaattcgcatataatgaaccaaaagcaaatgcccaacacacctaaccgagcgctcgttcagtttaacaaccaatttcccgagcaatgaccatccgttgaatctctgatgttccttcgccaatttcaagtagtttcgcgtctctaaaataacgctcgacatgataatcacgcatatagccatttccaccgtgaatttgcactgcctggtcgcaaacttccatacagatttctgaagcatataatttacagatagaggcttctttcgtgaactttttcccctggtcttttaaccaggcagctttgtagaccattgtgcgagctaattctattttcatagccatatctgctaatttaaattgtatggcttgaaaacgtgaaattgatcgaccaaactgcttccgttcatttgcatactgtaacgccttctcataagccgcctgagcaattcctacacccatagcaccaattcctatccttccaccatcaagcgttataagaaattgtctgaacccatctccacgcttcccaagcaggttctcctccggtacgacgacgtcttccataacaagttctgttgtattcgacgaatgcaatcctaatttctcataattatcaatcactctaaagccaggtgcggaagtaggcgcaattatagcgcttatttctttttcgccgtctttacgatttgtaatcgccgttaatgcaagatgatcggcgtaagatgcatttgtaatatagcacttattcccattaataacccacttgccgtcattgagagaggcttctgtttctgtccctcctgcatctgatccggcattgggctcagttaatccgaatgcacccaatgactctccagaacaaattggagcaaggtatttttgcttctgttcttctgtgccaaacaggtgcagcggtgctcctccaagcgatacgtgagcggaataagtaattccagttgacccgcacgcacggcttaattcttctacgacaatggcaaagcttattgtatctgctcctccaccaccatactcttctggaaatggaagacccataatacccagttcacctagttgttgaaaaatctctttaggaaacctcttttccttatctctttgttctgcaccaggtgcaactttctcatccgcaaactctctaatcatcttttgaatcattttttgctctttcgttaagtcaaaattcattaccacataacctcctataaatactgctgaattgaatgcgcttacatttcattatctcttttagatgtaattttttcaacgttttagaaaataaaaataatttaatatattatttttttgttactaaaactcaaaagcctattatgacaggaggcagtacttttattttcaaaacggtcatttgcaaaacgaaagaaaaatcagtaaaataaatgacaagaaatgtattcttaaacccacatagtaattcttcgccggctaaataaacaagttaaatgcgaatgagacttaaacgctaatagttaataaaaaaatctctgaccgcttaagcggtcagagagtaagtaagtctattccagaaaatcttttaatcgtttgctacggcttggatggcgaagtttacgaagagcttttgcttcaatctgtcggattcgctcacgcgtaacgccaaagacgcgtcctacttcttctagtgttcttgttcgcccatcgtctagcccaaaacgaagtctcaatacgttttcttctcgatcagttagcgtatctaaaacatcttcaagctgctctttcagcagttcataagctgcagcatccgatggcgcaagggcatcttgatcttcaataaaatctccaaggtgggagtcgtcttcttcaccaataggcgtttcaagagagacaggttcttgagcaatcttaagaatttcacggactttctctggagaaagatccatttctttaccaatttcttcaggtgatggttcacgcccaagatcttgaagaagttgacgctgaactcgaattaatttattaatcgtttcgaccatatgaacgggaatacgtatcgttctagcttggtctgcaattgctcgagtaattgcttgacgaatccaccacgttgcatacgtactaaatttgtaccctttacgataatcgaatttttcaactgctttaatgagtcccatgttcccttcttgaattaaatctaagaagagcatgcctcgtccaacgtatcttttcgcaatactaacaacaagtcgaaggtttgcttcagcgagacgacgcttagcctcttcgtcaccttcttcgatacgttgtgctagactaatctcttcctttgcagaaagaaggtctacacggccaatctctttaaggtacatacgaaccggatcatttattttgacacccggaggaacacttaagtcgttcaaatcaaattcttcttctttattaacttcttggggcgaaggattatctgaagtatcttcgatgacttcaacaccttgttcctctagatattcaaagaattcatccatttgatcggaatcctgttcaaatggggacaaccgttctacgatcgtagagtaagtaattaagcttgttttctttccaagctctactaactgctctttcacttgatcgatggttaattcaccttccgccggttggcgagttggtttttcagccattcgatcccctccttccatacatctcaacaataaaaatcagtcattatcttaaaatgaattttttaagttctttttcatttcaagaatttccatagcgatcttggctgcctggacaaaatcttgcttcatttccgcttcttttttttctttttctctctcttctatctttatccattctggataatttaacacctgccggatataatcatgtaattctttgtccgacacgtcattatttaaatccatcatggccagttcagaagcaattttgacaaggttaggatcagtcagctgctccatgaattgactcacgtcagcttcatggccgttagtataaaagctatacaggtatgcagcaatcgcactatgctcgtcaatattaaacgaaccgccaacctcttcctgtactttttctgccacttccagatcgcgcatcatataagcaagtaagatacgttctgcattctggaatgctggcaagagttttttcttaacatagaaatttttcctagcattattatcccttttcagaggagcattatccttacttttcttcccctctttaaaaaactgagaaacctgctgctttaaagcatcgagtgagagtgagaattcttccgctagctgccgtaaataatgatcgcgttcaacagcattagaaagacggctaatttctttaagtacttcttcgatatagcggattcgttctccttcatccgataggttttttcctgatcgaaaaacctccattttgaaagccattaccgttggcgctgcccctattacatccttttcaaaccgttctgcaccgtatgtccggatatagtcatcgggatctagtccacctggcatttttgcaattctaacgtagcacccggcttccattaattcgtctgccgctcttgtggcagcattggttccagccttgtctgagtcataacaaatgaccacggactctgtctgtcttcgcagcagctttgcttgatccttcgttaaagccgtacctaaacttgctacaacgttttgtaccccatttccgtatgctgtaatcacatcaacatagccttctaataggattgcctgatcttttaagcgaatagcagagcgggtaaggtgaaatccatagagaaacttccctttttgaaaaagcttcgtttccggactatttaaatatttaggttcgccatctcctatgattcttcctccgaatgcaactggtcttccttttggatcccaaatcggaaacataatcctatttcgaaagcgatcgaaatactttccatcaaattctcttttggcgagtaagcctgcgtcagccacttttgcgagagggtagtttcttttttctaaatacgatgttgcatagtcccaagagtcaggtgcaaagcctaactggaacttttcaatcatttctttcgaaaaacctcgttcattaagataagcacgggcttgttcgccttccggtgtcttaaccatacaatgattgtatagtttagcgagaaagtcatgggccttatatatggtgtcattctcagaatttgtttttgcactaccgctctgattctcttgcacttcaggtaagtcaataccggatttttgtccaagactttgaaccgcttctacaaagttatacccttcaatttccattaaaaatgaaaaagcgttaccgccagcaccacatccgaagcaatggtaaatttgcttgtccggcgctactgaaaatgaaggagtgctttcaccgtgaaaaggacaaaggccaaagaaatttcttccttgctttttcagttggacataatcgctaatcacatcaacaatatctgtggatcggcgaatcgcttcaattttttcttctgggattctgccactcattatttatcaccaacagattctatagtttcgacaaataaaaataatctccttcataattcgacaatatttttattagttcttcccgaaattgaactcgatcatcaccggtaaactttcgtggaccttttgtatgcttaccagctcttctacttttagatgctaggtaccgcgtatgtaaaagagtcgatatgttctcttctgtataccgtttccctcttggagaaagaacaaaaacaccttttggaaggagcaaacttgcaagaccatagtcttgggtcacagcaatatcgccttttttggcatgacgatgaatatagagatctgcttcttccttttcagagtctaccataacccacttcgcctcacggaacgtcgtgctcatatgggcataagatgcgacaaaaatcgtttctacttctgatagagctttctgaaaagacataatttcttctttaattagaacaggacatgcatctgcatcgacaaaaagcgtcagtttctttttcgtcataattctctattctacatctccctgagttatccttcttttgaaatttatgttttaactttcagaattttagatcgaactatttcagataactactatattcttctgaaagccttctttaatgattatagacaaattttattgacaatatttgattatatactaaaaatattaaattgaacagataaaaacgataaaaaaacgccatcatcgagaacatttttgtctcgataatggtgttttcttgttatgcttttattaagatgtatgcttccctttataaaggcttaaaattaaattagctgtttcctctactgctcgatttgaaacatcaatcacttggcagttcattttattaataatcgtatcgaagtattccaattcatctttgattcttgtcatattagcatagctagcttctgcatttaatccaagcgcaattagtcgctctttacgaatgttatttaacttttcaggacttattttaagagcatagcattttccttctgcaacattaaataattcatcaggcggatcgacttcagggactataggaacattggctaccttcaacctcttgtgtgctaaatattgtgataaaggtgttttagaagttctagaaacacccacaagcacaatatccgcaagtgcaatcccacgtgggtctctcccatcatcatacttcaccgcaaattctattgcctctactcgacgaaaatagtcttcgtcaagtttatgtacaagtccaggctcatttcgtggttctttccctattactgcctgcatatggtcaatcattggaccaataatatcaatagcctgaatattttcttttgatgcgacttcaagaaggaaatttcttaactccggaactacgagagtaaaagcgacaatcgcttttgtttcttttgcaagagtcatcacttcgtgaattgtcgctgtatcttctacataagggactcttcggacatcaaaatcggtagggtcaaattgacttgcggctgcctttacaacaagttccgctgtttcgccaaccgaatcagaaatcacatacacaatagcacgattcgttgaattcgtcatataaacctcctaagctaaataatttcgtctttggcaagatccactagtgctcgcgttacgtttgttttcgttatccttccaataacctcaataccattctctacttcttttacgatcggcaacgcatcaatctgcttctcaattaactgattcgctacttcgattaagagatcatctctctgacatacagtaatattcggcattctcgtcataataattgtaacgggtatactttcaagatcttgtttaccaagtgcagctcttaacagatcttttcttgataatacaccaacgagatgtgccaattcattcactacaaacaatgtgccgacatcttcaaggaacatggaacatatcgcatcatagacacttgcattttcttgtacgacgacggggattgatttgtaatcatcaactttaatttttcttattttctcagtaagaagctgtgaacctgttttacctgtataaaaatacccgactctcggcctcgcgtcaagatagcctgccattgttaaaattgctagatctggtctaagcgtagctctagttaaactgagcttctctgcaatgtgctcccctgtaatcggcccttcatttttcacgatctgaaggatggtttcctgcctattgtttaattggataagaatcaccacctttaataaggttatactttattttcattattatatacgattataccattttaacgaaagtactccgcattgttttgtgaaaaccatctgttaaaatactttatttaaaaataaaaacctgcggattacattccgcaggctaatctaattactcaagtttaaaccggtccaactgatccaaaaaacgttttgattttaaataaagaccggaataagcgtcaaaataaaggttaagaatttgtctaatctctttttttgtttctttttttagtgaaatatttcccaatcttcccaaatcaatatgtgcaaataaatgaagaagttctgctgtccgtttcatgatcggaatgttataaggatccactgaaagacaccgatgacatagtaatccaccttcattaatagagaaatgaaacttcccttcagaaagaccacagtttgcacaacgatctagttgtggtgtaattcctgcaacgcgaagcattttaagctcaaaaataaataaaatgacttcagggtctttttcttcattcaacgaatgaaggacctgataaagcatttcaaataaataagggttgggttttctctcttctgttaatttatcaactaactctgccgcatatgccgcataggaagtgagaaacaaatcatttcttatggagcgaaacgaatcaattatttctccctgattcaatcccccaaggcccgatgtatgctgataaaggtactgtccatagacaaaaagttgtgaaacagcagaaagacggcttttaggtttttttgcgcctcttgccatgacgccaaccttacccgtctctctcgaataaatcgtcagtattttatttgtttcaccatagtccacggttcgaatcacaattccttcaaccttttttaacaagaactttcaccaaccgtttcctgttgcaattccaaaaggtcaagagaggcgaggtacttcttccatctcggcgagagaatcattgtcttcatcattcggtatttccatttccttcaaaagaagataagtatcaatgtttcctgtttcacaaaatattttccaggtaaactctaacactttagatcccacctttcattttgtaaaaagtttatctcttacctctagcttgaccttacataagtcggtttatgtgatggaatatttaacaaaatttcacttaataatcatcttctcgataaccataatcacgtaacgatgaaggtttattacgccaatccttcacaaccttcacccagatttccataaagacacgggaacctaaaagagcttcaatatcttgacgagctcgttttccaacttcttttagcatctttccttgctttccaataatgatgcccttctgagaagagcgttcaacaaccaccgttacgtgaatatcgatgacatcagatccttcacgttttaccatttgctcggttactaccgtaacagagtgaggaatttcttctctcgttaaatgaagaactttctctctcacaagctcagctacaataaagcgttcagggtgatcggtaacatgatcacttggataatactgcggtccttcttcaaggtagtcaacaacttgctcaagaagagtgttaacgttatttccctgcaatgcagagattggaacaatttcagcaaaagaatatttatctttataaaaattgatcatagggaatagctgttctggatgaacctggtcaattttgttaatgacaagaaagactgggctttctacattttgcaaacgatctataatatactgatcaccagcaccatatccttcttctgcattaatcacaaataaaattaaatcaacttcatttaatgaactctgagccattttgatcataaaatcgccaagtttatgtttaggcttatgaatacctggcgtatcaatgaaaacaacctgagcatcatctcttgaatagacaccctgtaccttatttcgggtggtttgtgctttatcactcataatcgcaattttttgtccaataacttcgtttaacaacgtcgatttccctacatttggtctaccgacgattgatacaaatcctgacttaaactcttctttactcattcaaatcctccggtgaaaatgcgccaggaagtaattcgctgacggttaattcttgtatttttccatctaagttagttaaaatcacttgcatttctgggtcacacagttctgagatcacttgtctacatgcaccacacggtgggacaggacgttttgtatcagctaccactgcaatggctttatatgatttatggccttctgagtaggctttaaataaagccgtacgctctgcacaattacacatactataagcagcattttcaatattacatccgccaaataccgtaccatcctcagacagcaatgctgcacctactttaaactttgagtagggcacataggccatctctcttgctttttttgcttcctcaatcaacatttgcttttccattataattcctccttatgactgaaacaactgagcaatcggttcaaaaaagagaaggacaccgattataactgaaataactgcaaaaagaaagactgctgcagctgacacatcctttgctacctttgctataggatgttcttcttccgtaattaaatcaattgtcctttcaacgcctgtatttagtgcttccaaacttagcatgataccgattacagttagcaacacgcacattttaattgttgataaacccaacactatcccagctattacgaccacaaaacctgctaggagatggaagagaaagttttgttcattttttattaagtaacgaaaaccttgcgatgcatatagaaaactacgcaaaaaccgcaccagcctagaacgcttatctcgtgaggccatattgctctaaaagcactttttgtttaccgaacatttctttctcatcttcgtctgtcatatggtcataaccgagtaaatgaaggaatccatgaacacataaaaagccgagttcacgttcaaagctatgtccataatcagctgcctgttcttctatttttgggaccgaaatgacaatctctccaagcaggtgcggtatttgttcatcaaatacgatcggatcatcaccctcttcttcgtcatcaagggcaaaggaaatcacatcagtaggctgatctttcccgcgataatctcgattaatctccgtaatccgctcattatttacgaacataatcgacacttcgcttcccgcttcaaccccttcttcctttgctgcatggctcaataatttttcaagcatttcaagctgatcttgttttaatgtttcagtttcatcaataaaatcgattgttagattcatgaagtcaccttcttttttatttctgtcggatactcaattcgactgtgaaaaatgccgtttaacgtttctagaatcgttcttgcaacgatgtcgagctcttttagtgataaatcacattcgtcaaattgaccatcttctagtctttccgtaatgatttttcttacaagagattcaatcgttgttggatttggtttcgtcattgatcttaccgccgcttcaatgcaatctgcaattccgacaactgccgcttcctttgtctgagcttttggcccagggtatcgaaattccatttcagaaaccgcctgatccgtctgttcacttgctttgtaataaaaatatttcaataatgttgtaccatgatgttgttcagcaatatccacaatttcttttggcaatcgatgctttcttaacatctcagctccatcagaggcatgcgatacaataatagttttacttaggtgaggcgaaatcttatcatgcggattttccatattcatttgattttcaataaagaagtgaggccgtttcgtttttccaatatcatgataataagcgcctactcgtgcaagaagaccatttgcctcaattgattcacaagctgcttctgacaaatttgcaaccatcacactatgatggtaagttccaggcgtttccacgagtatttttcttaacaaggggtgatttggatttgataattcaattaaccttgtagtcgaaataatgcggaatccagcttcaaaaaacggcatcaatcccagagttaacatggaagataagaaaccagacaaaaaggcaaacacaaagtgatagctaagttcaataccaccatattggccattctttaacattaataatatagccacagctactatgtttattagtgaaacaagcaatcccgcagttaaaatgtttgaacgatgatttctctttccgagaaaaaacactcctgatagcgaactcattaaaacatagaatccaagcgaagcattcattggcccagtaatttctccgttaaagaaaacacccgcacaaacgccaaaaagtaagcttgaagcaattgctaactgttcgttaaaaagcatctttattaacatagaccctactgctgctggaacgatataagcaatccctggaacttctatcccctgtaataagcttgatagcttaataactagaagcgtgctgagatagataagcacaagaataaggaggtttgtattggaagaacgaactcttgatttgacgtcttgaaagaaataatataaataccctgtaagtaacatcacaagaagagcaagtcctatataaggaacagcatcaaacccttcatcaagtaaaccagctagtcgaagctgctccattacttcccggttaatcatggcgccttcttctacaatgatttgtccttcgcgtatcattactggctggacagcttcaattgcttcttgacgactttgttctgtttgttctggatcaagaaagtaatttggtacaatactttgctgcgctactgtaatcattgctttcttctggtcagttgggagcgaagttagggataaccggtcttcaacatctgatttagattgctctaaattatcaattgatactcgatccgtcataacttccattacctcagataacgttagttcttttattaaactaatttgagaaggttccgcttcaattaacggctttaatgtatcatctgtaagttcatcagacattgaggctgaaataattgattgaagctctgatattttttcttgagtcgttttttcggcgcgttcattcttattcactttatctatcccagaaaacaaatcatttaacttatcaaactgggactgtgaaacctcatcacggtaaacatatttcgcatcaatttgagcggcttttgatcgctcgtcttctgtagcggttttattttctatcgtaattggtgaagcaatatcatgatcagctctcgaataaagcgaaacatccagggactctgggataacatttgatagcatcgttaagtacataatgagcgccactagtccataaagcgaccattttatcattttaatttgttcgatattacggagattagtttgcaacaaatgcttaatcttcgcaatcatagcttccttcacctcataagttctggcctctactactcttcttcatattttatcagaatttcctaattaatggaccataatcttataataagttcacgtattgatgcgccttctatcttcttatcctttttacactagcccgactttgttgacggatagggctcaaaaaaggcccgttttcaaacgggccttttgagcttattttgtttcatgttcatatgcatcaataatacgctgaactaacgggtggcggacaacatctgtctgctgaagataaataaacgacacatcttttactcgtttaagaattttttctgcggccgctaagcctgattcttttcccttaggaagatcgatctgtgtgatatcaccagtgatcaccatttttgagccaaaacctaatcgtgtcaagaacatcttcatttgttgagaggttgtattttgtgcttcatccaaaatcacatagctatcgtcaagcgttcgccctcgcatataggcaagcggggcgatctcaatcgtacctctttcaatcagtcgagtcgtttgttcaacccctagaacatcatgtagagcatcatatagtggacgtaaataaggatctactttttccttcaaatctcctggcagaaagcctaaactttctccagcttcaactgctggacgagtaagaacaatcttcttcacttgattgtacttaagagcagttaccgccataacaacggcaagatacgtttttccagttcctgctggccctataccgaacaccaggtcagtctttttcatcgccgatacataatggcgttgaccaagcgttttcactttaatcggctttccctttgcattcgtggtaatttcctcttgatacagttccaggagctgatcaagcatcccttgctgcactaattgacacgcataaacaacgtctcttccagagatacttgcgcctcgcttaatgagggagtgaagggtatgcacaacttcttttaccatcgtgacgctgtcttcatcccctctcacagatataccttctccgcgagtaacaagtgacactttaagggcttcctcaattatctttaaatgctcatcaccagggccaaataagctttgagcttcattagaattttctagctgtaatgtaagatcaacataagattctgccaatagacctcaatctccttgaataatcggtatgtctttcccaatctcttctattatttcatagtgtatctttacgtttactttaccattctctacctcatggtgtaaaattttttcctctttaatttctgctttttctgatgttttacttattatgtcttctctactaacttgactagctgcctgaagcgcttccttttctgtatactctctcgtaacttctttggtttctaggagctcttttgtttgaaacgacaaaggaatttcccattttaggaagcgtaaattcgtttcgcttaacatcgtttcataacgagaaaactccggctttgaaaatccccatatgggaaggtgaaaaccaaaaaaacctaccgaatatttcgtttctctttcaccagtattcgtttcaaaagttgattttaaagggatagatacattcgttacataccatgtcttcccataaacttcccctctcgcagggaccagttcacttttttcttcttttccaataaaccctgaaatgaggagctgacctggtttaacataatcgttttcttttacctgaacctgtccttcttttacatatatttttgtaataatggcttttttatcagccacgatgtgccttgcatttaaagcaggctgtttttcaggcaattgcttttgaacgacttcaaagtgatacgtcgaaccacttcttttaacacccacccaggtgatttcttcaaggctttcagtcatttcctgctgtagctcctggttggatggtaactgaaatatgaatgcaccttttttcactccaagttcttcggctacttgctttaacttatgctccacttcaggtgttgcgccattcacagtgattgaccataccatattcgataaaatgagaatgagtagaatgcaacttatgatcccactcaggaatcctctagagtagactattttttttaatataaaaggaaatcccttcctttcattaatgcgtattttacatcttgtcctctttaaatgcggcctaatgcgtttaatatcggtagtgtagagcgataacagaatcgtttcattatccacacgagagatgtcccaaattggaatgttgtattcaatacaacgattaataaaaagttccgtataggacccgaccactttaattcgcacatatccagaaaaaagttctttaatgtattccttcataataccctcccgtatcgtcagcccgagaatctcttaaggcttttatcagttttggggtttatcaagataggaaacatgttcaattttaccttccagtaaaatttcctcaggaaggattgttttcaacataaaatcctctccttttattaccaattgaccatttttaagaagtagtcggacttcatcattagagaattttagaacaccttgatgattctctatgtaaatatgtagctgtccaaccatcgtgatccgcggcaaatccatgaccgcatctgctggaagctctaatcttctcgttaaccaactttttagattgtgcttccactttgccatggatactccccctctccactcatctttatgaaagaaaacacaaaactatcccacttacatgcgattaaagctcctgataccatcttatgcagctgccatttaaatcattgcaacccataaaaaaaagacgccatatggcgtcttttcgttacctatttctttgtttcacggccaccattgaaggatggggttttcttgaccgcggtggtccaagaatctctgcccatataatgccgtttcgaacatttgacttgctaatagagagactcttatctttcgtatatggcgttgatttcacatttttttgtactttcagctcattctgtgaaccgtaattctcacgtttcgccatacgtcctaaagcttccttgtaagcactaaccgtatcagatttagaagcgtcttcctctatttcacttgcttgcatagaaccacctgaaccaggattactttgttctctttgcggccgcttttgagtcggattggctttttgtttttcttcctcgccgctcatacgcttgaagaagctaataataccaccaattgcaataataacaaaaacgatattgtttaatagcagttcaataagattatccacgacgatcacctccaacaaaggattgagggaatagcttagcgatcatcctcatcttcttcctgatttggtttaccgatcatgtctctcatgtcagtatctgcttcaatgttctttagattcatataatccatgacaccaatgttaccagaacgtagcgcttcagccatagccattggtacttcagcctctgcttcaactactttcgcacgcatttcttctacgcgagcccgcatctcttgctcttgcgcaactgccatggcacgacgttcttcagcttttgcctgagcaatgttcttatctgcctcagcctgatctgtttgaagcaccgcaccaatatttttaccaatatcaatatccgcaatatcaatggaaagaatctcaaaagcagttccagcgtccagtccttttgataaaacagtatgagaaatcatatcgggattttcaagaacctttttgtgattctcagatgaaccaatcgtactgacaatgccctcacctacacgagcaatgacggtgtcttcaccagctccacctacgagtcggtcgatgtttgcacgtacagtgattcttgctttcgcttttacttcaatgccatccatcgcaacacccgcaataaatggcgtctcgattactttaggattaacactcatctgaacagcatctaaaacatctcggccggcaagatcaatggctgcacagcgttcaaaactaagctcaatattagctcggtgtgcggcaatgagcgcattaacgactcggtctacattaccaccagcaaggtagtggctttcgagttgatttgtgtttaattcaagacccgctttgaccgctttaattaacgggttaatgacacgggatggtattacacgacgaagcctcattcctacaagattgaatatactaacgcgaactcctgctgctagtgctgagatccacagcatcacaggtacaaacgtaaacagtattgctaaaccgataatgactaaccctacaataactaataatcctaacgtgctagtgtccatcattttcctccctattattctttatttacttgctcttacaacgactcttgaaccattcgtttttacaattttcacttctgtgccagcaggtaaataacccccctctgtcacaacatccatgcgttcatctccaaagtctgcaatacccgatggccttagcggtgtaacggcttctccctccatgcctatcaactcatttcgagtggcattagacacataacctaactcagtgtttgttgaatcggaaagaatgatttttttaaagaatcctcgataaccaaagattcgaatgaagaggtaggaaccaccaattgtaacggcaatggcaattaagaccgctaacagaacgtattgcatggattgtcctgaagccaacacaatactcgcaacaattccaatagcacctaaaaccccgaatattccaaaaccaggaataaacacctccaccaaaattagaacaactcctacaatcaatagtagtagtgattcccagccagcaaatcccgcaatcatatgaccaaagaaaaacagaagtaatgcaccggcgcccataaagcctggtacgccaaacccaggagaatacagctccaatacaaggcccagacttccaattgataataaaatcggaataatgattggatttgtaacaaagcgagcaattctttctgcaatactcacttcagcatcactaattttggcttcttcaagattaaggatgttaagtaattcagttcgatcctcagccgtcccttcagcataaccaacctctaccgcttcctgatcacttagtgtaaggagctcccctttaggtgcgttataatctgggaggtcaacatctgggtccgccatggctaaagcgtattttggatcccgatcatttagctctgccgcagacttcattgcggcgtgccaaaaagattctgcttttttgccggctgcatttcctgactggtcaatgatagcggctgatcccattaaagccccaggctccataataatttgatcggcattcaacgcgatgtaagcgcctgctgaaagagcacggttggaaacataggcggtgatcggaacgtcagatgctttgatgatttttgcaatattatctgctgcatttactgctccaccaggcgtattaatttctaatacaatatgatcagcgccttgatcctccgcatcctgaatcgatcgctttagaaaagcttccaatccacgttccacttcttgttcaacaggaataaatgtaacgagatcgccctcgcccttacttaacgcaaaatttcctgcaaacggaagaataaccatcatcatgaaacaaacagatacaaagaaacgcattgtattttttctgattgtgatccctccctccagctacataagtatacgaataaggtcatcatgaagtttcatttttatgtagataaaactaattttagtatgacaaataaagaaactaattactagcttaaaataatgaactgataatctccttaacttgtttatatattatcattgtaaaaaagaattttatgtatagaaaaacacgccctgttttgtacagagcgtgtttgcgcttcatcatatttatccaacgctcaaggcgaagtttgactgtttctttttcatatgaagaaagaagaagtcaacttcaccttaaggtctgattgtttcaactagtcaccttgaggaaatgagtgatctcctaagttgaaagtatcactttatgataagttcttttgtacaagacgattaacaagtccgccgtccgctttgccctttacacgaggcataagcgcacccattaccttgcccatttctttctttgaagaagcacccgtttcagaaataacttcctgaacaatttgttctacttcttcttcagagagttgtttcggcaggtagacagataagatcgacagctcttcatcgagattctgtacaagatcacttcggccagctttttcaaattcaaggagggagtctttgcgttgcttgacttcgcgagtgagaacggtaagttcttcctcttcagttaagtcatgacccaatttaatggattcattctgaattgaagatttaaccatccgaataacagatagtttgtttttttctttgttcttcatcgctactttcatatctgctgttaaacggtcatttagactcactgacctaacaccctctcttagaacttacgctttttccttgctgcctcagatttctttttacgcttaacacttggcttttcatagtgcttgcgcttctttacttcagccatagtgccttctttagaaaccgttctcttgaagcgacgaagagcatcatcgatcgactcgttcttacgcacgcgagtttccgccatctctatccctccctccaaaacatagacaatcataacacatgactttctaacaaagacatgtcacctgcaattataatacatccctttcggtttatcaacatttctttctgtaattttctttttaaacttctttctaaaaataaatatgcaagtagttcgcttgattgcaacaaaactgaaaagtaaaagctttgggtttatacatgcacaaagcgaatacctcattctaaaaggctcttttctagctttctaaaaaaataacgagcatgtcgatgggaccctgtccataaactttcaatggaaaggagaatttatacaaaatgagtccatatatagcctcttttatcgtcttcattagtatttttctttttggtatgagcattcttcgtgtggggttaaatacaatttctactactaaattacagaaatggctttatcatgcctcttcaacacccatccgcggacttctaacaggagctcttgtaacagcactcttgcaaagtagctccgccgttatggtccttaccatcagtttaattgcagctaaacttcttacatttcggcagtccatcggcatcattctcgggacgaatatcggcacaacgataactgcagaattaatgacactaaatcctgaacaccttgtattaccattattacttacagggtttattatgcttcaaattcgacatcagctcatttttagttcgggcaccgttctgtttggtcttggatgtatctttgtagcgatgcacggactagaagcactagccatcccgttatcaacactttcgatttttgaacatgtgattcacgaaacaaattctagtcttctgtatgggatcgggcttggaaccttagtcaccgctgtcattcaatctagttcagctactacggggattacaatggggtttattaatcaggaattacttacattacctgcagctattgccatactatacggatcgaatgttggaacgtgtatcaccgcgctaatggcaagtatcggtagtagcaaggaagcaaaactcgcagcctatgctcacgtttggatcaacataataggcgtgatattgttcttcccattgattggcttattcggcgcatttgcaactagtatgacatctctcccagatgttcaacttgcacatgtttcgattcttttcaatgttctttctgcgttcttattcttaccttttgcagggctacttgccaaatcgatcgaaaagttacacaattataatttacaataaaaaatccatcacttctaatactgaagtgatggatttatcgccttaataatctgtatcagcagtttcaccttgcacaatcttcactccggcactcgctccaattcgtgtagcgccagcatcaatcatcgcttgagacccttcaagatcacgaacccctccagatgctttcacaccgatgttaggtcctactgtgtttctcatcaatttaatatcttctactgtagctccagcagttgaaaagcctgtcgatgttttcacataatcagctccagctttaaccgaaagctcacatgcacgcgttttttcttcatctgttaatagacaagtttcaatgattacttttacaagagccttccctttcgcagcttcaactacagctttaatatcttgctccacaagatcattattaccgtctttaagggctccgatattaataaccatatcgacttctgtcgcacccttttgaatcgcatcttttgtttcgaaggctttcgtttcagtagtaactgcgcctagagggaaaccgattactgtacaaactttcgcttccgctccttctaacttctcagcagcaagagctacccatgtagggtttacacacacagaagcaaagttgaaatctctcgcttcgtcacaaagtttctcaatttgctctcggcttgtatctggcttaagagctgtgtggtcgatcattttcgctagttctttattcatggttgtcatccttccagttctgtataattaggctctgagcacctttatttaaaacgaagcaactgcagctgttggttcatcctcattcataacacgaacgaattgtccttcgttataaggatagcccgcttttgtgattttcactttaacaatctttcctatcattgcttctgaagcttcaaaaatcactttcatatagttcgccgaatacccgacatataagtctgaagtctgttcttccttgtatttttcttcaggaataacttcaagaacttctccttcatagtgagacgcgtactcttttgccagctgatttgaaagctcaatcaaatgatgaactcgcttattcttaatttcatcatcaacctggtcttccattcgcgctgccggtgtaccagtacgcctagaaaatgggaaaacatgaagttctgagaatttatgttttgcaataaaatcatacgtttctttaaattcttcttctgtttcacctgggaaacctacaatcacatctgaagtaatcgcaagtcctggaagagcttgtttcaaacgttccaagcgctcgccaaacatttccattgtatactttcttctcatccgctgaagtaccgtgtttgaacctgattgaagtggaatatgcaagtgtggaaccactttttttgactgatttaatacttcaatcacttcatccgttacctgacttgcttcaatagaagatatacgaattcgtttcaaacctttcactttcgcatcaagatcacgaagaagttgagcaaaattataatcctttaaatcttctccatatcccgctgtatgaataccagttagaacgatttctttatagcccgcatcaacaagttgctgcgcctgagtaagaacggcttcaggttcacgcgaccttagaagacctcttgcccatggaataatgcagaaagtacaaaaattgttacagccctcctgaatcttaagggatgcacgggtacgatccgtaaaagctggaacttcaagttcttcatatacacgcgctttcataatattgcctacaccgttcacaggctctctctcacgcttatattgctcaatgtaatcaagcatcttcacgcgatcctgtgttcctactactacatccacaccaggaattgccataatttcagcaggtgaggtttgggcataacaacccgttacgcaaatgacagcatccggattttttcgaatcgctcgacgaatgacctgtcgacttttcttatctcctgtatttgtaacggtacaagtattaataacataaacatcagatgcatgatcaaactccactcgttcataatcatgatctttaaacaactgccaaatcgcttccgtttcatagtgattcactttacaacctaatgtatggaatgcaactgaaggcatatcatcaccccattaattcaaaatgataagaaattgctgccagtacatacatagcagccgtttctgttcgtaatattctaggaccaagtccacatgaagagaacccagcttctttcaaagtggcgacttcattttctgagagtccgccttccggaccaaacacgaccataattcggtcgttcatatttgcctcgtgaagcgtttgaacgagcgtagcagattctcctgctcttgcttcttcttcgtaagcaattaatttatgatcatatgattcactcgtcttaatcaatgaagaaagggattgaggcatatcaatccttggaatcgttgttcgatgagactgctcagccgcttcttttgcaattttgtttagcctctgcaactttttcgcgcttttttgctcatcccattttacaacagaacgttcagctttaaaaggaataaactgatcagcaccaagttctgttcctttttgtatgaccgtttcaagtttgtcacctttaggtaacccctgtacaattgtcacgtttacaggtaaccttttttgctcgtcaagccactcttttggaatagctttaatgaagtcagctgatagctcatctaattcacaaattgccgattgaccatcttctgtgcaacaaataatgcgatcgcctactgccatcctcatcactctcgagatatgcttgacatcttccccttcaatcaaaatatgatcttggtgaagctgagatttagagataaaatatcgttgcatgaaattctctccttacgcgtggggctttctcgcaataaaggcaacccaatcttccatttgtagagtttcttcaatttcaaggccctgatctagaatcgattgtttcacttcctgcttcttggcagttatgataccagaagtaataaaggcaccaccaggcttaagaaccctggcaacgtcatctgtaaaacgaacgattatttccgaaagtaagttcgctacaaccacatcataggactcttctacaccctctagaagattattttgactcacattaattttgtgatgaactttattaagttttgtattaagagctgcgctttttacagctatctcatcaaggtcaagtgcatccactgaatctgcacctaaactagctgccgcaatacttaagaccccagatccggtaccgacgtcaatcacacggtgtcctggtttaataattttctcaagcgcttgtacgcataataccgttgtcggatgtgtacccgttccaaatgccattccaggatcaagctcaataataatttcatctgttgtaacaggctggtagtcttcccatgtaggtgtaatggtgatacgttcagaaattttgacaggtttataatattttttccaagctgtagcccattcttcctcattcacttcacttatttgaacagtgttatgccctagatcaatatcatagacaagcaatccattaatcgcttctttgatttgttcaaccgtttcaccaagaaaactattgactggtaagtacgcctttaatataacgccttcctcaggataatcatcaggattaagctgataaacctctccgaaagtagtatcccatactttcacaagatccatcgggtcttcaataactaccccactggctcctgcttcatgtagaatgtttgacaccgcttcaatcgcttcgtttgttgtatgaatgcttatttcagaccatttcattcattgcccactcctcttttggatccttttttcggaaaggaaacaggcaggccatattatacggcctgcttgctaccagctttcatcttgcttattctcccttaaaagcttttttaactttagagaaaaaattctcatgttgctcatcaggtacctgtcctgaaatctcactaaattcacgtaaaagatctttttgacggtctgttaagtgtttaggagtaatcacttgaattttcacatgctgatctccctgaccgtagcctctcacgttctgaattcccttgcctttaaggcggaagttcgtaccactttgtgttccagctggaaccttaagtttaacttttccatggagggttggaacttcaatttcatcaccaagacccgcttgagagaacgtgattggcatctggcataatacatcatcgccacttcgttcgtaaaaatcatgtgatttcacataaaccactacaaatagatctcctggaggaccaccattgacaccagcttcgcctttaccagtaattcgaatttgttgaccttcatcaataccagcagggattttaacatggatctttttcttcacttccactttccctttacctcggcaagttttacatttatctttaataagcttaccagtaccttcacaatggtgacaaacgcgacgattaacaacgcggccaaatggtgtgttttgttcaacgtttaattgacctgcaccaccacagtgagaacacgtctcaggagatgttccaggttttgcacctgatccatcacaagtagaacattcctcttcttttggtatataaatatccgtttctttaccaaaagctgcttcctcaaatgttaattccattgaatattgaaggtcagcaccctgtcttggagcatttggattgcgtcgtccacctccaccaaagaacatatcaaaaatatcaccaaagccgccaaagtcagctccgccaccgccaaaaccttggttaggatcggcatgtccaaactgatcgtactgagctctcttctgtgagtcacttagtacctcatacgcttctgtcacttctttaaatttctcgtctgcaccaggttcctgattaatatcaggatggtattgcttggcaagcttgcgataagcctttttcatttcagcttccgaagcatctttgctaacgccaagcacttcataataatctcgtttactcatcgtatccactcccgattctcttcacataacgtttatcatatcattgagtttatacgctctgcaatactatatcgttagcaccagtgaacgttaacagttatcgtaggctaaactgatcctagctaaataaaaattgtagcagaaaactatcgttttgctccgctaacctcaaaagttcaacccttttttcatgtatggaaaaaaacgtaacttgtgattttttctagactctaaagttatttcaatgaaccttttaacgccactttgtcagcaggtggttaaaacgaaaaaagtcaaagtcaagatacgcctgactttgactttttttcgtatcattttcttactttttgtcgtcgtctacttcttcatattcagcgtcaacaacgttatcatctgcttgctctgctccgccttcttcgccagcttgagcttgttgagcttgcgcagcttgttcatagactttcattgaaagtgcttgaacaacttcttgaagttcatctttcgcagtgcgaatttcttcaatgtcgtctttttctagagctgctttcactttatctttcgcttcattcgcttttgttacttcttcttcctctacttgaccttcaaggtctttaagagttttctcagtagtgaataccaactgatcagcttcgttgcgagtttcaacttcttcacgacgcttcttatcttcttcagcgttcgcttcagcgtctttcaccatgttttcaatttcatcatctgaaagaccgcttgaagatttgattgtaatagactgttctttattcgtaccaagatccttcgcacgaacgttcacgataccgtttttatcgatatcaaatgatacttcgatttgtggagttcctcgtggagctggaggaatatcagtcagttggaagcgaccaagcgttttgttatactgagccatttcacgctcaccctgaaggacatgaatgtccactgaaggctggttatcagctgcagttgagaacgtctgtgacttacttgtagggatcgttgtattacgttcaataagcttcgtaaatacaccacccatagtttcaattcctagagaaagaggcgttacgtcaagaagaacaacgtctttcacatcaccggcgataacaccagcttgaatcgctgcaccaagagcaacaacttcatcagggtttacacctttatgaggatcctgtccagtttccttcttaatcgcatcttgtactgcaggaatacgagtagatccaccaacaagaatgactttatcaagctcagatggtgacattccagcatccttaagagcctggcgagtaggcgccattgtacgttctactaggtttgcagaaagctcttcgaatttagcacgagttaggttaagctcaaggtgtttaggacctgaagcatccgctgtgataaatggaagagaaatttgagtttgagctactcctgaaagatcttttttcgctttttcagcagcatctttcaaacgttgaagtgccattttatcttgaccaagatcaacacccgtatctttcttgaattcagcaactaagtgatcaataatcacctggtcaaagtcgtcaccaccaagacggttgtcaccagcagtcgacttaacctcaaatacgcctccaccaagttcaaggattgatacgtcgaacgtaccaccaccaaggtcaaatactaggattgtttgatcttcgtcttctttatcaagaccgtaagcaagcgctgcagcagttggttcgtttacaatacgctctacttcaagaccagcgattttaccagcatcttttgttgcttgacgctcagcatcgttaaagtatgcaggaactgtaataaccgctttttcaacgccttcaccaagataatcttcagcgtatgattttagtttttgtaggatgattgcagaaatttcttgaggagaaaatgatttaccctcaacgtctactttataatccgtacccatatgacgtttgattgattgaattgtgttagggtttgtaattgcttgacgcttcgcaacttcacctactagacgttcttcatctttaaatgcaacgacagatggtgttgtacggctaccttccgggttagggataacggtagcttctccgccttccattacagcgatacaagagtttgttgtacctaagtcaataccaataattttactcattacattctacctcctatttcttgttatgtagttaagagcttacctttaccattgctggtcgaaggacgcgatcgtttaattgatagcctttttgtaagacctctacaaccacatctgaatcatgttcatctgattcaacctgcataactgcttgatggagatgcgggttgaatgcttctcctacagtaccaacttcctctacaccttcatttgcaagtgcttcttttaactgacgatagaccatttccattccagtaagcaatgacgttacttgctcattatcactttgaacagctagtgcacgttcgaagttatccattgccggaagtagcccttcagccaatttctgagaacggtatttagcatctgcactacgttcttcacgtgttctacggcggaagttatcgtactctgcctgtgtccgcatatatttattctcaagctcttctacttgctgttccaagttttcaagctcttcattttcattggtttcagatacttcaatcacttcaggttcatcattctcttcagcattttgctcaagattctcttcctcttccgttagaagctcttcttcctcttgatgactgttttgcttttccacgaatttcacctccctatcgaaatataccaaatcaatctctcatagaaaaggatggaagaaatgtttctcccaccttcttcactattaccaaattaccagtgtttgaaactttgatatcgatccgtaagcgtctttgtaagatcattagcaaggaaacccagaatgctcattgaccgttgatactccattctagtcggtcctagtaaggcaatggagcccattcgttttccttcaataaaataatctgctgtcacaatactacagtgttgcatcgcttcaagatcattttcttgaccaattttaacttcgatcccgtttttctcgggacgaagaatattatacatcacatcatcttgttcgaaggtattaagtaataacctgactttgtctatgtctttaaactcaggctgagtaagaatatttgtcttacctccgtaataaactttctctgcattcgtatagaggaaaagactttcaagcattgtattcacttgattataattctcgatatgcttcttcaaaacagttgccatttctttcatcatggtggacttcaaggaaataagcggcacatccttcaagcgctcattcataatgttaacaactttttcaatatcagacatgctaaccgagggcggaattttcatcgttcgattctcaacatgtccactgtcagctactaaaataacgacagctgtatccttagataaaggaataatttgtatctggcgaagtcttgtttcaaaaacttcaggtccaagaataattgacgtatattgagtgagttcagaaaggatacccgcagattgctgaatcactttttctacttccaccattctctcagcaaaaagagaatgaatgttattcacgtctttttttgaaagcacaggtggagatagaagatgatccacgtaaaaacgatagcctttttcggatggtactctgccagaagagctatgcgtcttctcgatataacccatctcttcaagatctgcaagttcgttgcgaatagttgcagagctaaaagtaacgtcttcacgttttgaaatcgttcgtgatccaaccggttctgccgtttgaatatagtcgttaattaacaactgcaaaatgaatagttgacgttctgttaacatctcctcatcacctctgttagcactctaaaggactgagtgctaaatctaataataaggtaacagaaacttattttagttgtcaatcattacgttaatcattattgtacccaaacaatattttttatgaaaaggagagaaagaacacaatctcccccttaaataaagcgttctatccagtcattctgtcttatctcaaagaaactaaatcgcaagaaattcctgaaacacttcgttacctaaaaagaaaccttgttctgttaaggtaatgtgtgtcccggtgtcttgtataagttgattttgaacgagcttattgatttgctcactaaatacatcttcgatcgagtgattgaacttcttttgaaacgtttcttttgaaacgccttctttcatgcggaggcccataaacatttcttcttccattcgctcgttttccgttagaacgttatcatccatatatggaaaaccactttcatcgatctttgtcatatactgcttgagaggaccggcatttgctcttctaaccccaccaatatagctgtgagcaccagcgcctattccgtagtactcattattcttccaatacgtaatattgtgtttgctttcataacccggttttgcaaaattgctaatctcgtattgcaatagaccagctttttcaagacgcgttattagcatttcatacatatcagcttctgcttcttcggtaggaagtggtaattcacctttacgccatttgttgtagaaaaccgtttttttctctacttgtaaggaataagaagaaatgtgcgtgattcctaattcaatcgctttcgtaattgactctgaaaactgaggaattgtttgatctggtaaaccgaacataagatctaaggaaagattcacaaaaccttcgttctgtgccatccgaacaatttccccaatttctgtaactgaatgccctctcccaagtttatttaggagagaatcctggaatgcttgagctcctatacttaagcgattcaccccataagctttcataattcttagcttctcaggtgtgacgctccctggatttgcttccatcgaaaattcaacagaatcagatagataaggcccaaaacgattttgaacatccttcaaaaaacgttctagctgctcctcattgagcgcggtaggagtgcctccccctacgaaaatagtctcaatacgatccgttggaaactgttcaagggtatgtttcatttccaaatccatatgagccaaataatcatttacaggctgtccctgcataaatactttattaaaatcacaatagtgacaaatataatcacaaaaggggatgtgtaaataaacagcgttaaccatttcaatcactgctttctaacataatgtaaagaccgcagaaacgctctgcggtcttctaacctacatggtataaaaatcaactcaggacttcaactaaagcaccttaattattctttgtattatcctggcgaagaacagccataaatgcttcttgtggcacttcgactttccctaccgttttcattcgttttttaccttctttttgtttctcaagaagcttacgtttacgtgaaatatctccaccgtaacattttgcaagtacgtttttacgcatcgctttaatggttgatcgcgcaacaattttctgcccgatagaagcttggatcggcacttcaaattgctgtcttggaataagatctttcaacgtttctgtaatgtctttcccgcgatcataagcaaagtctctgtgaacaataatagaaagtgcatcaatcttctcagcgtttagaagaatgtccattttcactaggttcgattctcggtaaccaattaactcgtagtcgaaggatgcataccctttcgtgcttgacttcaattggtcaaagaaatcatagacaatttcagaaagcgggatatgataaacaatattcacacgactttcatccatgtactgcatgtcaatgaaatcaccacgtttgccctgacataactccataatcgctccaacatagtcgttaggtgccataattgttgcttttacatatggctcttgcacttctgcgatcgattgagcgtcaggcatcattgcagggttatcgataataacttcttctccatcagtaagtttcacctggtatataacacttggtgctgttgtaatgagatcgatgttaaactctctttcaatacgctcttgaacaatctccatatgaagaagtccaaggaaaccacagcggaaaccaaacccaagagcctgagaagtttctgcttcatattgaagggaggaatcattaagttcaaggcgttcaagggcttcacgaagatcattgtattgagcagaatcaactggataaagtccacaatacaccatcggattcattcgacgataacccgggagtggattggcagctggatttttcactgatgtgatggtatcacctacgcgggagtcgcccacgtttttaatcgcagcagttagaaaaccaacatcaccaacagaaagctccttcttagcaactggcttagggttaaacaccccgagttcattcacttcaaattctttacctgttgccatcatgcgaattttatctccgacttttacagacccttctgtaattcgaatgtatgcgacaacccctctatacggatcatagagtgagtcaaaaataagcgcttgaagcgggccatcgggatcgccttgaggcgcgggcactttctcaacaatttgctctagaatgtcctcgataccaatcccagacttagcagaagctaatacagcttcagatgcgtccaaaccaataacgtcttctacttcttgacgcactctctctggctcagcactaggtaagtcaattttattaataactggaaggatttctaagtcattatcaagagcaagataaacgtttgctaacgtctgtgcctcgatcccctgtgctgcatcgacaattaatagcgctccttcacaagcggcgagacttctggatacttcataagtgaagtcgacgtgacccggtgtatcgattaaatgaaaaatgtattcttctccatctttcgctgtataagtaagctgaacagaattcagtttaatcgtaattcctcgttcacgttcaagatccatcgcatcaagcgtctgatctttcatttcacggtcagttaacgcacctgtccgttctaaaatacggtcggcaagagtcgatttcccatggtcaatatgagcaatgatggaaaaatttcgaatcctggactgtctttttaacttttcttcaaggttcatctacaatcactcctaaggcgaaactacgctagtatagattatagcaataccgctgtctagattcaatccgcaatccgcctatatcttagaagtacagttatcacatctctacattcgcactaaaattaaaaggaaacctaacaaaaaagggcacaaacgcgcccttttacctttggaaaaacgatagcaaagttgtaataaccgtaaacacaaatgataaaatcgcttgaatgagcgatgatacccattcgctcacagtactacctaattgtccaagtacattaaattcgtttgcatcttcaagtgtcttttgtttactttgtagatcatcataagtaatggaagttccaagaatttcagcctctaccccgttagtcgtattaatctgaaatgcacctgtattttcatttgcctgcatgttattcatatttttagaagcttgttccattcctaaaagcactccaaacaaaagtaatgaaacaaggagaaaagttttcataaaaaatgacgccatctctccggccccttcctaataaagcctgtccttcttttctatacgtatgccaaaagataatcgatatacctaatgagtatacataccactattttgttgatccacttctccatgcaagcaactatttagaccaccagaaatcacattcgccatatcctctataaaaacatcaacttcttttggtgtaaccattaagttgtgccccataggtgcaagcacctcgcgaattaagtttcgcttttcctcatcttcaagcgtaccaaccattccaagaaacgtttgtctctttccttcgtccggtaaatcttcttctgtaaatgtcttcctctcaccaaaggtcatgccagctggtgcgagtgatttggatggtttacctttttcttttaattcccttccaaaatgctttaagataaaatcgattgtatcactcgtgatagaaaccgcatcaacaacagttggaataccaatggcgataacgggaattccaagcgtatcaaagcttaattcttttcgtttatttccaacacctgagccagggtgaatacccgtatcagatatttgaatcgtagtgttaacccgctcaattgaacgcgatgccagcgcatcgatcgcaatcacgaagtctggctttgctttttcgataaccccatgaataatatcgctcgtctcaattccagtgatccccatcacaccaggcgtaatcgcacttacagggcgaaaaccctctgaaacggtttcgggttgaagttcgaataaatgatttgtaataagcaaattagaaacaacgagaggacctagtgaatcaggggtcacgttccaattcccaagacctacaatcagacaacttgcttctttggagatattctgttgctttagaaatgcagcaaactcatgagcaaaaacatcttgaacggtctgttggagagctgagtcttttcttctgatgccctgtacttcaaaagttaaatagtgtcccgcttttttgccaatttctttctcgccttgttttgttacctcgactgttgtaatgcttacaccctgttcggttctttctttgacgataacgccctttaacccatcaggttgctcttccttcatgctttttgctttcttttctttcaccatttcctgcgcttctaccgctagatctgtccttacttgatagttatctagttcaacgcttcccatcagatcaccccttgttctatctgttacctgttagcgtaaccccgaaataaggttttcattctctattgcaattcattgtcctatttgatagaatgtttcttgttctatgcacggatatgacatggaattgttaagccttgcaaggaggtgaaaggtatgccaaatattaaatctgcggttaaacgcgttagaactcaatctgatcgtcgcgctaataacattgctttcaaatctgaaatgcgttctgcaatcaagacttttgaagcgaaagttgaagctaaagacgttgaagctgcgaaaacagctcttaaccaagcttctaagcgcatcgacaaagctgctgacaaaggaatcattcatagaaacacagtagcacgtaaaaaatctcgtctaactaaaatgtacaacgagatttcagcgtaattccttaaaaacgttaaaagctgttgggatatcccaacagctttttttatgcatttttaattttagtaactaacaattcaagaatcagttttttatccattttacctgttttcatttcataatccgattcagcaatttgatctaaaataaagcgtaatttttcttcttcgaaacttcgacattgttgctgtgcaattttcactgcataaggatgcaatttaagagtggaagccatttgcttctgaccatatcctctcttcgtaagttcactaacctgataaataatccgaaactgcctgccaattaacgaaagaattttaatgggttcttcattgattttaagtaaatcatataaaatgcggaacgctttgtttaagtctttccttacgatacgatcaattaaggcaaaaatatcattttctaatgttcttgcaacaagaagatcaacaacttccgcattgacaatgccaccttctccaacgtatagtgccattttatctatttcctgttgcagtaacatcaagtgactacctgttaactgaacaagcctctcttcgccttcctgatcaagagaaacaccgtgttgctttgcgcgttgctgaagccagtcacccaaatgattttcttgtaacgcctcggctttaacaaatgctcctgctttcttaatggttttcaccaattttttccgctcatccagcttttcataaggggcttcaataataagaattgtaaaaggagatgggttttcagcatatcgctgaagcgagtccagatcatgctctactttgctcttatccttagcagctgttaaaaacaatggattctttaatataatgacacgcttctcccctaaaaacggcagcgtttcagcatcttctactgcagcttgtacaggtgtttcgtttaggtcataataagcaagtccaaattctttctcttcttctggaagcgcctgattaatgatcattttttgtaattcatcaatcaggaacgtttctgtgccagttaagagatagagtagatctaacttgttttgtttaattttcttttttaagtctgaaatggacatctatgtacacctcgtttttattcgtccatttctatcctaatccgtcaaaacgatgttggcaagtagaaaagggaagccggctgctataaccagcctcccatttatagtaaacgctccttcataaggcctaggactctcatgaagcaacgatgttcggtgtgtagtagataggatatcctatgcaaacttaaagtatgggtgacaactctttacaggaaagggagtgattatttcgaataaattcctctcatcaaaactgtaacagttactgaagattaaagacataaagtggaatacatgatacaatattgattgaaatgtacctttttaggaaatcccctacataaagactacattagtagtgaacagtgaatactaaggggaaagcaggagggaaggcaaatgaacgagttcgaaaaagatgttcaagctaaggataatgacgctgttcaatcagctgttggcttcgttgtaccatttttattcttttccatcattttcttcacggctgtaattattaaagcacttggctaaatagactgcctctaggcagtctattttccatttaacatcacggaccagcttccttttttattcgatcgatatgtgtattgaatcgcgccatttacgtcggttcgaagaatagagacaccgcgctcttgatagcgttctaaaacttcttcatcaggatgaccatagcggttatcttccccaactgatatgatcgcaattttgggggtgacacggtcaatgaactcttgtgagctagaagtaacgctaccatgatggcctacttttaccacgtcaattttcggaagagagtgaccagcaagaagttgacgttctccctccgcttcgacatcccccattaaaagccagctatatccgccaacgctagcatgcaaaacgatactcccatcgttctcttccttcgtctgtaacgcctgaacaatagtaaaattttcctcccctacgctccacgattgtcctacttttgcgtttgatacaggaacactttttgttcgtgcgatttgcattatattcgcttcgacttccgtttgttcactaccttgatcaagtaacaatctttttatagagatgccttctaaaatctctttcgctccacccgcatgatcaaaatcaccatgagtaagcagcaataaatcaagctcacgaatacctttcgactttaaaaatgggagaacaacatcacctcctatgtcaaatgttgactctctttgtcgccacatttcttctttgccaaaatccggttttccgcctgtatcaattaaaataacctgttgttgaaaagggagcataattaaaatactatccccctgcccaacatcaatgaatgtgacctctccattcggattgaggtaaggagctatgtacagtccaccgcaataaaacaaccaaattacgcttgctttcataagtgaccctcgctcccataacagaacgacgataaagcatacccctaaagaaataattagcataccttctgacatcgctccgaaaaccacattcatgtttaactctgaaagaaacaacaacaaacgatgaatggacgcaataagcgtagcgagtagctcagacaaaaccgtaaaaagaaaggatgcggaaagcgtttgtaataggaaaagaagcaacagagctggtaaaacgattattgaaataaatggaacgtaaatgaggttcaatcctaaactaataaaagaaatttgatgaaagtgataaatgacaagaggaaaagaaatcacttgagcgagaatcgataaagcaagaagtttggtgaacggatgttgataacgcttcaagattgtatgagaggatacgattaaagcaaaagcaataagaaaagaaagttgaaatccaatatgataagcatagtaaggatttacaaatagtgttattaaacaagctgccgcaattccatcaagaggattaaactttaactgaaaccgcaaactaaatacaactgtcatagccattaaagacgctctaacgaccgatggtgcaccacctgtaaaaataaggtaaaaaggataaaatatgaaaagcgcactatacgctttctctcttgtcacaccaattcgtatcattagccagaaaaacaaacctcctatgacacctacgtgtaaacccgatacagcaagtacatgactcaaacccaattcttgataagcatcagtgacatcagtgggtaataagctgcgatcgccaacaagtaacgatgccgctagcccttgaagttgaataggaaaaacgactgtaatgtcagatacaactttctgccggtattgttgaatctttacgatcagtgatttggataatggtaaacatgttggtttttcattcagttcataaatccagtgaatttttttatgataaaggtaacgttcgtagttgaaaagagaaggtattcttaggggtgatgggggtttaagcgtccctgaaaaacgacacatgtggcctacttttaaatttctcaaatcattcttttccacttctgatgataaataatactgtacctttaaattctcattaattgtggaagcttcaaaagaaagagaatcaccatcaacttgaggtagcgaagagattttcccatttaaggatacatcaccttcttttaaagaggtgatattggagctgtttgtgagaactgtgtaactaaaagatagtaggaaggtaagggtagctaacaacaatagccttctcttacctttccataaccaaatcaacaaaatactactcacagaaacggcatagtaggaatcaacactgaacacaccaagtagtgaaaagagcgctagcacccacaggtttcctttcattacataccgtatagcttggaagctttctcatataatggtcttacttcatttgcatcaagacctgacgctgaaagtttgtccaataaatccgcagttaaattaagcttttcttgactattcgtatcaaggatcatctcttctagttcaacttgtctaactgttacaccagcatcttcaaatagctcaaccgcgtaaggatgatttttataattttctgcataaatcaccgttttaattcctgcctgtataatcgccttacaacaattaatacaaggaaaatgagtgacgtaaatttcagctccggttgtttgcacaccaaatttagcgcattgaataatggcattcatctcagcatgaatagttcgaacacaatgattgtcgattacataacacccttcgtcaatacaatgaacgcctcctgatacagatccattgtatccaccggcaatcatccttttgtctcttacaattgttgcgccaaccgttaaacgagtacatgtgcttctaagagcaagtaaatggctttgggccataaaatactgatcccacgaaatacgttccatggttttccccccaatgttttatcttctattagtttgatcgaaataatcctgctagtcaatgactcattgaaccgtgattaaatcctttaacttttcaaacgttttttcccctattccactaatattttgtaaatcctcactggcaccgaaaggaccattttcttccctatattgaataattgcttctgcttttgctggtccaatacccggaagttcttgaagctcaataagatccgccgtattgatggaaataagtcctgactcagcagtcacacttccggcagccactgttgtttctccttttaaaggaacgtaaatcatcatctcatcgatcactttgccagcgaggttcagctgagcttgatctgcttcttcaagaaacccaccagccttctgaataacatctttcacacgcccattcgcactaacttcgtacacacctggtgcaaccacggccccctttacatctacgagtacaatcgtaacctcactttcttcatcaggcagaggaacttcttttatgtcttctcccctctcctctacttcttcttcaaacagaaactgctcttcctcggctttaggtaaatcgtaataaaagaatacacccactccaactgctagcaaaataatactgagaagaactttttcccttggattaaacgctttcagatacttcattgggcattcatacctttcgaatgtttcatgttcttaaacatataatgagactttcttacatatgttgtaggagaaatgagtatggaaggagggggagttcattgaaaatcggtgtcataggtaccggcaatatggggacgattcttgtatcttcctttattgattcttgcgccgtaataccttcccatctcacaattgtaaatcgctcaagtgaaaaggcttcgaaacttaaacagcaatatccttcactaaatgttgtcaaaagtgctgatgaagtggttaaaaaatctgatatgatctttatttgcgtcaaacctcatgaatattttccgctatttaaaaagatacggtctaatttaaaacaacagcagttaatcgtgtccatcactagcccaattaaggtgagtgagattgaatcatttgttacttgtgacgtagctcgagccattccaagtattacgaacagagctcttagcggcgcctcacttgttacgttcggaagtcgttgttctgaagcaaacaaagtaaagctactttatctgatgtcacaaatttctaccccaattgaaacagacgaagatatcacaagggtttcttctgatattgtgagttgtggcccagcttttctaagttacttgattcaacaatttattgaaggagcagtgacagaaacaaacatatcaaatgagcaagctacgatacttgccacagaaatgctcattggtatggggaagctacttgaaaaagattatttttctttagaaactttacaacgaaaggtaaccgtcaaaggtggtgttacaggagagggattaaaggttcttgaagcagaaactggagagatgtttcatcatttgattcagagcactcatagaaagtttaaggaagatcgtgaaggaattaaagtacaatttaaggaagagtcgaagcaaaaatagcggggtgtatagttgaattcgctacgaaaagaaaaatcccttcaataaaagataaaaagagtgatttcaattgaaatcactctttttactatttaacagctctaaaaaataaacgctcagatgacggtgttggctctaatgttgtaaaatcagacgtcaccgaaatattttcaaagcctacttctcttagccaggctatatattcatcgattgcaaacgttctttggtaatgaacttcatcaaatcgttcataaagtccttcttcattttcaacaaaaaagctgagttcatgctcaacagcgccttcttctgccccagcaaagctattccatatataagatatatcatcttcactacttgcaaaggtgttaccaacaaaaagggtttgtactttataaagagagtgaacatcaaataataacaccccgccctgtttcaggtgctgatatacgtttgataaggttgctttgacaccttctctgtctgtcacatagttcaacgaatcacaaaaaattgtaacaacatcatacaattctccagtttcaagctctcgcatatcctgctgtagaaacttgattggaagcttttcacgaatagctttatcctgagctacagagagcatatgctcagaaagatccacagctgtaacctcaaaaccaacttgagcaagattaatggaacattcgcctgttcctgagcccagatcgagaactttaccagttgctacttcctttttgacaagatccacccattcaccatatggagcctcttccattaaacgatcgtaaacataagaaaagcgttcatatgattgcatattaagctagaatttcctcaagtggtaaatgtggcgcatcgccccaaagcttctcgaggttataataatggcgttcatctttatgaaaaatatgaacaataacgctgcctaagtcaacaagaacccagcgtgcctgatcataaccttccagtctctttatatccatcccttgttctaatgcctgatctttaatttctttggcgattgcttgaacttgtttttctgaattaccgtgacatattaaaaagtagtccgcaattaatgaaactccattcatattaagtgcaacgatatcttctgctcttttatcatcagctgctctggcagcaaggctaatcatttgtttctcattcatttagtttcctccatttcttctcaggtgttcaatgactttacgatgctgttatatgttaagaatgtcgccgggtaaacaggctgattcttcttcattaaaaactgcacagtattcctgagagacaacgcaatagcttgatcaagatctttttggacaacttctctaacctcatctacaccaggaaatgatctgcctggttcaatgtaatcagcaataaacacacacttctccattaacgtcatatcaggacgcccaaaggtatggtatttgattgcatttagaatctcttcgtcatcgatgccaatctcatagcgcactaaataagcgccaactggagcgtgccagagttcggatgagtactcgagcaaatcttttttgaacgattgatcaataataatttgacgcatttcttctttaggacgaaacttggcataatcatgaaaaacggctgctatttcggtcctttgtggatctgccccatatttttcagcaagaccaaccgcagtatccgttaccccaatcgtatgaacatagcgatgttctgttaaatgaggcctaacaagctttaacgcttcagttcgattcatataatccctcctctgcaataaaagttcggacggattcgggaagtaaataccttccactctttttgtcatgtaaatttcttcttaattcacttgatgagacatcaatttgcggaacgtcaatgagcgaaacatggtaccgttctttatctggatgataccccggacgattaactccaatgaacttaatcatacgagacaactcatctattcgatgccagtttggtaaatcctcaatcatgtctccaccaataataaaataaaaatcgatatctggataattttctttcaagatttcaatggtatcaatcgtataagagcgatcattacgttcaaactcaattaaagaaagcttaaaatgaggatttccatcaatcgctaactgagtcatcttcatcctttgatgattatcagtaatggcactaccgtttttatgcgggggacgatggctcggcataaaccagatttcatcaagtttgcatgtctcgagcactccctgtgcaatcgttaaatgtccaagatgaggggggtcaaatgtccctccaagtaagccgactctcaacttttttccctcagtcattatggaagaagaatttctttattctcttctgattctttatacagtacaatcatatttccgataatttgaacaagctccgctccagtttcagtggacaattgctctcctacactattacgatcttcttcacaattttgaagaatgcttactttaataagctccctagcctctaaagcttcctcaatttgcttcgtcatattttcattaacgccaccttttcctacttgaaaaataggattgagacgatttgcttttgcgcgtaaaaaacgtttttgtttacctgttaacatgaaaatcctcctaactcttttaaaaccgcatttctcattctttctcgatcgggcgtttcccctgtccatctttcaaaagcaagagccccctgttcaacaaacatggaaattccattatctgtgacagcacctttttgttttgaaagtcgcatccattttgtttcaagtggattataaataaggtcacttaccactgtacccttattcaaaccctctactgataaaggcatccgattaagatgtgggctcattccaatagatgttgtattgataataatgtcaaagtgataaagcatcgcttctgcttcttgcagtgttgtggcatttgcatttgtataggcgtgacatacacttgttagattctccgctttctcaagggtgcggtttgcgatcgttaaggaaagcacaccagccctagaaatactaacagctactgctcgagcagccccgcctgctccaatcacaaggacttttttgttcttcagatcctttactttcattagggtaagtaaagagagtaagtaaccttttccatctgtgtttgtgccaatatatttaccgtcacgcttgtaaacggtatttacagcaccgatatcaagggcttcttgctctacctcatctagtaatgggataatggcgactttatgaggaatggtcacgttgaatccctgaatatcaagcatcttcatagcctctacgccatcctctaactgttctggtgaaagatcaaatgcctggtagtgatgtgataaaccaagcgctttaaattcaccattatgcataattggtgacatcgagtgtcctacaggatgaccaataagtccatatagtttccccattacctgcctcctaaattaatgattttctgattgagacgccaacgccttcaggtgcataggctttaacagttgtaccctttccagatacggttacccatccaagtccagaaaagacaatatccattttttcttcttttattcgaagctcatgtccaattaaagcaggaagctcttttttcgtttgatcaccaggaggatacagaagttctccaaggtggtctcgatagagctcatcagctttctcaatcttcgtacggtgaatatagagatcgttcgacacatgacaaataaaggactgccttccaccttccacaaaatcaagacgtgaaagtcctccaaagaaaagggtctgaccttcatttaattggaatacttttggcttgatctcttttttagggctaattaactttaattcttcggcatttacgaaatgagccatctgatgatgattaataattcctggagtgtcatataaggtattgccatcatcaagtggaatatcaatcaaatcaagcgtagtccctgggaactgacttgttgtgatcatttgttcttcatcgccaccaaactcgtgtataagtcggtttacaaatgttgatttccctacattcgtacagccaataatataaacgtctcttccatcccttaagcgatcaatttcagcagcaacgtccattacaccatcgcctttatctgcactcattaacatcacttctgctggctttagtccattttcttttgaacttgtttgcatccattttactaactttgctctgttcacagatttaggcagaaggtccaccttgtttccaactaataatacgggatttccacccgcaaatctttgaatacctggtaaccagctcccgttaaaatcaaaaatatcaacaattttgacaataagagcatccgtccgactaatttcatttagaatctttaaaaaatcatcatctgtcaacgaaacgtcttgaatttcattataatgcttcaaacgaaaacagcgctgacagataattacatcacgtttaagcgcagaaggcggcgcataacctaatgcatttttatcttctgtttgaatgtgtacgccacatccagcacaaatgatttgttcattttccaaacctattcctcccaatttatcttccctttacgcttcatataagcaaggaaaacactttccattcttctattaaatttcgtaaagaacccatcagttttagctacaggaacaactagaatggtatgaagtcccattcgatttcctccaactacatctgtaaagatctgatctccgatgacaactgtatcttcggctttcagcttcatgtcctttaaagctttacggaatgcctttgtcatcggcttcctagcttcatatataaagggtacctccgcaggggaagcgaacttctccactcttgtcttattattatttgaaacgatggtaacgagaataccttcgtcactcatttgtcgaaaccattttaataattcaggcgtagcatctgctcgatcccactcaacaagagtgttatcaagatcagtgataatacctttcacaccacgttcttttagtagctccgggcttatttgaaagatgttttgcacatgttcatttggcaaaaatttatttagcaaattgcaacactcctagtattagtgacatccctattgtatcaatattttcatcacgcacaactattaacttacaaacgaatctaacgaaaaaaaagaaatgatatcaaaatttttcgacaaatagtgtcattttcaaaaaatgtggataacattattaacatatacaaaccatttagccattgaaaatttgtaagatataaacactatacccacaaattatccactttcaactgtggataacggaacggttgttctatgaatctttccatggtaagctaactgcaaataaaagatccacatacaaactatgcggaataatcggaggatagaaccttattttggaggtgcgtaatcatggaaaagttatcagatgacttgttgattgaatccttttataaggcaaaggaacttaaacttagtagtgaatttattcaccttattcaacgtgaaatacaaagacgcagactcgataaacaagtttctatgcttggggtttaacattcgccaaccttgatctcataccagggttggccttttgtttattttccttcaaaataacttccccatgtggcctcccactcttcattgctaacttcgttttcttctttcatcttcttagcgcttctataatgattaggttctgttaaaaagacagctgctaccccttctgcctttagtaagtcctgatacttagataataaagaatcaacatctcttcgcttatatgcaaaaggttttaatgctacaaccgtttgattatcacgagacagaataataacatcatttatagctgactcgtttttcaacattttttgaatcgtttctatcgaactgttcggactatgttctttcattaacgctgctccaagtggttcaacttcaatcgctctaaaatactctcgtggtgcgtacggtgattgatcctcacttttatatacactttgacaggcagttaataaaatcatgataggaaaaagaatagaaatggattttatcatgtgtatcctcctttcgcaaatagaatcggcgttgtttggaaaacttatacgggaaagttgcattttcaaacatgaaaagttgataaatgtgtcggtttttgattacaattgagttattgcaatatgagttcatttgaacttttatcatattgagcattagtggggaggtttttgtagaatgcttcatgcagctgtcttgctaccttttctggcagcgtttttcatcccgttgctttatcggggcgtgaaacaagtccatttgggatggtttgttcttttagttccgattcttctattcgggtattttcttacgtttatacagggagttatgcagggtgtacatacactaaaaacgtttgagtggattccatcacttggagtgaacattacattctatatcgatggtcttggcctgtttttcgcgcttttgatcactggaattggatcgctagtcgttctatattccatctattatttaagtaaagcggaaaaacttggccatttttatgtttatctcctattgtttatgggagctatgctcggagttgtgttatcagataatttatttgtgctttacacattctgggaactaacaagcatctcgtcatttctacttatcggctactggtatcaaagagaaaaatcgacttctggtgcccttaagtccatgatgattactgtattcggtggtcttgcgatgcttggtggttttatattaatggccgacattacaggaacttcaagcattcgaggaattattgagaatggggaaatgattgttaactcagctctttttccatttatccttattcttgtacttcttggagcctttacaaaatcggctcaattcccatttcatacgtggttgcctgatgcaatggaagcaccaactccagttagtgcctttcttcattcagctacgatggttaaagcaggtatctatctagtcgctagattaagtcttatcttcgctgggacagaccttttctttttaattgttagtggttttggtttactgacattatgctggggatcctatatggctgttacacaaaccgacttgaaagcgattcttgcctattctacgataagtcaacttggaatgatcatggcgatgttaggctttggtacagaactagctattcttgctgctgtattccacattttaaaccatgcgacatttaaagggagtctctttatggttgcgggtattattgatcatgaaacaggaacgcgggatattagaaagctcggcggactatttacattcatgccgattacggccacattagccttctttggcacgttctctatggccggatttccgcttccatttttaaacggcttcctaagtaaagaaatgttttttgattcatcacttcattttgaaaatgcttctacaattgttgaggctgtatcacctttcttcccatattttgctgttggtggaagtatctttacattcgtctattccatcatgctattcttccgtacgtttaccgggaaacagagggaaacactaccgaaacagccgcacgaagcaccaattggcatgcttatttcgcctatagtacttgttctgcttgtcattattattgcgtttatcccagatgcatttggccatgcactgctatcgccaatggtcgatgcaattaatggctccgttggggagacccatattaaattctggcatggcttcggaccggccctttatatgagcctcgccgttctcattctaggtactgcattgtacctgacgcgagaaaaatggcagcacgtttacaaggcgttaccaggtaaattatctgctgcaaaagcttacgatggtctcataaacggactgatcaatggctcgagaaaactaacaaatatttatatgacaggttctcttcgccattacatgatttatattttcgtctttttcattgctctagttggtattacaatgagcgtatctggcggttttcaaattaactttgatgacctagcaccaatcgctgtacctgaagtgatgattgcgatcgtaatggcgggtgctgctgtggctacgatcttcatgaaaaatcgcattgcagccattttagtccttggaattgttggatatggtctatctcttctcttcgtctttttccgagcgccggatctagccctaacgcagcttattgttgaaacggtgactgttgctttatttttactttgtttttatcacttacctaactttgataaaaagaaagaatccaaaggaacaaatgctattaactgggttatttcgatatcagtgggtgttcttgtcacaatggtcggtatcgcttctcatagcacaaagctttttgaaccgatttccgattatttcctaaagaactcttataaattaggcggaggagacaacgttgttaacgtcattcttgttgacttccgtggactggatacgatgcttgaaatccttgtgcttggactagccgctcttggtatttatacaatgatcaaacttcgtccgggtaagaaggagggaaatgattaatggaaatcatcatgtctgtgcttgcaggaatacttttcactgcaggggtctatatgattttgcagaaacaaattcttaaaatcattatcggtacggcacttttgtctcatggggctcacttatttattattacgatgggaaagttgaatcgtggaaaaccaccgattctatcagagggagtaacgaattacgctgatccgctgccacaggcccttattttaacttccattgttattagctttggtgtgacttcatttcttcttgtgctagcgtatcgaacgtaccaaacgaatggtaccgataatatggagaaattgaggggtaacgacaatgagtaacctagctatacttccaattttattaccgctcttaacaggaattattcttgtattcttgaataagcggttgccgcttgtaagattgatcacccgcatcatggttctagtaaaccttgcagttgtttcaattattgcctttaacgtgattcaaaaaggcacgatcgtattaaaagccggcgattggacagtgccttatggcattgttctcgttgctgatcctcttgccatgctactcgttgtgacggcaaacattatttcagttgcatgtgctttctatgcgtttaattcactagatgaacagcgtgagcgttattacttttatccgctcttccaacttttaatcgcaggcgttagcggagcctttttaacaggagacttgtttaacttattcgtattttttgaagttctcttaattgcttcatacgggttgattgttcttggaggcacgaaagaacaattcagagagtcttttaaatacattattatcaacttgttctcttcaatgctctttgttacaaccgtgtcctttctctatgcagtagttggaacggtaaacatggcacaattagcagaacgtgtaggagaagtccaacaagatggcgtgttaacaaccattgctatactgctcctcattgtatttgcaacaaagggagcactatttccgctatatttctggctacctaagtcttacactgttccaccgaccgttatttcagcactatttggtgcgctccttacgaaagttggagtctactcgattcttagggttttctcattgatttttgtctataacctttctgtaacgcaccaagttttacttatcatggctgggtttactcttgtatttggcgtgataggagctttgtcaacgaataatgtacagcttattatcgcctacaatattatcccggcagttggctatatgattctgggcataggcgtcttctcagctactgcacttgcaggaactgtttattatctcctacatgatatgattattaaagcggcgctcttcttccttgtaggtgctatggttgcttatgctggcacttcagatttaaggaagatgggtggcattattaaaaaccaaccactacttggatggctctttttcattgctgcactcgcacttgcaggattaccgccgttcagtggatttgtaggtaaacttctgattttaagaggggcatttgaggaaggtcattatgttctggctgtggttggtttagtgacaagccttttaattcttctttctgttattcgcatcttcatcaacgggttctggggcgaggcaaaatcggattatccttcaaatggtacacctgttaaaggtaaaatcctgccagctgcttttctattgatattcaccgtatttctcggtttaggtgcagagtttatttaccctaccgtccaaaccattgcagatcaaatgattgatccagcaaactatattgattccgtcatgaaggagtagatggcatgccaattcaaattatcattaatctcataattgccgttctctggatgtttctttttgaaagctactcttttagtacattttttatcggttatttatttgggattgggctgctcctcttaatggagcgttttattccagatcgattttatttctatcggctctgggcaattattaaattgttgttcttgtttattaaagaattgttaatggccaatgtacaagtcgttaaactcgtctacagtcctaagcttaaaatggaacctggtattattgaagttccaattgacgttcgaacaaactgggaaattacaatgctcgcgaatctaatcacgttaactcccggtacgctaacggtttcagttgcacctgacaatatgcacatctacattcatgcgatggatgctcctgatgctgaagaagttattaaagaaattaaaggaacatttgagaaagcgattatggaggtgacaagatgacttcccttttatctaccgtatcaacaatctgtatcgtcatcattgcgatctccactttgtttttactttatcgagccataaaaggaccttcgaatcctgaccgggcagttgcactagatacaatcggcattaatttaatggcaatagctggtattctagcaattaaactagaaactgaatatttcaatgatattattcttctcattggaatccttgcttttatagggacagtagctatcgctaaatttttggaaaagggtgttatcattgaaagaagtcgtgattagcatttttatgcttatcggtacgtttttccttttttctggggcgctagggatttttcgacttcctgacgtatacactcgtctacacgccgcttcaaaaagtgctacgctaggagtagctggaattcttatcgccgctttcctttatttcatcttcgaagaacaaatggtgagcggtaagctcattctcgggattatcttcattctcatgacagcaccagtttctgggcatatgatttctagagcagcctatcaaaaaggagtcccattatgggataaaacgacgagagatgatcttcataaagcgcaacaaaaaaaagcaagcacgaacaagggttaatccctaacgtgcttgctttttcacattcacgaaaacgatcattaacgataatttgcgtaataatagtacccgccgccgatcacaagcaataaaacaagcagtacaacaattaaagcaaagtaccctcctccatagcctggatatggatatgggtatggcggatagggatatccacagccaggatagccgtaactcatacgccccctccttttctcccttagacattcttctggtagatagtatagtctatgaaaggttcgaataggatgtatggacattggcggagttttctaaattcatcactaccgctgttcatccgtttcttaatgcactacaattagtaggggtatgaagccttgcaattactaaaaggggtcgatatcaatgacaacatcaatgaaaacaataacacccacctatgacccatgggaagcttatatggatgttgaagaatacggaagtatgatactttctaatattgaactaacgacaacgacactatgcaatatgcggtgtgagcactgtgcggttggttatactcttcaaccaaaagatcctgatccgcttccattggaccttttgactggtagactagacgaagtagaaaaacttcgtgcactaagcattactggtggcgagcctatgctatcaatgaaatcagtgaaacaatatgtagcgccactacttaaatatgcgcatgaccgaggagcacgcacacaaataaactccaacctaacgctagatcgaaagcgatacgatcttattctaccttatttggacgttttacatatttctcataactatggaagtattgaagattttactgacattggttttgcagtaatggatcgtaaaccttcgatagtccaacgagaggcctattttcatcgcatggttgaaaacgcaaaagatttaacttctaaaggagtaatcgtttcagccgagactatgatcaatcgcagaacaattccgaatatcgttagcattcataagcaaattgcagagatgggttgtcagagacatgagattcatccaatgtacccttcagattttgcttctgatttagacattgcttcattggatgaaattcgagaagggatacaccgtttattagataaccgagatcccgacgtctggctgctatttggaacactgccattctacccgtgtagttcaaatccagaagatctcaaacttttagaaagattatatgcagagccaaacgtaacggttagaaatgatccagatggtcgctcaaggttaaacttaaacatatttgacggagacatcatcgtaactgattttggtgacactcctccacttgggaatattaaagacacaaatttaaatgacgcctatcaaaaatggcaagatagtaaagtcgctaaaaacataagctgccactgtccagctgttaaatgtctaggccctaaccttctcgttaaagatgcttattacaaaaatatcgactttttacaaaaagagacaaatctctctctttaaacctccgatttcgggggtttttttactcatttttgtatctaatcacaatttcagctttcacttctttaaagatagggtataatacctatcgtaatctataggagtgtgatacttgtgaggaaaaaaatatggattctggtgttagttgccggttctctagctataatactagcgcttgctgaaaatcaaacggattttcttagaaccaatgcaaacgaaatgcccgagaacgattcagagtccaagaagaaaaacattacgtactatactaaatattatcaaacgaaaaagagtatatacgactcttacactcacaaagacagtgagacaattttccttggtgatagcttgactgattattatgaatggggagaagctctcagtgatcacgaggtattaaatcgaggcattgccggtgatacaacgactggagtacttaaccgaatcgatgaggtggtaaaagcgaaacctgatcgggtgtatttattaattgggattaacgatatgattgcaggtcaacctattaataaaattgagacaaactataagcagattcttgatattctgaagacgcgatctcctaacacaaaggtgtatattcaaagtttgttccccgtcaacacggcattaactggtcaccctcttaataacgcaacaattcgcgatttaaacaagcgtttagaagacctctcaaatctgtatgattatcaatatatcgatatttatccagagctagtcgaatttggtcagttaaataaagattttactttcgatggtcttcatctaaatggagaaggttatcgcatttggactagaaaaattctttcaacgtacaatacaaatgaagaggctcaaaagtaaatcacaagaatttcgcgatacgttattgctttttcgcttttgtgtgttaaactacaatagaccaaccttaaaatgcttcggagggaaaccttcggagttctttttttaactcgtcactgtttttttacttcggaagtctttaaaagggtataccgctagaattcgctcaaccttaaatgttcgaacattcctccttaagtaacaatacccaatgatttcttgttcgtttacattaagtatcctaacaattctcttagtaatgttgttttccccagatacatagatcatttctacatttgtctgattttttaggtggttttttatattcttatacatgagaaacttcctttccatgcgatcatttgttcttattatatgacgaacgaacgttcttcaccactactttgcatcgatagacattgctcttttttccatttggaggttaggcttagtaattaaaaaaaccccgctttttagcagggctacgcaccactttcttttcgatttcgataaaactcatgaaacaatttcattaacgctcgcttttcaattctagaaacataacttcgagaaataccaagctgcctcgcaatttcccgctgtgtcaattctttttcaaggtttaaaccaaatcgtccgacaattacttccttttctcgatcatctagaatatgaatgtattcatagatcttctttttctccatattgagttgaattaactctacaatatcttccgtttctgcttttaaaacgtcaataagtgaaatctcattcccttccttatcctgaccgattggatcatgtagagacacatctttttttgtctttttcaaagcccgtaagtgcataagaatttcgttttcaatacatcttgctgcataggttgctagctttgtgcctttatctgttgaataactttcaattgctttgattaaaccaattgtaccaatcgagataagatcttcaggatcttcgccagtattttcaaactttttcacgatatgggccacgagacggaggttgtgttcgatgagccgatttcttgcatcttcatctccttcagccattaattctaaatactttctttcatcttttctagaaagaggctggggaaaggcattgtttttcacaaatgagacaaagaaaagaacttccttacaaacgtaagcaagtgctgccagtaaggacacatactcacctcccaatgatgggctgttactatatcttaagtttatgttaatgcctacccccacgtgtctgtccttctggaattttaaatcaaaaaaataagacgcccctccgaaaggaaacgtctcatcattcatcatgatttctcttctgttcttttatccatttctcagatataaactcttcccgtaaatagcgatgatgggctgaataccgaccatatttcatacgtattactgctagaatcgcaacaattcctccaacacccgttagttcaaaccattccatatactgccacactcctcatatgacagtgtattcatctaaacaatgattgctaccttatcgattcgtctcaaataattgtctaagcgtctcatcatttacgataagatcagccaattgatattgatctaaaacttcaaaatatgccgttagagccgaatgaagaacgtgctttagtcgacatgcaggactgattacacatgaattgttttctttatcaaagcactctactaaattaaaatcttcctcggtacttctgacaacttctccaacgttgatttcctgagggagttgggccaatcttaaccctccattccttcctcttattgtctcaatataccctttttttccaagctcatgcgcgactttcattagatgattttttgaaatttggtaagcatctgcaatttcttgtatgcttgctaagttattttttttcatactcccaagataaattagcattcttaaagagtaatcggtataatttgttaatcgcatggtgattcaacctcttttcactcctatgttcataggtctattttatcatatcatggaaaacttcacgttatgtaatgctctagataagatgtgaacattcttttaaagatgcattttggatattgctttcagaaggaataagcagtaacataaagatatatttaaaatacatctttaacccaactggaggttctttttatgttatcacctaaaacaattgcaacgattaaatcgaccgtacccgttctagaaattcacggaactgacattacgaaacgcttttataacatgctcttcaccaaccatcctgaactgttaaatatttttaatcatgctaatcaaaaacaaggcaagcagcagcaagctctcgcgaacgcagtttatgctgcagcaaaaaacattgatcaattagaagccattctgcccgttgtaaaacaggttgctcataaacatagaagcctaggggttcaaccagagcattatccaatcgtaggagaatatttattaaaagccattaaagatgttttaaaagatgatgctacagaagaaattcttcaagcatgggaagaagcatacgggattattgccaatgtttttattgaagtggaagaagaaatgtaccaagatgctgcaaaacagcctggtggttgggaacaggagcgtatttttgttgtcgatcgtaaggaacaggaaagtgacgttatcacatctttttacttaaaaccacttgacggaaaaccaattgcatcgtttaaatctgggcaatacattagtgtaaaagtatcgattccaggtgatcaatatactcatattcgtcaatacagtctctcggacgtacctggaaaaccttattatagaatttctgtaaaaaaagaagccaacaccgcaaaacctgatggcattgtttccaattatttgcatgatcatgtcggagtaaacgatcagcttaccgtaactgctccagcaggagacttttatttagaaaagtcaacagctccaattgtcctcttgagtggtggtgtagggattacccctttgctcagcatgctaaagagcagtgcgcttcaacatagaaaaacaacatttattcatgcagctcttaacggaaatgttcatgcttttcaccatgaagttgtctctcttgaacacccttctctagattatttcgtctgttacgaagcgccgacaaaaaacgatgctgataaaaagaactatgataaagaaggctttatcacaagcgactggttaaaagaaatattgtctcttgacgcagaaactcagtattatttctgcggacctcttccgtttatgaaagctatcaaagttgcgttaacaaacctcggtgtagatgaaaagaacatgcattttgaattttttggccctgctgtagcgcttgaacccgctatgtcataagtaaacctattaaaagagtaaagaagcgccttgatggcgcttctttacatagaaataataactttttgattccgctctttaataaatgaactaatctcttcccaatctttttcgaatggaagataaggcacaaagattggtttttccatgttcccgttaataatggcaacgacgggggagccatttactttgccaaacattacttttttcatagaagaaaaagcaacacttcgacgacttaatccaagtagtttatgttcaatacgatactcggttaattcaattcgctgtgttcggatacaaaagctaagaaagatacaaaacaacacataaattaagccaatcatcatgaaggttcgccagcgttcgaatgataaatcacctttaatccacaataataaggtaccaaaggaaacgacaatgccggagacgagaaacatgaatagttcaatcgctctcactttcggataatacgttttgattaccttcacgatcgtcacacctttacatgaaatggctaaaatcatggttttttaactatattaacaaggtggaacgattttgtatatcctttctaaaaagtcttttctactgaatgatttctctctccccgtaaagatccattgatttattcctcacagtaacaagaatatgagttaactctggaatcagtttcattgcaaatttccatgcattgtcttctatgatgatcgacaactgcctcttcttgattaaacatcgtgtacttgacctctgtttcgctaacatggcaaggcttttgtcagcggcgtgaccaagttcgtgagccactaccacggtaaaatagtctttcaaatggtcatcagaaccgaataaaagaatacattggttccttacctcttccatataaatcgtgatcatatttgtttctaacgaatactttcctcctattaatcgttcacctggaaaatagtctttcagttgaattggaacattgatactagcctgttcctgtagcctgcgtacgattgaatgaagtacaccggaatagtcgttcatatgcgaaactcctttatgatgtaaatagaacgtttcatctattcatacgcaaaaaaaagagaccttattcaggtccctttctaatcttatttccaccaattatcgaaaatggtagctgccatatttcgcttatgctttgttttgctaaaatgattttcaattgtttttgctgcttcttcaggtacttctctcccttcaagataatcatcaatatgattgtagcttactccaagtgcttcttcatctggaagagaaggtcgatcatcttcaagatcagctgttggcactttttctacaagatgatctggcatcccgatgtcttccagaatagctctaccctgacgcttatttaaaccgaaaagtggagtaatgtcgcatgccccatccccatgttttgtataaaaacctgtcacagcttctgcagcgtggtccgttccaatgacaagctttttctcgtctcctgcaatattgtattgcgcaatcatacgttctcttgctttattgttaccttttgtaaagtctgttaaattattacccgttgcctcaagataacttgaaacggatgcgtcaacagctggctttacgttgatggtaaccgtttgatccggcttaataaattttaaagcagcctgtgcgtcatcttcatctttctgctcgccgtatggtaacctcacggcaataaaggaagcctcggttccttcctcccttagctcttctacggccatctgagcaaatttccctgcaagtgatgaatcctgtcctcctgaaatccccaggacgaatcctgttgttccgctcttctttaaatattcctttaaaaaccctactcgcttcgtcacttcttcttgtacatcaattgttggctgcacaccaagttcttgaatgatttctttttgcatttctctcattctcaatcactccttttaaagaccacatcttatatttttatacattaagcgctagtaatcaataccccttcctattcttttaaaaacagtttcccgatatgtacttttctattgtcattccaaagaatgcttttgatgcagtcctaaaaaagataattaaattaaaaaggcaggagcggtaatactcgcctgcctttgtttaattaatgatggatatagaagctttgcttgtattgattggcatcaattaattcccgtcttcttttatggtctaattcgtgatcaagcgtttgccgataacgattgatcgtgacagtaattgtgacaaataccaagtttaaagtcattccactccactcccttcttctttatttgtttcaggttaaccctttctctacagtgatccatttttgaatagcgcatttttttaaggcgatcctcattttactcttcctttcattacgtaatgttagaacatcctgaactgtttttcgtggacctgattcatttcgttttttattcgcaaataatttttttcttcctccaacgttcgctcatgaacgcgaataccaattgtgacaaatactaagtttatcgttaacatgatcatttctccttattttgtattgagttaggaaaaccacatcgaagctcgatctcgtttcgattcagcttctgacatgcgttggtgaatggagcgctgatgaagctcagatgagagacttcgatcaaaaacgcttttcatttttgttatgatcattagatggaatggcaacatgttaacgacctcctttcggtttagttatttcaggggacccattttctccttttctcttgcgcattaaacatcacgtttcctttaagcaatttcattcctcctctcaaaatttggacacaaaaagccgcagggcatgagcctgcggctaaaaaagcatagaaataccgcaggcgtcgacctgcggcttttcaatccgttagtaaaaaaggattcctcttaaagaggcgctggtcgaacagatcgttcatattgagttacagcagtttttgctttcatcatcttcatcattctgttcgacctccttttttcataattgtttacaaaggtaagtatatccaccgtttccatttttgtaaaccatttttactaaatcacctaaatattttattaaaaagaatattttcgacaattatcatcagaatttacttaaacctcatcacctcttcagaaagcatgaaagttctgttaaagaggacatacatatgtataaagcggaggtgaacacatgctgaacgtgacaacaatcgtcctttttatcattgggttccttgctgtgtttggagtaacagctacgattcaaattagtattcaaatgaagaaatggctgagagatattgaaaatgcagaagttcaaaatgattcaacggcttatacagcaccatggattcaaaacgtaattaaggagtataaatcttaccatctagcaggcgtttctcaagtgaatacgcaagcgcttattgaaaaacatttttttaaagaatcggttcctctgtttggttttgctcgtgttcctgcggggggcatgatgcgatttatgcaacagctcccaccgacctcgattatcatcggaattttgggaacatttattggattaacgctcgccatttcttccatgcaagaaacgcttatgtttctatcacaaaagccagaagatgccaatttaaatctggcttctgttattgaagcgatttctagtccatttcaaggtatgagcgttgcttttattacgagtatagccggcattggaaatgctctttttttaacgctcatccaaaatggagtattaacgaatggacggacaacggcctattatttagagaagatcatatccgattgcgagtcgcttcttgatcataatttaaatgcaagcttaactcaggaaaaacctcatgatgaaatggagcgaattttggaccgcctagcgggacgaattcaagaaagcttccatgaaacgctcggagatttctcaacgaacatggttaactttacagctgggcttgaacaggcgatgcaagacgttcaagcgacactgtcagcgcaacgtgaatatacggaacaattctcaaatagcacaacgacattagaagcattcggtgtgaagcttcaagagtcctttacacagctagatggcgttcaggaaaaagctacgaacgggattatcgaacttggcaatcgcttaaaaagtcttgagagccagcttcagtctttatcaaagcatcatgaagcaggacagcgtaaattcgagcagctcgttcaacgttctgatcaattaatcaaagatacccagaagaaatcagaggagacagggcagcattatttaagaggactggatgaacaaatgcagcgtttccagggctcacaagaggagcttgagcggcgtgtccatcaaatgcaggacgaatggtattaccgctatcaggataaacagaatcaatatgggagagcatctcaagaatttgctgaatcagtatcccaacttgaaaaagcgtggtatagctctcttgataaaattaaacgggaagcactcgaaccgattatccatcgaatggaacgcgatcagcgcgatcaacctcttcaacatgaaatgagagccctatcaaacagcattgattctctttatcaggggctggctcgagaacttaaagatattcaacatcagctagcagaatcacatcagctacagctacgcctctatgaagagcaaatgcgtcgtcaatcaatggcacagcagcacatacagtcaagaatgattggtgacaatcgatgaagaatcgaaaaagacgttttcaaatccagggcgatgaagaacactactggcccagttttgcagatatgatggcaatgatcgttctcgttatgctttttattgcgattatcgccttcgttcaaatgatttatgacgcttatgatcaaaccgttatgaaacaagaactagcaaaagtagcggatgtaaaaaagcatattagtgatttaattgaagaacagttagaagaaaatgttggaaaagacaagattgtgcgtgggccaaacaatacgatttcagttgagggggatattttatttgacacgggaagtgctgaaattagtgaggaaggaaaacgagtattaaacgatttggcagatgtttttgcaaatttaattgaccaggaagacattagtcaatatctctatatcattttaatcgaagggcacactgacaaagtcccttatgataactggaaactttcagctgatcgttctgtagctgtcgttaaagaactaatgaaggcgaacccaaaacttaattcacctgagtacgcaaaatatttagctgcaacaggttactcagaatacaaaccggttgtcgaagaagacacgaatgaagcctacgagaaaaacagacgtatctcattccaaattattcttgatgatgagaaatggcagggacgtctgaaagaaattatgacttattaagctcaaagaataataaaagccgcttcctattaaaggaagcggcttttcattgatgtatttcatctattagttaagaattcatgttttgctcatttatttttttctgtatggcgatggcacgagaataaaagaaaatcgcaattccaactagtaaaaaacctccacctgtcagtataagggcagcgccatccgtctttccttgaaccgggagaaaagatccaatatataagaaaacactaagactaagcaatacaaacgcaaatcgcttatagtctgtcattttgtcttgaagttgcttcatagtgctcacctctctcggcttttattctatcataaaaaaccaagttactagagatgtaactctttccaatcgtctaaaagcccttacccggtgaaccggataagggctttctacttttatcctaatgcatttgaaagatcttcaatcagatcctctgcatcttcaagtccaacagaaatacgaacaagaccttcggtaatgccgagttcagctcgtcgatctttcggaatagaagcgtgcgtcattcgtgcaggaacggaaattaagctttctactgctcctaagctttcagctaaagtgaaatatttcactttacttaatagctcatctgccttttctgcacttccaatatcaaaagaaatcatcccaccgaatccacgcgattgatttacagcgatatcgttaccaggatgtgtacttaaccctggatagtagattttttccacggaaggatgtttgctaagaaattggacgattttcgctgtgtttttttcgtgttcttccattcgtacaccaagcgttttcaaccctctaataagcaaccatgaatcttgtggtccaagaatagccccggcagaattttgaacaaaatgaacttcttccgcaagctctttagaattaacgacgacaagtcctgcaacaacgtcactatgtccacctaaatatttggtagctgaatgcacaacgatgtcggccccatgatcaattgggttttgccaatatggtgtattaaaggtattatcaacgattgttaaaagactatggtctttagcaagtttcgaaatggcctgaatatctgtaacctttaataacggattcgtgggggtttcaacaaaaatggctttcgtgttatcttgtatcgcctcttttactacgtctaaatcagttgtattaacaaatgtggattcaatgccaagacggtttaatacctttgtcattacacgatatgttcccccgtatacgtcatctgtcatgaccacatgatctccagaattaaacatcatcattactgaggaaatggctgccattccagatccaaatgcaaaacctgcgaaaccattttcaagatctttaattaactcctcaagagcgtgacgagttgggtttcctgtcctggaatattcatagccgttgaacttgccaactgcttcttgtttatacgtactaacctggtagattggtactgagaccgcacccgtttgcggatcaccagtaatcccaccatgaatgagttttgtttttggcttcattgcttaaatgcctccctcataaatcttcttacttaagtatcgttcactactatctggaaagatcgtagcaatattcgttcctggaagggcttgctgtgcttcaataagagcagcttcaagggctgcacctgaagaactacctactaaaaggccttctttttcagcaagctctcttacacgtttgaaggcaacttcatctgtcacagtgtgaatactgtcaaagtaagcgttatccatgtaatctggtaaaaattccataccgattccctctgttttatgaggaccggattgcccaccgtttaaaatggatccctcaggttcaacaatgaccgttttcacattcggattctgctcctttaaatagcgagctgtccccatgaacgttccaccggttcctgcaccagctacgaaaacgttaagctcaccgtcaagctgcttccacagttctgggccgagcgttttataataagtgagagggttagctgggtttccgaactgacgaggcatataggaattaggaatttctttaataagtttctcagctcgagcaattgcacccttcattccttgttcagtaggggtattcacgattttggcacctagtgctcgcattaattcttgcttctccatgctaaacttctcagggaccacaaacaatacagtatacccacgattaacagctgcaagggcgaggccaattcctgtatttcctgcagtaggttcgataaatgttccacccggagctattcgattatgctcaatggcttcctgaagtaattcctgtccaagtcgatctttaatactacctccaggattataaaactcaagcttagcgaaaaggcgaacgccctccggtaaatcaaaatgatgaagctcgatgaccggagtgcggccgacgagctcatgaatgttatgaaagatttccatagtgtgaaaccctttctattcagcaaacacaatatgccattcgtcacggtgtgtcagcatttcgtctgcgatttctttagctccttctaagctgtggttagcagcccatccacactgcacttcattgcatgctggtacttcatcagcattaagcacatcctgtaatgttttctcgagaacttctaagatctcatcataatttgagtgatttagaaccgctagataaaaccctgtctgacaacccattggcccaatatcaacgacattttccatatggttacgaatattttcagccattaaatgttcaatggaatggagacctgccatttccatatgttctttatttggttgcttaaagcggatatcgtatttataaatttcatcaccatttggcccttttgttacacctacaaggcgaacatatggggccgctacttttgtatgatcaagattgaaactttctacattcatttttttagccattcttcttcaactcctccactagatttaaaattaagtttgctgaattaattgaagctgtttctagaaattgatcgaaagaaatatttgattctttcccagcaatatcagaaagcgagcggataatgacaaaaggtgtaccaaactgataacaaacttgcgcaatcgctccagcttccatttctgcggcgtcgagattagctagttttgatctgacatattccactctatctgcgtcattcataaatgaatcgcctgtggcgatcatccctttcactacctggtgctccgttactttctctgcgcttctttcagccgcttcaacaagcatgctgtttggttcataaagagccggcatttgaggaacctggccatattcgtaaccaaaaatggtggcatccacatcatggtagcgaacttctgaagaaattacgatgtcgcctacttttagttcagggttaaatccacctgcagaacctgtatttagaatataatctggtttaaatagttgattcattaatgtcgtaccgatagccgcattcaccttaccaatgcctgattttaagagaacgacctcctggccatcaatgcttcctgtagtgaactcagatcctgcaatcacctgttcttctctgtgatcaaggcggtcacgtaaaattcttacctcttcttccattgctccaataataccgatcttcatgatgtactcctttacttgttcaatttttaacggcttccatcagccaaacaaaatcatttagctgagtaaatacaactcgaaatccatgttgttggaatagttcctctaatactggaatggttgtataatattccgtttgcaagtcctgtagcaaattgtaatatccctttgctttcactttctcatgcatctttattctagcattctcatctttgaatgctgtatccgcaaatacaattttatcattttgccccagtagttggctatatttgtgaatggcgatctctttttcttcatcagtgaggtggtgaaatgcataggtactcacgattgtttgtacaggtttggtcggagttgggaaaaccataaagtcgccatcataaaacgtgacatctggtagccttttacttgccttttctctcatcgcttttgacggttctactccagttacttccagtccctcattaagtaaaaaagaagttaaattccctgttccaacaccaaattctaaaacgtgtcctgaggaagcttgagcgactgaagataagattccatcgtagcctttaaaaacgtcacggtactcttcatcctgtccagacactgttgtatcgtacgagtctgcccaacgctcaaataaatcaataaactctcttcccattactgtcacatcgctttccaaaatttaattcatagtattaaggtatgaataatatgcattatggttctaacttatcatattcttttttgaatatcaatttgtatgatttaacaaaaatgtgtagactaatagatggatcgcattttaaggaggagcaacaaatgagtttttcgctcgaacggatagacgataaagtagaatttttcgaaggattttcactagaagagatcgagaaaaaaatacaagttcagatcgataacaacaggaccctgttgcttcaggttcattctgttcagcatcacgccattacccatgagaaaacaggcagaccctactattctgctgtcgttcattttaaagccaaataaaaaaagcaggagcatccgctcctgctttttgctattctggtttaacactaactggtttccaaccttttccatcaatccactcaagttcgatgtaataaacctgatttccggatccagctttacttacacgtgcatatgactgttgaggtccgccattgccccctattttccagatcgtcatttcatctgcagagattcccataacagattcaacagcttttaacttttcattccaatcagtggaaccaagctcatagctagatttatgtggacctgtttgcgatgttcctacaggctcccacggcccctctaggtttggttcgcccggcttctggtcagcttcttctttttcttgatcttctttatcctggtcttctttttcttggtcttctttttcttgattctcttgatctttctcttcgtcagcactttcttctttcgtactatctttatcagtgtcactatccgactctgaatcattagcctctgaatcttcagcctcatcagaagtaacggcatcgtcactgctactattcgatttttcatcagaatttgtttgtgcggttttctgttcttcacttgcggtttgctgagagtcatcaccagtaaagactatattggcaacaagtacaagtatcactgcgagaacaattccaattaaactgtttaatacgatattttgttttctctttgaatgacggtccccatatcgtgatctcaaacccatccactcctctatttaactgttgttcttattttaccatctctaaatgattcgtagaaggcttgacttttgtatcgtttttatctctcattttggtataaatccttaacgatggtcgcaaatgcttcataagctcgatattgcttttcttttcgttcaaaatctacaaccactaaagcatactgtggagattcatacggaaaataaccagcaaaccattgatgatcataggggacgtcttcgccaagttctgcagtccctgactttcctgctacttgtatcggtagatcgtttaaataagcattccccgtgccgcttaccaccacttctcgcaatgattcttgaagagacttgattacatttttcgaaagggtttcatcatggcttatttctttgaagctaagaaaagtcgttccgtttcgatatagaatatcattaacgactttcacatctttcgcttctcctcccctcccaatcgtcgccatcatgttaccaattgcaaggggacttaatttcacatttaattgaccaatggctgtttggtcgattgctttacgtatcctcttatctttttcatccttaaaaaagagcgggctagactcgtcaggaaactgcttgaaattttcataatgataaagcttatcttcccatccaaccgttgtcgctactccaagtttctctgcggttttctcaattacatctggatcagtcttaataagctcttccgctagttgtgtgaaggtcgcattacagctttcggcaaaactatctttaaggttaagcataccaagcggacgatttccaatgccatcacgatacaaattttgatcacagtcaaagagacgcgtatctttaaccccactttcatatgctgctgcaagaataattgttttaaatacagaccctgggaagtaccctttcaccatttgattcatagcccctttccctaaggggtcttctgaaccaaataatggacgactaaccatgccgattaagttattagagtcgatatcaatgagaaccgcaccaccattcgtaatacctgattcatcgatcgcttcctctaaattcttctgaatctttgtatctaaagtggtcttcacttggagaggataaaatgaatccgtacttgagaaatacttcacatcaagtccaagaagagggttcccctgacgatcagcatgataaagaagcgttgtatcaccttcagataataaaaaagggtcaaacgcaagctgaagccccgatattcctaattttgtttcttcatcaatggatccttcagcccatttctctggatattttgattgaattaattccggattaggtctgacagtcccaataacatgaatcgccaatgggtttttattcacaggcttatggacggcgtagaccccaggaatactttgttcatttatctccttcatttgatcaagcgttaacgttttgtcaaaagtaaatggttgtatctgtccctcaaatgagcgttcaagactctcaggagtgacatttataatttgggctaccttctcaaggggccattccctctctttaagaaatggaaataaaacgagtgctggaattgattcactcatcggaatgccatttcgatctagtatcgttcctctaccttcatctagcacataggactgtgtacgttgattgatgcttgcttcgattaaattgatatgatgttttgagtaagactccgtttcaactaattgaagttggatcaaacgtccgattaacaaaaacatcccacatacaaggaggagaccaatcccaatcatccttctccttatcatctctctcacctctgtaagagtttcgacggatgttctctatttcaaacatcctacggtcatttgacagtgtacaggagcttaatgagaagtatttcatgcataagaaaaagacagcctttatggctgccttttttagtcttttaattagattacttctagaatttctacacggatttctccgcctggagtttgtacgtttactttttctccaatttgacgccctaaaagacttttggccattggggaatcatttgaaatctttccttcaaaaggatcggcttctgcactacctacgataaagtattcttcttcatcaccgtctggaatttcaacgaatttaactcgcttacctattgatacaacattagaggagctattgtcttcttcaataatttcagcgttacgaatcatattttcaactgtttgaatacgtgcttctacaaacgcttgctcatctttggcagcatcatactcagagttctcagaaagatcaccaaagctacgtgctattttaatacgttccacaacttcttttcttttctcagtttttagaaggtcaagctccttctcaagcttttctttaccatcttgcgtcatataatactttttatcctctgccatttcattcactccttcatcaattaagggcatcaatcgtaataaactgtatgaaaaaaagaggtaaatatacctcgtttaatcgttatagcatcgctttttcttcaagtatcgtatggattttcgtaaccataaggtcaatcgcaactcggttttgaccgccttcaggtacgataatatctgcataacgctttgtcggttcaataaattgaagatgcatcggacgaacaactgaggtatactgctcaactactgaatcaagtgttcttcctctgtcacgtatgtcgcgaaccattcttcttaagatgcgaaggtccgcatcagtatcaacaaaaagcttaatatccattagatcacgaagacgttcatcttcaagaattaggataccttccaaaataatgacatctttcggttcgacaggaataattttatcagatcttgtgtgaactgtatagtcatagactggtttttgaatcggtttatataacattaactctttaacatgttcaattaacagatcgttatcaaatgcaagtggatggtcatagtttgtaccaagtcgttcaggcattgacttttcactctgatctttgtagtaagaatcctgttcaataactaagacggactgatcggcaaactgtttaaaaatctctcgtgttacagtggttttaccagagcctgaacctccagcaacaccaattactacgggtctattaaccataattcttccccttctattatagaaaaaccgcccgtacatatgtacgtcggctttccttcttcatgagtttttacgctgactaacagctagaccatctccaataggataaatcgttgtatctaactcgggatgggaaattaaaaattcattataaagacggagctttttcaccattgatttaaagcgcttctcctctatctcatcttctgcaaccagtcctctgaataaaatattatcagaaaaaacgatgccgccttcttctaattcactataaaattcatcaaaaaagcgcttatactgacctttcgccgcatcgatgaataaagcttgataagggccgtgttgtttgagatcgtgagctagatcaaatgcatcgccatataggattgtaattcgatctgaatagccagctttatcaatgtttgcgatcgcttcgttataacgagtttcatcacgttctacagtaagtatggcagtatccggcaaacgctcagccatgcgaatggctgaataaccaatagctgtaccaatttctaatattcgttccggtttcaagaaagaaagaagttgaagcataacatcgagactcgtttgttccataataggaacatgattttctgctgcatattcttcaatttctttgattaagccttctcgattcggccgtaaagattctagatattgttcaacatgatcggatatcatgatcggtcctccttcatgtaacccgaataattttatcataatcgaaaggggaatggtagtcttactctccattccccataaatttcttattcttctttcgcctcttcttctttcttcttataatactcgtcccattcttctttatacttagctacttttttattgtgctctttatttgtctctgagaacaacgtctctccacttgggcgagcatagaaatagagggcatctgtatcagccggttcaatcgcagctactattgacgattcaccagggttcgcgattggtcctacgggcaaacctttttgtttatacgtattgtatggcgattttagatcaagatcatcctgtgtaatttcaccggattgttctcctctggcataaacaacggtaggatccgtttgtaagatcatatccttatccagacggttgtaaaacacttttgaaatctttgttcgatcagcatttgctgaggcttcttcttcaatgatcgatgcgagcgtcattagttcatggattgagtcgtcacgatcttctatctcagagcgatatttatttagtacactgtctgttttatctaacatctcttttacaacagcttccactgacggctcttctacaaaatcataagtagcagggaatagataaccttcgagcggatgacgaatatcatcatttagaatatcatctgttaaaaaccaatattcattaattagagcctccaggtacttatcgtcatctagctgcttcatcacatcttctttctttaaatccaattcttttgcgatacggccggctatgtcttctatccagattccttccggtacaggaatcgtagcaacggcctctttcatcacttttccgcttttcataatcgcaatgatttcatccatcgtcatcgagggtgaaagctcataatctccagcctgaaagccgctctcattcttatattttacataataacgaaaagccgtcccatctttgataataccctcttgttctagagtttcaccgatcgaagaagttgaagatccaattggaatcgtaacagctgtttttgtgctactattcggatccactggctcaagaatattttttatgtagaaataaccacctgttataacggcagccaccgttatggttaaaagcaataaaataataaacacaatttttcttaccgtttgattttcagtttggcgcttcataagcttctctttatacaagtctttaaaatcagacaacgccgtggccccctttcgttcttcacctattatactacaagtcgacatattgtcagcgttattgctaacgttcgccatatttactccaacatgtattatacaagttaacgatagaggtttgtagtcatttccaaaattcagtaacaattcgttgttataatgatcaactaaacataaaaaagctaccgatgaacacatcggtagctttaatcggacgttattcgttctcgtcctcttcctcttctgagaatgtgttgagcatttcttcaaccatttcccattccttatctgattcgatagggaaaagcttatagtctcgttcttcgttatcttcttcttcataacggaaagcgtaaacttctacttcttcttcgctatctgcctgatcagctggaaccacagtcatataagattgtccgttctcagctacgtcgaaagtaaagagaacttcaaataaatgttcgtctccgttttcatctggaatgataatgcgttctttttcctccatgcttttcacctcattaattttgcttgctgtctaagtatccttgcagaatcataacagcagccattttgtcgatcactttcttccttttcttacgactcacatcagcacttatcagcatgcgctcagcagcgacagttgtcagcctttcatcccacatttcaactggcaaattggtacttatccgaatgagctctgcaaatgcctgacaggcctcaccactcggaccaattgaaccattcatgttcttaggaagtccaacaacaatcttgctgacatcattcccattaatgatttccattaaacgatcaggaattacatcctgcatatccgggttacgtttcaccgtttctaatccctgtgccgtccaacccatcgcatcgcttagcgcgacaccgattgttttcgtaccgacatccaaaccaagtgttttcatgctgtctccttatctctgatgatgagtaagatacgattttacaagctcttcgattaattcatctcgttctagcttacgaattaagcttctcgcatcattgtgtctcggaatgtaagccggatctccagaaaggaggtatcccacaatctggttaatcggattgtagcccttttcttgaagagcgctatagacggtgagcaacacttcctggacatcgtgattgtctgcgtcgtctggaaaattaaatttcattgttttgtccatcgaactcattccttacacctctttctccgatccccatctagaatcgtaactagtcaactaattcttattgtacactactaaaaccaaattaggaaatggatttaacccaatctgttgcataagcaagcgcgtcatctaacttctcagggtttttgccgcctgcctgtgccatatccggacgaccaccaccgccaccgccacagcgtgtagcaagctctttaatcaatttcccagcatgataaccttcttttacaaggtcatctgtaataccagctgcaagttgaactttcccatcagcaccacttcccaatacgacaatgacgcttccaatctgtgatttcaaatcatcaacaatactacgaaggttattcatatctgtatcgatgcgtttagcaaccactttcacaccgtctacttcttgaacatctcctgccatttgctttgcttcaacatttgcaagttttgatgtcaatgaatcattttggcgttgtaaatcacggatctgaccaagtagtgcttctgttcttgagggaacgtccttcacatttgattttaacaagtcagccgtgtttttcaaaatcgacacttgttgattcagaacctggtaagctccttcacttgttacagcttcaatacggcgcgttcctgcaccaatacctgattcagaaacaattttaaacaatccaatttctgctgtattttgaacgtgcgtaccgccacataattcaagactataatccccaacacgcacaacccgaacagtatctccatatttttcaccaaacaatgccatagctcccattgctttagcttcgtcaataggctttaccatcgtattcactggaatgttagcccaaatttgatcgttcactcgtttttcaatctcttcaagttcttcagatgtaatctgtccgaaatgagagaagtcaaagcgaaggcgctctgaacctacgagtgaaccagcctggtttacatgctcaccaagaacgtcttttaaagcctgatgaagcaagtgggttgccgtatgattctttacaattgccgaacggttcgaacgattgatttcagctgtaatttttgctcctgtttttattgttccagattctacaactgccgtatggacgtgctggccgtttggcgctttttgtacatccgttacgcgaagctgcacatcttcaccacgaataacaccaggatctgcaacttgcccgccgctttcagcatagaaaggcgtgctttgtataataacttgaatttcgtcgccttctgacgctatttcagtcagctctttgtcttttataatagcgacaacttctgtatcaacagatcgctcttcatatccgacaaaatcgctttcgactgaaatatcaccaagcgcgccaccttgaacctgcatagaacctacatcctgacgagcatctctagcacgtttacgctgcattcccatttcatgctcgaaacctgtacgatcaatttccataccttcttcttccgcatactcctctgttagttcaacagggaaaccgtatgtgtcatatagacggaaaacatcgctacctgaaataacgtgattccccgctgctttttctttcttcataatatccgaaagaatcgaaagtccttcatttaaggtttcgtaaaagcgatcttcttcattcttaatcactttctgaataaattctttctttgcatttacttctgggtagaactcaaccataatgtcccccactacaggaacaagttcatacataaacggtcggttgataccaatttgtttagcaaaacgaacagctcgtctaagcagtcttcttagtacgtacccacgtccctcattggaaggtagggcaccatcaccaattgcaaatgtaacagttcgaatatggtcagcgactactttgaaagcagtatctccttctcgagaagctccatacttcacgtttgccattcgctcagtttcacgaattgtcggcatgaatagatctgtatcatagtttgtttttgcatcctgaataacagataccattcgttcaagtcccattcccgtatcaatattctttttaggtaaaggggtataagtaccatctggattatggttgaactgagaaaatacaaggttccagatttcaagataacgctcgttttcgccaccaggatagagttcttctgtaggatcttcaaaaccgtattcttcgccacggtcatagaaaatttctgtatttggtccactcggtccttcaccgatatcccagaagttgccctctagtcgaatgatacgctcttctggaaggccaattttttcactccaaattgtataagcttcctcatcttccgggtggattgttaccgataatttatcagcttcaaagccaatccaatctttgctcgttaaaaattcccagccccattcaatcgcttcttctttaaaataatctccgattgaaaagtttccaagcatttcaaaaaatgtatggtgacgcgctgtcttccctacattttcaatgtcattcgtacgaattgacttctgtgcattcacaattcgtggattatcaggggtaacgcgcccgtcaaaatatttctttaatgtagcaactccgctattgatccacaacaaagttggatcttcatgaggtactagcgatgcactaggttccaccgagtgacttttttccttaaagaaatcgataaacatctgtcttacgtcagctgacgataagtttttcatatgaaacatcctccttcaattctgattgaaatctttcgctattctaggtggttttttacatacaaaaaaactcccatccctgaataaatcagggacgagagttttgttttcatactcacgcggtaccaccctggttatagacataatcgtctatcacctcaagcgaccgtaacgaggtcgagacggcggggattaatccgcactcaggattagcgttctgctgatcttattcataaagctctttcagccgaggagcttctctctaaggaatacattttgtattcatgaataggggtcaacatactggatccgtcaatgtgtttgtttcttaatctctgaaataattatagtcagagcttgaatcgtttgtcaattgcttcgttcatcttcgtttcgatagagaatgagcgcctttaaaacggccagaacaggaactgccagtatcaatccaatcactccggcaatttctcctcctgctagtaggccgaaaataataacgaccgggtgaatatgcaaacttttccctacaatatatggagaaaggatattgctttcaataaactgaaggacaacaatgactatgattgtaatcatcgtcattttaactgaaacagtcgacgcaattaataatgctggcgccgcacctaaaaaaggtccaaaatatggaatgatatctgttacgccgacaataatgccaagcaagatcgcatatggaagcttgattaaccaaaagcctagtgcagcaagaacacctagaacactaatgacaaaaaattgacctcgaatgtaatttccaagtgattcatcaattcgaatcaataagtttctacccggttttctccactttggaggtgtaactttccaggctattttctttagatcttcgaaatctttaagcaaatagaacacgataaagggaatgatcatgataataaaaaaagaacttaatagcttttttgctaattcaattgcaagggttaatgtacgattaacggcatcttcagcatcttgaaacgattgatccaccttttcttgaagcgcaggaggtaagttagctgtaaagtcataggtatgatgcaccgcatctcgatacatatcaataaacatcggcacgttctccattaattcctgtgactgcttcacaatatgcggaatacctttaacaattgcatacccagtgcctccaaaaaacaggaggtagattaagaggacagcaacacctcttgggaggccttctttatgaatcttctctacaatcggatgaagtaaatacgtgatgagagaagcaattaaaaagggaacgatcaataccgttaacacgtttataatcggctcccaaatcggagctaatttcaataacaaatacacacatagaaatacaagcagaagggttgttaaataaatgagccaattaaggttccattcacgcttcacatttgatccctcctgctatcacgccatctacagttccactcgcatatcataatcttcaaataaatcatcaagggatgtaagtgaaccatcttcttctacttgatgaagggagagtacgcctttgatcacagacatttccacaaaacagttccaacaatagaattgattggcaccgatcttccctatatttttacttttgcaatttggacaattcatctccatacgcctcctaatcgagctatttaagaagatatacattccatcctgtccatccactccacattctatacagcggctctagaagtgcattgcctgtccaaatgtttttccaataaaaaaagccagaaaatcctctgacttttagattgattcttcaattgttgtttgttcgccaatcatttcttgcaatttctctgttaactgcgtatttcgaatctgatcatcttctgtttttatagcaagcttaatcgcatcttcttcgccgcacaagatcaaataatctttgcttcttgtaacggctgtataaagaaggttcttccgcagcatccgataatatcctcttacaataggaagaaccacaattggaaactcactaccctgggatttatggatagagcagcagtaggcatgtgttaattgattaaagtcaggcctgtcataaaccacttcctgtccatcaaaagaaacaacaagttgatcctgcttttcaatattttctttcgcaaagaatacagaaaccacctcgcccatatcgccattgaaaacattgtcttcaggattgtttacaagttgaagaactttatctccgactcgatacacgagatctccatgaaaaagctctcttcgctgatcagttggaggattaaatagcttttgaagctcctgatttagtcgatccactccagctgatcctcgatacatcggagcaagaacttgaatatctcgaggagagtatcccttctttaatgcattgccacaaacttgcgaaacaacctcaataatctgagattgagaacaaggaaagaaccttcgatcaggcgtcggtttatgaaactcttctggaagctctccttctttaatggagtgggcaagatcaataatcgaagagccttcagcctgccggtaaatgtccgtcagtctactaacgggaacagcatgtgaatcaatcatatccttaagcacctgtcctggtcctactgaaggaagttgatcttcatcaccaacaacaatcacttgaatttgagatggtaaggatttaaataattgattggctagccacacgtcaaccatagatacttcgtcaacaattaataatttaccttcaattggattattctcatcatgttcaaatcccgcctcacctttccagccaagtaatctatgtatcgtgaaagccggtaatccggttgcttcactcattcgtttggctgctcttcctgttggtgcgacgagcagaacgggaaagggattttcttttgtgtaatcttttggatctaaagaaaggccatttaattcagcataaagctcaacaatcccttttataacggttgttttgcccgtaccaggtccgccagttaaaatcatgaacggagacgatatcgctttttgtaccgcttcacgctgtgatggcgcatattgaatgccgagtcgttcttcgagatctccaagtgcgcgataaaattcagattcaggaaaagaatcagcatactctgtttgcgacatcacattattcaatccagtgacaagacctttttcagcatagtaaagtgaatgtaaatagattctctctcgatcaagaattaacttatcactctcgtaaagcgagatcagttcccttgaaatatctgcttcatcgagtcgatcacctagcagctcatttacagatcgaatcaaagcattgtactctaaatacacatgcccttcctgtaacgtttgttcatttaacgtatgaagacatgccgccctaatgcgatcgggatgctttccctcaataccaatcgatttccctaaatcgtccgctcgacgaaaaccaatgccttccacgtcttgaataagctgataaggatttttctcaacaatttcgagtgtttcttgcttataggctttaaaaattttcatcgatagtctcggtccaaaccctaattcagttaatcgaatcataatttggtcaagcccctgatgctccatgagagaatcatataatccttttgctttttcttcagatagctttggtaccttacttaatattgaaggatcacgcataatcttagcaattgcgcgctctcctagcgcatcaacaatcgattccgctgtcttttcaccaattccatggaataaatcacttgataagtattgaataagccccggttttgattcaggcatctgtcgctcaaatgattcaacagcatactgttttccgtagcgtggatggtctgtaaaccgtccatagaaaacgtacgtttcatcttccaaaagccttggaatcattccatttacaacgacttctttctcatcgtaggcttcattcgtttctgatattcgtagtcttgccaccccatacaaactatcttcattgaagaaaatcatttgtatcggtcttcctttgatatagcctttttgtggctgatccataagatcttctctccaataacttaaaatttaattgttattgttcatcgcttgttccatttgtttcttcccatttcctgctaagagatgatctggttgaatagcgagtgcacgatcaaaacagctaattgctttctccaaattttcttgataagcatagctcacacccaagttaaaccatgcatctgcatgatcagggtcttcttcaacaactctctcaaactgaggaagagccacatcgactgccccgtcttgcgcaagacaaagtgcatactggaaacgagcttccgaatcttcctcattgagttcaacagctctctggaagaaaggtaacgctaaacgtagcgcatcctgcatcataaagcattggcccatcataaagtgaacatcgctttgatcaagtccttgctgaatcgctttttgatacatatctgcagcgtctttgtactgctctagttcaaagaatgcatttcctgcgccataatacgctgtcccttgggtttcatccagatcaatcgctttttcaaaatatgcgacagcctgcttaatttctcctgcctgtgcaaggaggtttccaatattcgtataagcaaccggatctttaggattctcttcaatcgcttcatatagtagcgttacagctttttctaattctccattattcatcgcttcaatcgcttgttcatttttttggctcatcttaaaaactccttatttctttagcttattctctagtttagcataagttagcagttgattcttcacctcaaaaaacagccccatttctttttgaaatgaggcgtgtcattaaacgtatgtgagttcacttgcattcttaaatacttgatctattgttgcgccgccgagacactcatcaccattgtagaaaacaacagcttgtccaggagtgattgcacgaaccggctcatcgaacgtcacttttaaacgatcaccatcaagtttcttaaccgttacccctgaatctttttgacgatagcggaatttagccgtgcacgttatctcatcatcaattggcaaattcgatacccagcttgaatttacagcaataagggaatcagagtagagtagctcattatggaacccttgatcaacgtaaagaacattgtcttcaagattctttccaacaacaaaccacggctcaccgtcgccgccaattccaaggccatggcgttggccaatcgtataatacatcaatccgtcatgatggcctttttcttctccctcaagcgtcatcatcttgccaggttgagctggtagatattgcccaagaaattctttgaaatttcgttcaccaataaaacaaatgcctgtactatcttttttcttagctgtcgcaagacctgcttcttccgcaatttctctcacttttttcttttcaatgccaccaagcgggaacattactttcgagagctgttcttgtgtaagctgattcaaaaagtacgtttgatccttattgtcgtcgacgccacggagcattttcacttcgccatcacgttcaacgacttgagcatagtgccctgttgcgagataatctgctccaagcgtgagtgcgtgctcaagaaatgctttaaacttgatttctttattgcacatcacgtcaggatttggtgtgcgtccacctttatattcatcaaggaaataagtaaagactttatcccagtattgcttctcgaagttgactgcgtagtacggaatgccgatctggttgcatacacgaatcacatcattgtaatcttctgttgctgtgcataccccgttttcgtcggtgtcgtcccagtttttcatgaaaatgccaattacatcatagccttgttctttcaacattaaagcagctacagatgaatcaacacctccggacattccaaccacgactcgtatatcttcattcttttttgctgtcatggttgcacctcctcttctttaacacaaattgtgtccaggttattttataacttcttcaaccgattgacaatcttaacgacttcaccggctgctttcttcgcctcatcgatcgagtttccatatccaaaactaaagcgtatcgccgtatctgttcgctcactatctccaaacattgctgttaacacgtgggaaggttcatgcgaccctgccgtacaagccgatccgcttgaaaccgcaattcctgcaagatcaagattcattagcataggctcaacctttgcatctaaaaagctaacattcataacatgtggaagcatgttttgactatctccattcaccagatatgaaagagattcttcatcaaatatatctatcatcacttgcttcatattttgataaagctcgactttcgcatctcggtctacatgcattagctcagctgccttctccattccaacgatgccagccacgttttccgtaccagcacgacgcttacgctcttgctctcccccatatgaataaggaactagctttgtgccagcctttgcatacagaaaacctacacctttaggtccgttgatcttatgagctgaaacagataggagatcaatgcccatctccttcacattcagatcaattaaaccataagcctgaacagcatctgtatgaaataagataccagaatcgtttgctattctggcgatctctgaaataggttggatggttcctacttcgttgtttccatacataaccgtaatcaggatcgtttctggacgtatcgcttctttcaggtcaactatcgaaatcctaccattctcatttactggtaagtaggtaacactaaagccttcgttctcaagtcctttacacgcatttaatgcagcatgatgctcaatcgcagttgtaataatatgatttccttttgcatggcttccttttgcggctccgataattgcaaggttatctgcttctgtccctccactagtgaaaatcacttcattcgggttagcatgaatactcctcgcaagattgcttcttgcttcatcaagtgcgtgacgcgatttccgaccaaactgatggatactggaaggattaccaaaatcatcttgaagtgacgtcgtcattgcctttatcacatcaggatggacgggcgaagttgcagcatggtccatataaattgcattcattcctattcacctcttacgaccagccgtgagctggctactaaatatagaacatatagctatcttgttcgccttccccttcataagttgcaaggtcttcaagcgttgttgaatctagaacatcttttacagcatctcgtatttttaaccaaagatctcgtttagcaggttcttcatcatccattacttcaactggactaatcggtccttctagcacgcgaatgatgtcccctgctgtaattgagtttgcttcttgcgcaagaatatagccaccatatgctccgcgaacacttttaacgagaccggcattacgtaatggggcaacaagctgttcgagataatgctctgataagtctttgcttctagcaatggatttcaaagaaataggtccatcaccgtgcttttttgctaactccatcataatcgttaatccgtatcttccttttgtcgatatcttcatttcttccacctctttctatcaatcgagcgacaaacgttttacactgtggcaaagaataaccaacgattggaccaatcgttatacaaaacaaaagcgttccaatattaaccggtccttgtaatagccacccaagaaaaagaaccaccatttccattgaaaggcgaatgcgttgtactttccaacccgtgcgctcggttaagacaagcattaagctatctcttggacctgctcctctatctgccgcaatatagagaccaatcccataacccataataagaataccactaatcagcataaccaattttcccggtaaatgatcaggggttttaagaaaaggaagccataaataaatgtcaataaaaacgccaactagaagcatattaagaaaagcaccaagttttggccatgaccgttctaataaagacgtcgccccaataatcacgaaacctatgataatagaccacgtaccaatcgttaatccgaactgctgataaagtccaatgtggaatacatcccacggcgcacttccagcttctgcacgaatcatgagagcaattccaaaagccataactaaaagacctgaaacaaagattccccagctcatccagaaccaggatatgcctatattcgcttgtttcatttcatccctcttatctcaatctaatctcatctatctagctattgattctgttagtaaaccttcgctattatagcacgaaccgctttttcttgcatttccaaaacccgtatagtatgtttcaaataactatgaaaggacgggttttctatggatctatttgattatccaaaagataatagcaacactacctcaggaccactcgcaagtaggatgagaccaagatcaatcgaggaatttattggacaggatcatattattggagatggaaagttattaagaagagcgattcaagcagatcaactaacaccaatgatcttttttggtcctcctggaacggggaaaacaaccctagctcgcattattgccaatacgacgtctgctcattttgaacagctaaatgccgtaacgtccggagtcgctgacattagaagattgacctccgaagcaaaagatcgcttgaagcttgacggtcaaaaaacagtactctttattgatgaaatccaccgctttaataaatcgcaacaagatgcgcttcttcctttcgttgaagatggaacgatcgttttaataggggctacaacagaaagtccgatgtttgaaattaatgcggcacttctttctcgctcaagattatttcgttttgaacatctcaacgaaacaacgattaagaacattcttttccaggcgatcgaggacaaagatcgcggttttggaaaatataatattgaaattgaaaatgaagcgattgatcatctcattgatgtgtcaaacggagacgccagaacggcgctaaatgcactggaactagccgttcttacgacaacgccaaatcaggatgggcagctcatgattacactcgcaatcgcagaagaatccattcagcaacgtgtacttcagtatgataaagatagcgacaatcactatgataccgtttcagcttttattaaaagtatacgaggatcagatccggatgctacgctatattggttagctaaaatgatttatgcaggcgaagaccctcgcttcattgcaagacgtctttatgttcacgctgctgaagatattggacttgccgatccgaacgcacttcttattgcacacgccgccacttatgcggtcgaattcatcggaatgccggaagctagaattccgctagctgaagcagccttataccttgctaccgctcctaaaagcaatggcgttatttctggtatagatgcggcgcttgccgcagtaaaaaaagaaaaaaacggcactgtccctgtccatttacgtgattcccactacaaaggagcttcagaactcggacacggcgttgactacaaatacccacataattatccaggaggttacgtccctcaacagtacctccctgatcatatgatcagaaaaacgttctataaacctactgagcgtggccacgaaagaaccattcaaaaaagactggattatttcagtgagcgtatcaaatcagatagtaagaaaccgtaacagcagggctcaggctcctgctgtttttttatctattcttgcaatctaccttaaatttacaagacttctgtataaattcttccagactggcaaagctatgattactttcaaaacgcaaagttttttaccacataaaggagctggataaaatgaaagtaagacaagatgcctggtctcatgaagatgatttaatgcttgccgaaacagtgctgcggcatgttagagaaggtagtacacaattaaaagcctttgatgaagtcggcgatcgacttagccgaacatcagcagccgtaggattccgttggaacgccattgtcagagatcgatacgaacaggctttaaagcttgcgaaaaagcagcgtaaagaaatgaagcgtgctgagcgtagacaacccgaatacacgaaaaacgatatgcatacacctttgcagcaagaacaacctatcgccaaacctgtacttaaaacaccaatcaacatgactgaaccaactcaaactaagaaggaactaacgatgagagatgtcatcacattcttatccaatctcgaacaatccgcatcctcaacaaacaaacttagaacaaaccttgagaaactagaatcggagaatcaactcctaagagaagaaaacaccctgctcaaccaaagaatcaaaacgcttgaaaacgaacaacaagtaatgaaagaagattaccaatccctaatccaaatcatggaccgagccagaagaatggtcgtcctaaacgacaacgaagaccaaaacgtcccaaccttcaaaatggataagaatgggaatctagaaaaagtcgcgaggtaaaaacgaaatgcggagacgagcgtttagaaacgaagatattggaactcttgaactagaacacgccctttgtgttctggtgaaagagtgaaatatcgcagtttctgcgagttagctggatcacacgaaaagcggaagtgggcgtttagacacggcaggcactggagccttttcatttgaacacgggctttgtgttcgaatgaaaaggtgaagtgaccgagtgtctgcccactgcagctagacatgaaatgcggagacgagcgtttagaaacggagatattggaactcttaaactagaacacgccctttgtgttctggtgaaagagtgaaatatcgcagtttctgcgagtcgcagctggatctccgaaaagcggaagcgcccgcttagccctcgacaagcgctggagccccacaaaaagaacacgctctttgtgttcattttgtggggggaagcgatcgagaggctgggcgctgcagctagacacgaaaagcggtgacgagcgtttagaaacggagatattggaactcttgaactagaacacgctctttgtgttcattttgtggaggatctgggcgtagcacttgaacctaaaattcacctaaagaaaaagcatccgctcgagacttgagcggatgctttattaattgtcataaaaatagaagagccccaactgtgccgtcctttccataattgttgaacctgcattggcaggtgggtgccctattccactcttcgtaagtcctcagctaccgaggcatgtactttgaacggaaagaatcaggctcccgttgtaaaagtgttggctcaaattattatggaagtaaacgaacacttcaggactcttcgttaacttgtaattgaattatagcagaccttctaatcgatttcaatcttcgaggattaggtcctttttattatttttttattctttctcagcggcaactggcttcttagctagttcaagatgtaattctttcaactgatcttcactaacaggagacggcgcttccgttaacaagcagctcgcgctagctgttttagggaaagcaattgtatcgcgaagattcgttcttccagcaagcaacataacgagacgatcaagcccaaaagcaattccgccatgtggaggcgttccgtattcgaatgcttcaagaaggaaaccaaactctgcttctgcctcttcttttgtaaagcctagtgctttaaacattttttcctgaatatcacgttggaaaatacgctgagaaccacccccaagctcataaccattgagtacaaggtcatatgcatctgcacgtactttgccaggctcttcttcaaggagatgaagatcttctttcaatggcattgtaaatggatgatgctccgcaaaataacgatctgcttcctcatcataactcataagcgggaagtccatgatccaaaggaagttaaacttcgaataatcaataaggcccaggtctttacctagctttgtacgaagagaaccaagactatcagcaacaatagatttactgtcagctacgaagagtagaaggtctcctgcttcagcgtcaaatgcttcttttagttgagtagctagtgattcatcaaagaatttagaaataggtcctttcaaaccatcttcctctactttcaaccatgcaagtccttttgctttatatgttttcacatactccgttaaagcatcaatatctttgcgtgaatattcactagcagcgccttttgcattgatgccttttactgctccgcctgaagcaactgctccagagaacactttaaaatcagaatccttcacgagttcagatacatccacaaattccatttcaaagcgtgtgtctggcttatcagatccatagcgattcattgcttcagcatgagtcatacgctggaaaggtgtcttcatttcgatgcctttcgtttctttcaatacagcgctcatcatttcttccatcattgcaattaaatcctcttttggaaggaatgaagtttcaatatcaacctgtgtaaattccggttgacggtctgctctaaggtcttcatcacggaaacagcgaacgacctggtaataacgttcaaaccctgaaaccatcaacagctgtttaaacagctgaggagattgtggaagtgcataaaattctccatcgtgcactcggctaggcactaagtagtcacgagcaccttcaggcgtactctttgttagcataggggtttcaatctcaagaaattcattctgatctagaaaatcacgtatcactttcgttgtacgatgacgaagtttgaatgtttcttgcataaccggacgtcgtaggtctagatagcgatattttaagcgaatgtcttctccaacctctacatcgtttgctatgctaataggagggtttttagccgcattgagaatttcaagtgattcagcatgtacttcaatcgaaccagtcgataaattaggattaatcgttccttctgcacgtgctactactttccctgtaatgcctagcacatattcatttctaacattctctgcaagttctagcgcttcttttgataaatctggattgaaaacaacctgaacaatcccagaacggtctctaaaatcaatgaaaattaacccaccaagatcacgacgtttttgaacccatccttttaattctactgtttttccgatttcgttttcacgaattttcccacacgagtgacttcttccgatcattctcaaacttcctcctttaatttcttacaaagataggtgtcaacttctgaaaggctaatcgcctcttgttcaccagtgttcatatcttttatgttaatttcattcttttgaatttcttcatcgcctagaatagcgacgtactttgaatgaagtcgattagccgctttaaactgacctttcatcttcttatcaagataatcacgttccgtagaaagtccagcttttctaagcttttgaacaagaccgttcgaaactttttgggcttcctcccccattgtgacaacataacaatcaattgtcttttcaatcggtaattctacgccttctgcttctaacgccattaataagcgctcaatactcatcgcaaagccaattcctggagtcgatggaccacccatctcctcaacaaggccattgtatcgaccgccaccgctaagcgtggtgatggcaccaaatccatccgcatcactcatgatctcaaatgcagtgtggttgtaataatccaacccgcgtacaaggcgatcatcgagaacataatcaattcccatttgatcgagtgcttcttttacatttgcaaaataagttgccgagtcttcgtttaagtaattaatgattgaaggcgcagttgccatcaattcatggtcacggtcctttttacaatcaagaatgcgaaggggatttttttcaagacgactttgacaatcgctacaaaattctccgattctcggttcaaagtgatccactagtgctttacgatgagcttcacgactttctttatcaccaagactatttaagtaaagcttaagcttttttagccctaactcctcatacagtcccatcgcaagtgcaataacttcagcatcaattgaaggatcattactaccaagcgcctcaataccaaactgaacaaattgtctcattctacctgattgtggacgttcataccgaaacatcgggccaatgtaatacagtttaaccggctgctcaggtaaaccgtacattttattattcacataagcacgaacggctgaagcagtgccctcaggacgaagtgttaaactacgatttcctcgatcttcgaatgtgtacatttctttttggacgatatctgttgtatcacctactccgcgttgaaataactcggtatgttcaaagattggcgtgcgaagttcatgataattgtatctacggcaaatatctctcgccttattttcaatgtattgccataactctgatgtaccaggaacaatatcctgagtacctctaggaatttgaaaactcattctttatcctcctttaatcaccagcaagaagctccccactgcaaaactgaacgagtgatacctttttttggatacaaaaaaactcccatccctgaatcgaaattcagggacgagagttacccgcggtgccaccctaatggaaggacgtatccttccgcttaaaacagttaacgcctgtctacgtcgccccctactgagttaactgttcggaggcgatccttggaagtgtctttcaaaaaagcggtatcgagaaatgctctcagcctaacggcatttcctctctgctcaacccggtatttttttacttttcttcctcaacggagcttcgtatcgatttactgaattgttttctatcatacgagtcagtcttttttttgtcaagtgtattcctagagttaccgtttcattttttgtttcatgatctttacactttttagagacagaccaaattcttccgcgagttccatatttgacaaacactgttctttttgtagaaaatcatgaaagtcgacgccaaattccggttgcgacatgttgtagctcatcatctctttattcgtcgatcgcatgaaagctcaccctcttcgtgtagtattttcttagtttcaccaaaaagtaggagttttacaactaaacgaaggaatatattcatccgataaagaaattatctaagctaagatttattgaaaggagatttccattgaaaagattgattttttttctgagcttattttcaacagccctttttattcctcatacatcttcagcggctactagtgctcttttcgaacaaaccgttaatgtgcgctcaaaaccatccatttcgtccactatcattgctcaagtgcatgaaggtgacaaagcaatgattatggagaatcaggataactggctatatgtagagctttctactggagaaaaaggttgggtagccagcaggttcgcaacattaatgacggatacgcaggccaaacaaaccattcaatcaactgtatctgatttacaagtacgagctggtccaggaaaagagtacaaaactcttgggagtatttctcaagaaagcgaatggaacgtgttgaggatcgatggtgattggatttcaatcgattataacggtcaaacaggttgggtggcttcatggttagtgaattcaaaaacacaggagaatgcaaagaattccggtataaaaaaagaagttatcacacgactattaaatgttcgagaaatgcctgggacagaaaaccgcattttatctcagctcccttcaggttctgtcgttgaagaaatcaaaacagaaaacaactggagctttatccgatatcaaaacggacaaataggatgggtggatactacctacttacaaaacacgaataagaaggaagaggcaggctttgtaacgattttataccatgcaacgaaccttagaaccggaccaggcttaagctatgctgtcatcgagcaagcgtcgatccaagagcgctatcaaatagatgaaaaagaaggtgaatggtatcgtattctccttgatgatggacgttcagcttacgtagcagaatgggtcgttactactgcttcaagccttaccacttcccctaagttaaagtcagggaaaacggtcgtacttgatgctggacacggcggttttgatagtggagctttaggaattactacgcttgaaaaaatccttactctcaaaacgactaacacaattgctgagaaattaaaaaatgcaggtgtagaagtgattctaacaagagatgatgatacatttatctcacttgcacaacgaactataacttctgagcaacaccaggcagatgcttttgtcagcattcatttcgacagcactgtcgatccaacggcaaatggtactacgacttattactatgaggaagcggatatgccacttgcttcatccattcatgctgagattggcgatgatacttctctacgagatcgcggcatacgttttggcaattactatgtccttcgaaataatcaacagccttccgttcttcttgaacttggattcctttccaacccgtgggaagagcaattagtgaacaagtcgacttatcaaaataacattacgaatgaaatttctaatggaattcttgcatttttacaataatctttctaaaaacacttaaaaataaaaaagcaacaagataaaaaccgcgttcaaaaggaacgcggcttttatctattctttactttcaatcaccagggttacaggtccatcattcgtaagctgaacatccatcatttcaccgaatattccagtctgtacctcgagatcttcttttctaagtagctcattgaacttctcataaagaatggctgcttcagaaggcttcgctgctttcataaagttcggacgccttcctttacggcaatctccgtacaaagtgaattgtgaaatcgaaagaatagcaccgcctttatctttgacagataaattcatgcgatcactgtcatcttcaaatatgcgtagattggcaatctttgaagcaagataagcggcatcctcctttgtgtcttcgtgagtcacgcctagaaggacgacaagacccgaatcaatcttacctgtcgtctctccgttcacggtgactgacgcatgcttggaacgttgtataacggctttcatgaagaacttcctttctactttactgcataatcctgcgcacagcatagatatctggaattcgcttcacacgctcaacgactttctgaaggtgagcggtattcctgatcgaaacggtcatgctaatcgtagccattttgttgttatccgatcgacccgaaacagatgtcatatccgttttggtttcagcgacggcctgcaggacttcatttaaaagaccacgtcgatcaaaaccactgatttcaatatcaacattatagcttttaggagagtcgctttcccattcaacttcaagaagacgctcttgggcattatcttcattcacattcggacagtctttcctgtgaatggaaacacctcttcctttcgtaatataaccaacaatatcatcaccaggaacaggattacagcatcgcgaaagacgaattaacaggttatcaattccttttacgcgcactcctgactccgctcgttttggcggtttagaaggcgtgtgcgttttcccctcgataatagactttgcaagctcttcctcctgctccttcgttcgttctttacgagccttgtcggttaatctcgttgcaatttgagcagccgtaataccaccatatccgactgcggcatacatatcttcttcacttgtaaaattaaatttcttcgatacattcgcaatattatctgaagtcagtacggcttttaattcaaatccatgatttttaatttctttttcaactagctcccggccttttactacattttcttcacgcttttctttcttaaaccactgcttaattttgttcttagcgtgagaactttgactaattttcagccagtctttactaggaccataagagtgtttcgatgttagaacttccacgatatccccggtttttaatcgatgatcaagcgggaccattttgccattcacttttgcgccaatgcaatgattcccaatttccgtatgaattcggtatgcaaagtctaatggaactgatccggtaggcaattcaaacacatcgcctttgggtgtgaaaacaaaaaccatatcgctaaacaagtcgattttaagagactccataaactcttcagcgtttgaaacgtcattttgccattcaagaatctgtctaaaccaggatagctttttctcaaaagaactattcacttgattttgatcgccttctttataagcccaatgcgcggcaatcccgtattccgcaactttatgcatatcagacgttcgaatctgcacctcaagcggatcacctttggggccaatgaccgtcgtatgcagagactgatacatgttcgcttttggcattgcaatataatctttgaatcgaccaggcattggcttccagcacgtatgaataatgccaagaacggcatagcagtccttaatgctatttacaacaatgcggacggcaagtaaatcataaatttcattgaattgcttatgctgctttgccatctttcgataaatactataaatgtgtttcgggcgcccagaaatttcagcatcgatcgaaacttctttgacacgttcttgaatttcatccacaacttcatgaacaaacccttcacgttcggctcgtttcttctgcattaaattcacaatgcggtaatattgctgtggatttaaataacggagcgctgtatcctcgagctcccacttgattgtggaaataccaagacgatgcgcaagaggcgcaaaaatttctagcgtctcatttgccttttgcatttgtttttcttttggcatgtgcttcaacgtccgcatattatgaagacggtctgccagtttaatgagaatgcacctaatatcctgagccatagcaatcatcattttccgatgattctctgcttgctgctcgcgcttagatttatatttgattttcttcagttttgtcacgccatctacaagcatagcgagttcaggactgaattcatcagatatttgctcaagcgttacgtcggtgtcttcgacgacatcatgaagaaagccccctgcaactgtgacggggtccacttcaagattcacaagaatgccagcaacctcaataggatgaataatatagggttcacccgatttacggtactggccttcatgtgcgtttcgcgcgtattcatatgctctattaagataggagagatcgtcttcagacaaatactgctccgctctttccatcacttcttctatcgtcatcaaatcaccttgattactgttggtatattgcttctattatcgttaaaaaaaggtagcatgtaaagagattaagagaaaaatgtcgtttttcctatttagtaatgaccggattaccttgttaaaggttcataaagagaaagagcgtccggcaattcggacactccattctttagtatgtcattaacgtaaagatatcatgacgatcaagatttttacgaccttcgaggtatgaaagctcaatcatgaaagcaagtcctactacgactcctccaagcatttctacaagttcaattgtcgcgttgatcgtgccgccggtagcaagtaaatcgtccgtaatcaatactctttggcccggtttaatagcgtccttatgaatcgttaggacgtctttaccgtattcgagaccatagtcaacttttgctacttcacgcggaagttttccttcttttcttactggtacgaaaccaatgccgagaatataagctacagggcatcccacgataaaccctcgtgcttctggtccaactataacatcgatatctttatctttagcgaagtccgctatgtcatttacgacagcactgtaagcttctccattttgcataaggggtgtaatatctttaaaacgaatcccctcttttggataatcttcaactactgcaatataatctttgtaattcatttactttatggcctcctcagtgctattgaaacaattaactgattgattgaaccaacttttcaaagcatgataggaggaatagcaaaaatcgttttcgagctttgctttttcaagcttactcctatacgttttagaagaagttaattcagttttgacagattgtggatttagagaaatcagtccattatccattgtaacaaaatctagctcaaaaaacacctctgacataaaaggtaccgtttcttttgaccatcctttatgttttgcgagcttttctgcgtctcgtaaatggaagctccctttcttcattaagaaagcataataccatttgaaatcttcacgtgaaggtaaagttgagaagaaatgatcttcctcatgctcaaataccacataagttcgatctggtgtaccacctgagcgaaaaaggttcacaaggtcttcttctaaatcaggaagatcaagcaacatgacatacttttgatcaaacgaaacgtctttgtctgatggatcagtaatgacgtagtccttccatttttcaagacctagttttgagatcgtattgttctgaaaagctaccatcactaacttatctagcggcagagtttccagacgtttctttaaatctcgtatgcctcggtaatcaaaaagctgccactcattaactgcgatatctttcacgaaaatttgtggctttcgaagcccattccattcgttcacagagagctgaccgatgacacttactgctgcccttgatgcaatttcttcaaaagcatagccaaaatggaatcctacgccgtcaagcgttgtgccattttcctcaagacctaccttaagatgattgtcctgactacctatccttctgatttgagataaatgaacatccttgagcataacaactggctttggattactcaccccaaagggagcaagaagattcatctcttcaatcgtttcgagcgttacatcttctacgtgacagtgaagatccacttttgtaagtggagttagatcttcttccgttaacttctctaaagccaggttattcagtctagtgcgcagttgctccaagtagtccaaatcaatcgtcatcccagctgccattgggtggcccccgaaatgcggaagaatgtctctacattcagatagatttgcaaacatatcgaatgcctcaatactacgagcggatccttttgccacacctttttctcggtcaatactcatcacaatcgttggacgataatatttctcaacaagtcgagaagcgacaattccaattacccctgcattccatccttctttcgcaattatcaagacgcgattgctttcatcacttaaataatttgtttcaacttcttcgatcgcttctttcgtcattatgtttacaagctcttgacggtttttattcagagcatcaatatcagaagcaagttgttctgctagtaacggatcatctgttgtaagcaattcaacagcaggatctgcactatctaaacgtcctgcagcatttaatcttggtcctattccaaaaccaagatgttcttcgtttaattcctgatctttcaagccacatacgtctaagagcgctttaattccgggcttatttgaattttgaagtgctcgtattccttcacttgctagaagacgattctcatcttgaagcggaactaaatctgcaattgtacccattgctgcaatctcaagtaaatgtcctggaatgcgaccaagtaaggcctgtgatagtttaaacgcaacgcctacacccgcgagccccttaaaggggtaagtgcatcccggcttcttgggattaatcgtcgcataagcatcaggaagtacaggaggtggctcgtgatgatctgtaattatgagatcaacaccgatttcctttgcaacttctgcctcatggacacccgaaataccagtatcaaccgttacaatgagatgataaccatcttcctttgcctgtctaaaggctgcttcatttggtccgtatccttcagtaaagcgatttggaatataataatcgaaggttgcaccaagctcacgtaacgtataaaccaggacggtcgtactactaactccatccgcatcataatctccaaaaattagaattctctcattcgaagcgatggcttgttgaattctttcaaccgcttccttcattccactcattaggaacgggtcatgatatgttaagttttctttatataaaaaccttctagcttcctcttctccactgatacctcgattcactaaaagcgaagcagctagtcgagaaattcctagtttactctggagccgatcaatgtttgtttcatctgtttcagcaagtttccagcgcgttttagatcttaacatcgaatcacctcttaacctgttcattatatatagtttacataggtttgactatagttcaaggagaggaatcttggttagtgaagatttctcctcactaaaaaaagccccggtctcactcagggctatcccgctattctccatccgtacctgtaccttcatccattgcttccccgtcaagtggcgtatgaactgattttgtttcagtagcgaccggctcggcttttaatttctcattttctttttgtaactttttaagctctcttttcagtttataatatttgaccatcccaaaaccaagaacaagaatggctcccatcagtacagatcccaatatgacgagaacgagcggccaatccgatgtaccaaatacgtaatttacttgaactggatcaacattaacaactgaaaaaacggcaataatcagggcaaataaaagtgctacgactaatccccactgtcccttcatcttaatctacctcctctactccaatacctattccactactcgctctttttttccttcggttcaaaaggattgatatgaactaatacatcatgaacctcatcctcttcaagaaggcgttctttcactgctttaccgatatcgtgaccttctttaacggaaatttctgggttcacgcctaacttcatatcaataataacatagtgtccatgctctctagcataaaactcatcgaggttcacaacgcctggcatcccgataatcagttctttgtactcagtcgtatcttcctcatgtaacacatggtcaagcgtcgtatgaatcgattcaaaaccaagcttcacagccatttttgcaatcagcacggatacgaatattcctgcaataggatccgcataaattagccatggtaagttaagcttacttcctaaaatagctcccgcaatcccgattaaaacagcaatggaagaatagacatcagaacgatgttcgtatgcatttacgataagtgcatcgctttttatctttttacccaatcggaacttatattgaaacatcacttcttttactacgattgaaatcaaagcaccatatagcgcaagcgttcctggagcttcaatcggattgaaaatggcttttccagaactaatgccaatttccactccgaccagtaataataaaaccgctacgataattgccgcgattgattctgcctttccatgaccataaggatgatctttatctggcggcagtttcgctgcacgcaatcctacaaaaacagcaaatgatccagctacatctgaagccgagtgtgccgcatcggcgataagggctcgactgttggagattgagccaataaccccttttaacacagctagaataatatttcctagaatcccaacaaccgctgcaatttctgctttccgaaaccgttcttccttattcatttctccacctcttacaaatccaattcattatccatatagcttttcccgtatttgaaaatctcacaccccgcttttgacacgcaaaagccatggctaagccatggcttttcttctaaaggtgtcatacctcttatacttcagtttcagcaggagtgaactttttcttttttaattgtttccctttccatactgcccaaagttgagaagcaataaagagagaggaataagtacctgcaacaagaccaatcaatagcgcaattgcaaatggtctgattgcttcgcctccaaagattgttaaggctgcagcagcaaagacaaccgtaagaacggtattgatcgaacgagcaagcgtttgaacaagacttttgttcacgacacgtgctacatcttcaaacgtcttcaccttcttctcgaacttcatattttcacgaatgcgatcgaatgtcacaatcgtgtcattaatggaataaccaacaatcgttagcactgccgcaataaatgtaatgttaacttctatctgcagaatgctaaagaccgcaatgatgaagaacgcatcatggaatagcgcaacaatcgccgctacgccttgtagccattcaaagcgaagtgccacatagataataatccctacggatgcgatcgcaagggcgataaatgcatttttagctaaatctactgctacatccggagaaacggtactaatacttggttcagcagagtaaagttctgtgaaatgatttttaatttctgcgatttcgtctttttcaagctcatctttgaaggcagctactgccatatcaccaccacctgcaagggtgacggactcaggatcaaatccaagctcctcaaattctttgcttacttcttcagtggttagcttgctatctgattgaagatctacacgagaaccacttgaaaaatcaatgccaagattcaatccaaagatcgcaattgctaacccaccaagaacgattaaagcaagtgaaatcgcaaagaatttattccgatgtttgacaaaatcaaacttagtatctcttactttagagctcatcgatttcactctcctttacgccaaaaagtccgggctttttattcagtgccctgctcttgacccataggccgagaagaattcgtgaaccccaaacggcagtcaaaaagctaacgacgatactcgtgattaacattactgcaaacccttttactgagcttgttccataagcaaataaaacaccggctgcaattaaagttgtaatattcgcatcaaaaatcgttgtaaaggaacgtcttcccccagctttgaaggcggacatgacagatttacctgaacgaatctcttctttaattcgttcatacgtaataatattcgcatcaacagccatccctacccccagaataagtgcagcaataccagggagtgttaataccgcgttcatccaattaaagacaacaagaatcaaatagatgtacgtagttaacgtaatcactgcaattgctcctggtaaacggtaatagaaaagcatgaataggaaaatcaaaccaactcctataaatcctgcaataaccgttttatcaagagactgttcgccgaactgtgcaccaactgaagttgaataaatctcatctagctgaactggtaaagaacctgcgtttaaaagctcttttagattttcagcttcttcaagttggaaaggtggccctgaaatgactacagtattttgagaaaggacctggttgacagctggatcggaaatgaacttctgttcatcagctggctttgtcacttcttctttataagaatcgccttcctcataatcaagccagatcactagtcgattatccggctgaggcaattgactgagttctcgcgtaatatttgcgaatttttcaggatcctttagggttacctgaacaacaggttggttattatcaaatacaacctttgccgctccttctttcagatcagcaccactcatcttctcctcatcgtctgttgtgcgaaatgttagctccgcctgtgtggacagaagttcacgagcctgattctgatctttcacaccagcaagctgcacgcgaatgcgatcatcgccctcgatcgtaatacgaggttctgaaacccctagtacgttaatacgcttgtacagggcacttactgtactgtttaataaatcctgactaagttcctggccctcttgagcaggttctacttcataaaggacttcaaacccaccttgcagatcaaggcctagtttaatgtcttttgttacacccatgacggttgttccaatcaatccgccaagcaaaaggacgatcagaaagaacgctacgatccgaccttttttcaccataaaaaaaactcctctctaaacccccaacattcttgcttatgtatatcacatctcacacaatactagctattatatcgaatgatgaatttttctgtcaatttcagtctttttagtccttgctttcaaacgttttcgttcctttataagcatggattgttaaccagttcatatattcattaactgataaacgcataatctcgtttaccaactggtgtaatttcatctcttccaactcattgtttctttcaaaacgagcaaggagacactcccagatttcgtccatggttgcgccactataacctaacaataaaaattcatcccgcttgctttcaagtgctggggatacttccttcttccactcattcatctctcggtctcctttcttagtatcgtcttcatgacagagatcttaatcgacgacgaaaaaaatgacagctctttttaaaagattgaatagattgctgctcctacaccaagtcctgcaattatgacgcctgtaaggatggaaagaaaagcatatttaaaacggattgtaaataaagctgcagcgacacacgcgctgtaagctcctgtcgtcggaagagggacagcggtgaacaaaataagtccaatcgcaccatatttatcaacgttcttacttttgctaatcgttcgatgataaagccaatcataaaaccgtttatacaagctaaatctcatcaaccagttacttaacggctgaaaaagaagaagtaatggaataatcggtaacgcattccctagaaggcttaatgagaaagccttaagaaaagaaaagtcaaaagtatgagcaagagggattccacccctcaattctaatattggaagtgcagagatcacaacgacaatcacttcctgaggtagaaaactaaggttctctacaacaaactgtttaatttcttctttcattaaaacactcctatatgcctgtcatgctttgtcccctaataagcatatacatagtgataaaaaatatctagacttttctacaatttctcaggtgtattctggatagaaagtagggagtatatgtcaaagcaaacctttcttagagggacactgtttctcatcttagccgggttaattacgaaagttttaggttttattaaccgtatagtgatggttcgtgtgatgggtgaagaaggtgtcggtctttatatgatggccgttcctactttaatattaacgataacgctaacacgcatgggacttcctgttgcgatctcaaagatggtagctgaagctgatgcggaaggtaaccgtcagaaaatcaaacaaattttaattgtttcgctttcaattacgacggtgcttagcgttatatttacaacgatgatgatatttgcagccccatttttgtcaaaagaggttttcacagatgagcgcacattttatccgcttgtcgccatcgcccctgtagtctcaattgtggctctttcttcagtgcttagagggtatttccagggattacagaacatgagaccgtctgcttattcacaagtaattgaacaaattgtacgcatttgtctcgtcgcagttcttacaggcgcgtttctaccttatggtgtcgaattcgctgctgcaggcgcaatgatttccgtagtgcttggagaacttgcctcccttctctttatgttttccatgtttaaaatgaaaaagcggattaaaataagaagcggatttttcaactatttaaaagggggaagagggactttcaacagtttaatgaggatttctctaccgacaactggtagtcaattgataggatctctctcctatttctttgaaccgattatggtggcccgaagccttgccatcgctggagttgccacaacgctcgccacaaaacaatacggtcatttaactggtcttgcaataccactgttgtttctacctacctttatcacctattctttgcaggtatcacttgtacccgcaattagtgaagcacatgctcaaaagcagtataaacaaatccaacaccggttaagtcaagcaatccgactatcaatggtggctggcggcctttcggtggtcatcacatatatctttgctgttccattaatggatatcatgtacaacgcccctcatgtcgccatctatgtacaagttatggcccctttctttttcttctattattttcaggggccgcttgcagccgcccttcaagcattagatttagctaaggctgctatgatcaatagttttattggcgcgggtgttaaactaattgccatcttctttcttgcttctcgacctgagttaggcattatgggcgcggctctagcgattgttattggcattcttctcgtaacacttctccactttgccactcttgtaaaggcaattggcttctcacttgttgtaagtgatttactcaaaggcgtgatatccattattgcaactggatttgtcgggcattttctttatcaaaccttctcttcttcttccactgatctacttggtacggtattagctatctctgtcacatcaattatttattttgtcattttactactgcttggacttattaatcgacatgacttaaaaagaatgcccttcattgggaaattcattcactaatatagttaagcttattttaaactgatctatacagagaaaaagtaaccatagcggttactttttctcattcttcaaatcaataaaaaaacttccatttttatggagggaacaaaatgaaatccgctttatatctttatgcccgacttttctaagctcttgcctaagccatagcgctgtttttccaattcgctcaagatgttcctcctgaacttttccatccaggataaggggaagaggcattaaagttgcaggctcttcttttttgttatcctcttcttttttgatgaccgacagcttgcctgagggttcaaggatcgcgaactcaacatctgaaacagatgcaatgttattctctcgcaattgaaccagcaaatcatcaaagttatatcgctgttttctcatttccgtttcatcaattttaccccgatcaattaacacggaaggctttccgtccacgatttcccttactttctcactttttagtgaaacaaaagccataagtatttgtattaatacaagcacaatcattggaacaatcgtattaagcatcggtgtctgtggatcttcaattgacatgacggcaagctccgcaatcataatagaaacgacaaaatcaagaatacttagctgaccaatttcccgcttacccatcactctaaaaacgaagataatcacaaaatataaaacaagtgtccttagtataatggtcatatattccatccctgatccctcctttcaagcttcttttgtttagtttaaccacgttttgtttctacatgagggaatgtattggaaatgttttatagcagaaaataaaaaaaacttcccttagtaatagggaagtaaatatctgaaataaatatagactgtactaataacaagcgagacgaagacgaccggtaatccaattttgagaaaagcaatgaaccttacttcttggttgtcttttaacgcaagaccggccaccaccacattagcagaagctccaattaacgttccattcccaccaagacatgaacctaaggcaagcgaccaccacaacggatcaagattcgtcattccgtaaccagaaaattctgaaatcaccgggatcatggctgcaacaaatggaatgttatctaaaaaggcagagagaatacctgctccccacaaaataataatggaagtcttaggcaaatcaccttcagtatataaaagaatcgtcctggcaacttcatcaataatacctacttcctctaatccaccaataaggataaaaagacccataaagaaaaataacgtcacccattcaatcgattcaaaaacttcttccaccttatgctctttttgagtaatcaatagtaaaagaactgctcccgccatcgcaatattcgtcaattcagtatgtaagacagggtgcaaaagaaaaccagtaattgtcataagtaatacggctgaagacttatagagcaaaggtccttttttcaaatactgagacgcatcaatttttaacaatgactgtcgatacgaatcatctacgattaatcctttccgataaaaaaacaaaagacctgttatgataacagcataaatgaccacaacaatcggagctaagttataaatgaaatcattaaaatcaagatggtcaactgcctgaccaatcataatgttaggcggatcaccgatcaatgttgccgttcctccgatattggatgataggattaccgttactaaaaagggcatgcttgtgatatttaatattttcgttaacgtcagcgttattggaacaagaagaaggactgttgtaacgttatctaaaagggcagatccaactgcagttaaagtacctataacagcgaggagcggcaaaggttttccctgcacttgttgggcaagcttaatcgcaatatattcaaatagtccattttgacttgtaatggaaacaagtatcatcatagaaaacaagagggcgatcgtattccaatcaacgtggttcataaaagctgaatcagtggttgtaattcccgccagcaacataagcaatccgccgccacatgcaacgatggcacgattgattttttcggtaatgatgcctatataagcaagaacaaatatggtgagcgcaataattatgtccaatccatactgccccttccctgtcccgtttctaacatcgtatgatgggctgtccgaattcatgaatagacttctaattcctccgtagtcgaatagaatgtacaaactatctcgtttaagggggaggaacatgagatccaaacacgcattctcaagtatgggatctggattacttgcgattattgtcattgtgcttgcgactagcgtccttttttcattaattcttcgcttctcttcggtatctgaaaaaggaattagtccactaattattgtaacgactgtgatcgccttctttattggaggctttatttctggaggcaaaggtggggaacgcggttggctacttggcggaggaacagcttgtatgtatatcatgattctctttctcatccaatacttagggtatcgcgtaaacatgaacctcgagcagctgctttatcatgctggttacggtctcatctgcattcttggtggaattattggggtgaatgttaaaggtggaaagcatcgagaagcctagaaaaagagcgccctcaatagaggacgctcttctcaattacttgctattttcagtgattgattcgcggatagccgctcggtcaaacaccatttttgtaccgtcagttgtacggattgtaattgtaccttcgtccattgcatcaataattccatgcattccaccgatggttacaactttattccctttttctaggcttgcttgcatttctctcgttttcttttgacgcttctgttgcgggcgaatcaaaaggaaatagaaaatcgcgaacattaatagaagcgggactaaattcattaacgtagaactcatactcttttcacccctttccagcaattacacaatctatggattaaaagtttttcgcatttggcttattaaacccatactgttcaaaaaactcagccttaaagtctagaagacggtcatccataatcgcctgtctaacttgcttcatcaagtttaacagaaaataaaggttatggtaagtcgttaagcgaaagccataagtttcatttgattttacaagatgacgaatgtaagctctcgaataatttcggcaaacgtgacaatcacaattttcatcaagcggacggaaatctcgtgcatatttcgcgtttcgaacaacaagacgaccgttacttgtcataagcgtcccgttacgagcaatacgtgttggaagaacacaatcgaacatatccactcctctaattgcaccatcaataagagaatcaggtgaacccactcccattaaataacgtggtttgtgagttggaagatgaggcgttgtaaaatctaagacgcgattcatcacatcttttggttcgccaacagaaagaccgccgattgcataacctggaaaatcaagtgaaacaagatcctcagcactttgtttccttaaatcttcgtactcgccaccctgcacaataccgaataacccctggatatctttacgttcatgagccgttaaacaccgctctgcccaacgacttgtccgctcaacagaactcttcatatagtcaaattccgctggatatggagggcattcatcaaatgccatcataatatcagaaccgagcgcattttgaatttccattgcaccctcaggagaaaggaaaagcttttcaccactcatatgatttcggaaatgaacgcctttttcctcgatttgtctgaggtcacttaagctaaatacctggaagccaccagaatcggttaggattggctgatcccagttcataaatttatgaagaccgcccgcttctttgacaatatcatgtcctggacgaagccaaaggtgataggtattacttaagataacaccggcacccatttcttttaattcttccggactcattgttttaacagttgcaagcgttccaactggcataaacattggcgtttcaaacgttccatgtggcgtgtgtagcttgccaaggcgcgcaccactttgtttacaagttttaattaattcgtagcgaattggttccgtcattctttcgtactcccttccaaaatcaacattgcatcaccaaaactgaagaatcggtattcttcttcaacagccgtacgataagcggaaagtacaaaatctcttcccgcaagagcgcttacgagcatgatcaatgttgactgaggcaggtgaaagttagtaatcagtccatcgattgctttaaacgtataaccagggtaaataaagatatcggtccaacctgacgattcttcaaaacggccgtcatgggctgaagctaccgtctcaagcgttcttgtcgaagttgtgccaactgaaataatccgcccaccctcttctcgaacacgatttaaaagctctgccgtgccttttgtaagctgataaaactcaccatgcatttcatgctcaaggatgttgtctacggaaaccgggcggaatgtgcccagaccgacatgcagcgtaataaaagctacatgaacccccttgtcttctagacgctgaagcattttttcagtaaaatgcagaccggcagttggtgctgcagcagaccctctatgctttgcaaaaacggtttgatagcgatcttgatcatcaagcgtttctgtaatatatggaggtagtggcatttcaccaagttgatcaaggatttcataaaaaaccccttcgtattgaaactccagcacacgcccaccatgttcaagagactctttgcatacggctgtcaaacggccatctccaaatgaaatcacagtgcccggctttactcgcttggcaggtttaacaagcgtctcccactcatcctcttccatttgcttaagaagcagaacttctattttggcgcccgtttcttcttttgaaccatatagtctagcaggcataacacgcgtatcattcaagacaagacaatcgcctggattgatatattcctccaaattggagaactctctatgctgaagtttttgctgtaatgggtctaataccatcaatcgcgatttcgtccgttcttttaacggtgtttgcgcaatcaatctttcgggaagttcaaaatcaaaatcatttacgttcatttttttcaccactatttctaaaaagtgttcaactttattgattttaccacagcactaccgatccgcgcacccttaaggggcagttctccttcccccagcttgtaactggcggttagaaagctcccccttatctgaacctacctataataaaaaagagtagtgacagaacaatactaacgacgatagaagtaacgattggaaaaaagaatgttgtgtttcctcttttaattaccagatcaccaggtaatttaccgacaaaggaccacaaaaccccaatagctaaaaaagcgatccctaaaacgataaatagctttgaaatgcccatctttatttcggaacctccataccaaagtgttcgtatacatgatgcgtcaccatacgtccacgcggcgtgcgctgtagaaatccaatttgaagaaggtatggctcatacacatcttcaatcgtatgactttcttctccaatggtggcagcaatcgtatcaacgccaacaggtccaccacgaaacttttctataatcgctaacagaagcttgtggtcaatatgatcgagtccgagcggatctacctgcatcatctctaacgcctgtgcagcaagcaaagacgagatgactccatctccttttacttgagcgaaatctcttactcgctttaacaaacgattagcgattcgcggtgttccacgagagcgacgcgctagttcaacagcggcattctgatccatttctacattaaatatatcagctgttctcatgataatcgtttgtaattcatcttctagataatattcaagcctgcttaagacaccaaaccggtctcgtaaaggggccgttaataaccctgctcttgtcgtcgcacctacaagtgtaaatggcggtagatccagtcgaacggacctggccgtttccccctttccaatcacaatatccaaacagtagtcttccatagcaggataaagcacttcttctacgcttctcggaagacgatgaatttcatcaataaataaaacatccccaggttcaagcgccgttaaaatagctgccaaatctccaggtcgttcaatggcaggacctgatgttgtacgtaaatttacttccatctcattagcaatgatagcggaaagggtcgttttaccgaggcctggaggaccatataacaaaacatgatccagaggctcttcgcgcatttttgccgcttcaataaacacttcaagatttcgctttactttttcttgtccaatatactgagctaatcgctgaggacggaggctatattctacggatgagtcgtcaccgacttgttctccagatagaatgcgatcttccacgttactccctccttattgcttcagcataagctgaagggctttcttgatatactgatcggttgttagcgtttcttctaacagttttggtttaaccttcttaatttctcgctcggcgtagccaagtgctttcagtgcttctaacgcttcatcaagttcatgagcgccttcttcttgcacctcgtccactgcaaacaatccttcaattggagctccaaaaccttttagctttccttttaaatcaaggataatttgacgcgctgttttctttcctacaccaggaaacttcgttaagaatttttcatcttccatctcgatggcactaacaaccttgtcaggttcgccagtcgctaaaatagcaacggctcctttaggaccaattcctgatacatttaacagtttctcaaataaaaggcgctcttctcgggttgggaaaccataaagagcaattaaatcttctctcacataatggtgcgtaaaaatttgaatcgattgatttcgatatttctgaaactcaaacggattgccacaatagattttatagccaatcgaattggactccaccacaatgtattctgtatcaatatattcaaccgtgcctttaatatattcaatcaaagctactctctcccctgtacatacgaacatgtatttctatctctccattctaccataaaaacacgaaaagcggagcaggcccgttaaaatctgcaggatgttggagcccatgagattgagacgctttttgtctcattcgattgggtgaaacagccggaggatttggcctgcgcagctagacatgaaaagcggagacgagcgtttagaaacggagatattggagctcttgaactagaacacgccttttgtgttctggtgaaagagcgaaatatcgcagtttctgcgagtcgcagctggacacgaaaggcgtaaagaactgtttattaaatacaaaaacccgtcctattggacaggtttgcttttgattttcgaaaaagattgaatcacatcttcaaactgataccatgattctacaggtatgccatccataagttgttctcgcctttgactttcaagcttccctacatcaatttggaagaacgtttgaatcactttctcatcggcagggtcaccatcaaaaatggtaagaacaccatcctccgttaaaccaaaatggccattttgtttacttgcaggagaaatatcttcaaaattccgttcaaaaaccatttttccttcttcctgatcgacaagttgccagtctgcatattgactccaaaaatcctccattgcccaaatcgtttcatacacggattgttttgttgtcactccatctgcataattcgttcgtagttctacttcaatgattaacggaccttccgcctgcagagactctggtgttaccgttgctaaatcgttactagggtcgaaagcttcggccgttgttccaacaaaaattagaaggaaacctaacagaatgagcggataaaggtttttcatatatcttcaacacctttcttccatattcaagaagttcatgccgttagcgtttccaatttctccatccatatgcatcaaaaaaagctacagaaaatctgtagcttatagttgctcatacacctcatcatttatttctgcattatgataaacttcctgaacatcatcattatcttcaagctgttcaattagcttcaccatgttagcaccatcctcatcccttaaaggggcatacgtttctggaatcatcgtaacttctgcagatgagaatgttaagcctcctgcttcgagatgctgcttaacaatgtgaaactcttgtggatccgtataaatctcataggcttcctccgttgtttccatttcttctgcaccggattcaatgacctggagcatcaattcctctccatcaagtacattttcagagcggtcaatgatcagtaagcctttccgattaaatagaaaggatacacaaccattttcgcccatgttaccattatttttattaaaagcatgccgtacatccgccgcagcacgatttttattatctgtgagcaattgaaccatggtggctgcgccacctggtccatagccttcatatataacattttcatactgaacaccattcagatcaccagtggctttctttatcgcacgatcaatgttgtcgttcggcatatttgatgatttcgctttatcaaccgcgagtcttaaagaaggatttgtttccggatcgcctcctccttgcttagcagcgacaaaaatttccttcgctagcttcataaatacttttccacgcttcgcatcctgtgcgttttttctacgctgaatatttttccatttggaatgtccagccattggtacgaactcctttcaaatgtagtgatttccctaaccgtaacataggaatcactcgaccgaaaagcgttctgcatatgtaaacgagcaggcttcagcccactcgttattctgattacttgttgttctcaaaaggacgctttgcagcattgccgatgtcatctaaaatcccatttacatcagtctgaacttcttcaaaaccatctccatctgcaagacggttatttacgtcgcccatgcgaccaaaaacatcttcatctgttgagatcgaaacatttttctgtttcgttactttggctacttcactacgaactgtatcctttacatctgcatcatttttgtcgtttgtatcaacgccaatcatgatctggtccccgtatacaataacacgagaatcatcgacatttttaagcttgttgattctcttcgcaaggcgggtagacagttcattgtcataaccagaataattatcatcggtacgcatgtatcctggcccattcattccattacgtttatcaatttgcttttcatctggagcctttacaccatgttcataatctcggtcaatcatgtctgtaacggcaccttcgcgatagtcaccgttattatcttcacttgtgtaataaccaattggacgtgttgaatcattataacgtgtatccatcgcctcattatcggctgtacacccaattaatccacctgcaaacatcattgtagaaagcgttagaattgttttcctcaaatttaaaacctcctttcacctttagaatgtgaggaggctgatgtttttaatctgttagttctaggtaacaatggtacctattaaagcacttgccgaatgaatgccgaccttttctcttgctgctgctctgtttttaccaatagttcatttcttccaccaggattcattaaccattctcggtaaaaatcggcaggataagcaagaagtcttcttagaaaaggatattcaatgcaatgacgaagtgaagatatatgtgacttctcccattcctctagcgaccagttacagtgaggaagcattcgatttatcaactgcaaataatcatactcacgcggagcgtaactcatgagatcaccatcaattaaaagcaactgatcaaaattaaagataaagttatgatgcgcaggatcaccgtggacaatgcaatgacgtcgataagcagatcgttcaagttgttcgacttcagtcatctgagaaagaacactttcaccaatcgataaaaaagaattaatgagcttttcctgttcaaaagagagtacctcagaatctaaattttgcttaaaccgtatgaagcggttcgtccattttcgagtaagagagacatatggtatgtgcttactaactatcccctgaacttcatcttgaaaatgatttgttttttccatcgcaagaaatcgatcttctttaatattatagtcaagcgttcgcccttctattgctttcatgcaggcaaacgttagtccaccagtttctttcatccactcgccatcagcgaaaggaatataaggaacaaaagaagtagcaccagcagatgaaatttcgatttgtttttttaacgtctctttctttactgctgcttttaaaaaaacaggctcgccattgcaagaaatacctctccaaacgagtgactttatctgcttcatttgtagaaaaaaagggcgtatcccctgtaggatagccccattcatcttactagcgtgattccgcatagctactttccattcccatataatccatcatcggcgctttattagctccctgaacgaatccagggttcgcatatgacggcatttgttgataaggcgagacttgttgatttcctccacatccacagtcatgttgctgatacggtgagaccattggctggttaggatagccaggcggcatcatcatgccacctatattttgattcggatagccataagcacccatcacagcttcaggatattcttcatttcctttatgagcatacggcgcaataccataaccattcatcgctgccccggctactgatcccggatagccttcatacgctcctgctacgtcctgatttggatacgcaggtgtttgcatgcccgctacatttcctggatagccgccattattctctttatggccatagccttcatacgctcctgctacgtcctgatttggataaccgggtgtttgcatgcccgctacatttcctggatagccgccattgtttcctttatggccatagccttcatacgctcctgctacgtcctgatttggataaccgtgggtttgcatgcccgctacatttcccggatagccgccattattccctttatggccatagccttcatatgctcccgctacgtcctgatttggataaccgtgggtttgcatgcccgctacatttcccggatagccgccattattccctttatggccatagccttcatacgctcctgctacgtcctgatttggataaccgttgccatacatatgcgcgccagcaactgaaccagggtatcccggcatgctttgatttgctttgtttccgtagctcgctcctgcaacatcagagctttcttcacccataccatagttgttcatgttagcaccagctacattttgatttggataaccattttgctggtaagcacctgctacgctctcttctcctttttgaccatatccgttcatttgagctcctgctaccgcacctggatagccgttccccttatttccataaccttcataggctccagcgacgttttgatttggatagccataagctcctgctacttctccagggtatccaccagaatttgctttacttccatacccttcataagcacccgctacgttctgattgttagggcccatttgtgctccacccacagaagtcggatagccaggataaccaccattgtattctttgttcgcataactggcgccagctacgttactaggatacccttgattcattggaggtggtggcatttccattgacgaagactcaaattcacttaacacttcttcatcgttcattggataaaataaattttctgcttttttggctttttcaactggtttcttttcagctactttttttgctttctcaaccggttttttctcggctgtttttttcgcttccactttcttttcaggctttgtttcttttggctttactttcttaggcttttcttcctgaggcatcatattcatattcatgttcatatttaaacccatgtttaactcattgttgattggcattgtcatagacggcttttctaccggcttcatcggcgcttcttttttcttaggcatttcttttttcatttctttgatcggcatttctttcttcttaactggaacgccacccgatggtactttcactttcatacctggcataatcatattaggattcttaagctgcgtattgacagcttttaattgttcaaaatcaacaccatattttttagcgattttccataaagtatcgcctttttgaacgacatgtattttcaacctaaaaaactccctcctgtaatcagtacaatgaaattcagtacagtgtatgcgtgactgggcagattgctacctttttgaaaggataagatcatcacattaatatgcaagggagagggcgcctatgagtaatgtcaatttaaaaacgaaaaaggaatcaaacatagcgtttgatcccttgttttttatgcgcgatcaagcattcgatttaacgcttgtatcgcatagaatgctgtatctgattccactttaatctgatttgttttctgcccaaccttagcttcttcaagcgcccatagaagatgaggtaaatcaattcgattcatggttagacaaggacacatgtttggatttaaggagactattgttttatcgggatgttgttgaataatgcggttaacaaggttcatctctgttccaatcgcccatttcgaacccggttgtgcctgttcaatcgtctcaataatcatttttgtagagccagagaaatcagattgttccacaacttcaaaactgcactctggatgaacgatgacgttcatgtcaggaaattctcgtctcacttcatcaatattttccacggtgaatttttcatggaccgagcaatgacctttccataatatcactttaatttcattataatctccttcgtactctaacgtatccgtaatcggattccatacggccatcgcctctaaagggacaccaagttcataagcggtattccgtcccaggtgctgatcaggcaagaacaggatgcgctctttctgagtaaatccccagtcaaccatcgccattgcattagacgatgtcaccgttgctccaccatattttccaacaaacgcttttatagcagccgtagaattcacgtatgttaaaggaagaatcgtatcaccaaataacatatgaagcttcaaccatgcgcgctcagtttgatgaatatccgccatgtctgccattgaacaacctgcccgcatgtcaggaagaataacagcctgttgggtttctgttaaaatatcagctgtttcggccataaaatgaaccccacaaaaaatgatcgtttccgcttttttattacgtgcagcaagctgcgcgagttggagagaatctcctgtaacatctgcaaactgaacaacttcatccttttgataatgatgagcaggaaggtataacctttcccccatctcagctttaatcgctacaaccctgtcaaccatctcctcttctgtaaggtttttatatctttctggaagaccaggcttttttaatgcatctaaaatgctcatttcacttcccctttcatacgtaaactaatatcaagacttttaatagaatgggttaagcaacctagcgaaatcatcgtaactcctgtttgccgataagttgcaagattatcaagcgtaatgcctcctgacgcttctgaaattagcgggtagggaactaatttcgcatatgcggccacttcttttggcgaacagttatcaaacataatcacatcagcctgagcttttacggcttctcgaacttcctcttccgttgatgtctccacttcgattttagtcatatgtccaaggcgtttctttacatgtgatactgctttttcaatacttccaaactgtgcaatgtgattatcttttagcattacgccaccatcaagggtcattcgatgattaaccccacctccgcacctcactgcatacttttcatacatccgaagaccaggtgtcgttttcctcgtatcacaaacacgtatagaagcatcgtcaagaagtttaactgctcgagccgtcatcgtagccacaccgctcatcctctgaatcagatttaaaataacgcgctcccccgttagtactgctcgtacattcccttttacagaagcaatgacgtccccactttgaacaacatcaccatctgtcacgtaaacctcaacgcgacttgtttcatcaagtattcgaaaaccaatttcaatcacttctcggccacaaaaaacgccactttcttttgctataaatagcgcttctgattgctcgtctgaaggaaatagcagctcactcgacaaatccgaagttcctatatcttccatgaaaaattgttcgagatctttcctgacttttaacccaatcatcctgataaatcctcctaagtattcttttttgcttccattctggcagctgcttcggatagtctgctcggtaatgagcaccacggctttcttttcgtaaaactgccgaggttgccattagccagctcactagccccatatttgctcgttcaatggactgaaaatccaacttattgacttcgtccatcgcagccgggtgcagtaacttaagcgcataatcaagccccgctcttgttcttttcattccaacatattgatccatggttttttttagttcatggagtaataacgacggttccggtaatctcgtatcttgctctattaactctctttttcttacgtctcggtgatggtgcaaaatccactcagctgcttcacgtgcaaaaacaataccttctaaaagagagttgcttgccaggcgattagctccgtgaacacctgtatgagctacttccccaagagcaaataacccatcaagagaagttctaccaacgtgatcagttatcacaccacccataagaaaatgagcaccaggtttcacaggaatcattccttttgccaaatccacaccgtggttcttgcactgcatagtaatcgtcggaaatctctcttcaaacttcgaaatacttgatatatctaagtaaactggcgacacttcttcgtgaatcgctcttgctacaatatctcttggtgcaagatcgaattgctcgtgtttcccttccatgagacgctctccattagctgtaaccaatacgccaccttcaccacgaacagcctcagatatgaggaacgagtgatcagcatccccggcatacatcgttgggtgaaattgcatgaattcaagatccgttaatatcgctccagcgcgataagccattgcaagtccatctcctgtaatggctggatgatttgacgtcactggaaagagctgccccgctcctcctgttgcaagcagcgtataagccgcattaataatcaaagtatctccagctttattgatgactttagctccggtacattctccttcgtcgataagtaggtcaatcgccagatgatcttcaagaatggtacatcgttttttcactcgattaattagcgtatggatgatttcttcgcctgtggcatcaccaccggcatggaaaattcgcgatacgctatgcgctccttctttacatctttggtactcaccattaatgcttttatcaaatcgcacaccaaggttgatgaggtgttttagttgcattggaccttttttaacgagcagctcagtaagttcttcgttattatgaaaaacgcccgctcggatcgtatcaaaaaaatgatttgtccagctatcttcttccttggtagctgcagcaattccaccttgagcaagcttagaattgctttcgccgagctttgactttgtgataatcgtcacattcttttccaatgaaagaagttcagctaccatcaatccagcaacaccgcttccaatcactaatacttcagtcctaactcgattcatgaaaccacttctcccactaaacaatgtataaaaatcgcaaatacttaacatctgtcttgacacctatatttacatatatttaaataaataacaagactgaatattagtgaggagaaaaaaatgatttatcttgattatgcagcgtcaaccccaatttccgatatagctttacatgcctatacgcaatccgccaaacaattctttgcaaacaccgagagtgctcatactgccggtacagatgctactcatttattagaaaacgctcgtcgctccatcgcctcgctattaaatggcgacccgaacggaatttatttcacttcaggtggaacagaagcaaatattttagcactccaaagtattgtaaaaacattttcacgaggccatatcattacatcaagcgctgagcattcttctgttttaaatacattttcacaactcgaacgtgaaggttaccatgtgacataccttccttataatgaaagcggacaagtatctcttaagcgcatactcgaagccattcgcacagacactaaattagtttcgattacttttggaaatagtgagatcggtaccctccaacctattaagaagatcggaaaggagctagcggaacgccagattttatttcacacggatgccgttcaagctttcggaaaagtggatattgatgtaaatgagttgtatctttctgccgtctctatttcttctcataaattacatggtccaaagggggttggagcttgctatatttcgccctcgatctcatggaagcaaatttcaccaggaactgttcacgaaaatggattccgtcctggtactgtgaatgttccaggtattttctcctttgcggccgctgccgaggatgcgattaaccgattgaatgccgaacaaaaaaaattcacaaacttacgtgctcacctcgtgaacgaattgtcacatccgaatattgtcatcgaaggggaacagggactaccgcatattatcggtatccggattaaggggcttgaagggcaatatgttatgttagagttaaaccgtaaaggcatcgctgtctcaacggggtcagcttgctcgatcggacaacagcaaccttcgaaaactttgcgggcgatgggacgaacgagtgatgaggcaagagaactcgtccgcattagtcttggtcgagacacaaccatgcaagaaatagaaaaagccgtagacggatttaaagaaatccttacacgctgttccgtaacaaagatataataaggttaagatcgtgttcttggaaaggggttttcagttatgggacaagatggagaaaaaatattaggagaaaatcgaagatcactacttcttcagtggctaaaagaaagcgagaaaccactaacaggaagtgatttatcgaaacgtacgaatgttagccgtcaagtaatcgttcaggatatttcgttgttaaaagcaagaaatgaaccgattattgcaacttcacagggatatatcatgtttaatactgagagagaaaacagaaaatatgaacaggttatcgcctgcaagcattcacccaaagatacaaagaatgagctttataccattgtagatcatggagggactgttaaagatgttaccgttgaacatccattatacgggcatttaacagcttcccttttcgtagggaatcgtcttgaagcagatcaatttttatcaaagctttctatgacaaatgcctcgctattatctgaacttacttcgggagtgcaccttcataccattgaagcgaattctaaaacacagcttgaagctgtcattcaggcgttaaaagaacaagggtttctgttagaacaagattaaacgagtgataatgattttagatcaaccaaaaaaagaacggacgtcattttgcgccgttctttctcatggatcgtatttcaatgacaccaattatttaggatttacgacgaaacatggatattcacctagtacagaaatcccaataccaagcgcttgtatttcctccatgacgccttttaacagcacatcacggttaggacgttccacatcgataataaaaaagtaatttccaagtcctgttttcatagggcgtgactcgatttttgttaagtttaggttacgccacgcaaatgcagcaagcacttgatgtagtgctccaggataatcagatggaagaataattttatatgtgacacgatcttcacggaataaaggggttctcggtagagcttcagcagttttgtgtaacactagaaaccgcgtgtcattatcttccgtatcatgaatatcaccttgagcaatcgttaaaccgtatttttctgcagcaagtacattcccgattgcagcctcttcaatctttccagagttttgcacatattcagcagcagcacttgttgaaggcgcattactgagctctgcttcaggtaactctcgttgaagaaagacatgacattgggcaatagcatgcggatgcgaaaggacacgctttactcttttccaatcctgttgatcaggatgaataagcaagtgctgtcggatcggcagaacgagctctccaacgattggtagtgatatttgttgggagagaaggtcaagcgtcatattaacagaaccttctatcgtattctctagcggaacaacaccataatcgacggctccgttttccaccgcctcaaggcaggcgcgtatggttggaaacggtgtacgatcctcctcatcaaataacgtttttgctgcaatttctgtaaacgttccttcaggtccaagaaaacctatcttttttttcgtatccattttctccccctatgctccagatccaataatttcagcattgttgaccgcttcaatttctttaatttttacaagtaaatcgtttaagcgaagattggattctccaatttccattgttaagataaccgtagcatagccctgtagagggatcgtttggttgatcgttaataaattacaaccgagctgtgcgactgtacttagcactcttgagagcgcgcctgaacgatcctcaaggtgaacagaaagtgttacaatctgttcaatgatcatcgtatgaaacggtaagatcgtatcgcgatatttataaaaagcactacggcttacccctacttcatcaatggcttctcttacagattcaaccgttccactttcaagaagaagtttcgcctgtagcgtttttaacattgaatcagataaaacatcttctcgaacaagataaaaattcttgtcttctttgctcattcttcccctcacctctatttcggccagctacggcccatattcgtcgacgcattgcggctatgtaaaaaaagaccgtccatcgatcaggacagtcttcttcgttcatcagtctacgaactcaaattcgaattccagaatccgaaccgcgtctccgtcttcagctccacgctctcgaagcgcttcatcaatacccatgctacgcatctgttgagcgaacctgcggacgttgtcttctcgattaaagtctgtcattttgaatagcttttcaattcttggtccattcactacgaacgttccatcgctatcacgtgtcacaaagaattctggtgcacctttctcgtgacgatacataacgcgagtttcttcttccttctcttcatcaagagggaattcaggtgtagtttcaagcttgtctgcaatttcaaacaatacttcctgtacaccttgacgcgttacagcagaaatcggataaatcgggaaatcttcctctaattttcccttgaaaatttcaaggttttcttcagaatctggaagatccattttattagcgacaatgatttgcggacgctccattagacgcattttatattgctttaattcatcattgatctttaagtagtcttcataagggtctcgcccttccataccagacatatcaatgacatgaacgatgactcgtgtacgttcaatatgacgaaggaactgatggccaagcccaactccttcatgagcgccttcgataagtccaggtaaatcagccataacaaaactgcgaccatctttcgtatcaacaacgcctaaatttggagcgattgttgtaaagtggtacgctgcaattttcggcttcgctgctgatactacggatagaagcgttgacttccctacactaggaaacccaacaagtccaacatcagctagaaccttgagctctaaagtaacatctttttcttctccaggttcaccattctctgaaagctctggtgccgggttagaaggtgatgcaaaacgtgaattcccacgtccgcctcggccgcctcgtgcaactgttgcacgctgaccgtgttctgttaaatctgcaattacttctccggtatctgcatttgaaacgattgtaccaggtggaactttaacaaccatatcctctgcattacgcccatgctgattctttgaacgaccgtgttcaccggttttcgctttaaaatgacgattgtaacgaaagtccataagtgtacgaagaccttcttctacttcaaatatgacgctggcgccttttccgccatcgccacctgcaggaccgccatctggtacatacttctctcgacggaaggcaaccataccatttccgccatcgcctgctttaacaaatactttgacctgatctacaaacatactttcacctcatttaatcaaaaacgtgctaactagctcctgttccgtttgctctaattcaatcaatttagcgctttttacatcaggattctcgaacgccagcttgagcttgttttgatcggaaacttcaccctgaaagtcaaaaacaagatgaatttcttcgtggtacaactgaagcgttaataacaagtggtgatccgcaggcacattcacatgtgaatcaagcactgttgtacattgagcaattaacgtaatgagatctgcttcgtaagcgcaaatatcatactcgtctccgatcacttcaaaatccaactgaaataaatggttacaccagttaaacgttaatatatattctgcaagtttcggagcatttaaattcgacaattttgcttcctgtctcgactggataataatttcttcaataatttcctttgccctgtccacatgatccagtgcaaggttgcctttgattaactgcaaacgatttaaccaatcatgacgagaatggcgcagaacatcaaaggtattccactttttagacataattgcactcccaatgctttaaccattttcttcattataacaatagatgattcattcatgttaccctaaaaaagaaaacaatcttacgcgtattcatgtgcatcgtcactttttctagaccatttcgtccattatatcaaaaaactctaaccgaacggttagagtttttcttaagttgcttatgcttctttagcaactggatatacacttacttgtttacggtcacgtccaagacgctcgaacttcacgacgccgtcgattttcgcatatagagtgtcgtctccaccacggccaacgtttgtaccagggtagatcttagttccgcgttgacggaaaagaatcgaaccgccggatacgaactcgccgtctgcgctcttcgcgccaagacgcttggagattgaatcacggccgttttttgtactacctacaccctttttcgatgcgaaaaactgtagattcattttcaacatattgtcccacctcctatgtgtgagtaatttggatatgcttgccgtattcctcggcaatagcggaaatggatacttccattccttgaaggagaagttgaatattctcatccgtacgctgatccagatgagctggaacggtacagctgagatagccaccttcgtcctccatgtcaactatgagatgtacatcgcaaagggattcaatcgcgttcacagttccaatcgacacagcagaaacacctgcgcatactaagtcatagccatatgggccagactcagcgtgtccagatagggaaaaggaaataatgcgattgttagaatcgcgcttcaagttgaaacgtatcatcgttgatatccttaagcgttaattttgtcgataactactttagtgtaaggttgacggtgtccttgcttacgacggtagtttttctttggcttatatttataaaccgtgattttcttacctttaccgtgcttgtcaactttaccagttacagtagcgccatcaagcataggagaaccaactttaatatcgtctccaccaaccattagcacacggtcgaaagtaaccgtttcaccagcttcagtgtttagaagctcgatgtagatttcttgaccttcagtaaccttgatttgtttaccaccagtttcaataattgcgtacattacgtgcacctcctctaatactaagactcgccattgcaggtgctagtgaatagcttaaaaacctgtttttgagcggttgtagctctttgggtgcttccaaacgaactaaccactaaatcataccacagcgaaaattgcggtgtcaatgcaagaaacgcgacttcttgcattccaagcttaaatcagtttactgagaggaagtcccgccttttttcgctgcatttcaaacagaccaagctttgtgaagcccgcgaccttcaaacgtttgtctgtgttttcctttttcttcatttgagcgaataatgtttgtcgttctttctcatctacccttaaaaaatcaacaataatcatgccaccaatatttctaagtcgcagttgttttgcaatttcatcgatggccatcaagtttacttcaaaatgggtctggttttttgttatttttctgacgccgccactatctacatcaatcgctgttaccgcatttgtttcttctatatgtagggcagctttccctattttaactgttttctccattccctcaatcgttctttcaagaagatgaagagcgtttttcttttcgtattgagacatcactttcgcctcttttgacaatagaggcaggaaggtcttaaccgtttcgtcgtcatttgtcgctagtttagttgctcgatgaagaggataaagtttgctaattcgttcagcaagtcccccgtttttttttataagacatggtgctcgaaccgaagcggagtatgcaacaagccggttccactcttctcgatggttgtaaaactcatccaaaagctctgcttcactcagttttccagcgcttgtccgaaagataagtccttcttgttcaaggcaatgttgatgagcaatttgaagaaactcttctctctttgttggcagctgttttgatacggctgaataaccggcgtatggcatatagacgagagaatgtccagttaacgccaccaactctgatacaatcggaccttttcgatcgattccagggtgcttcacctgaacaagaattgactgaccttcctcaatacaatcagaaacagccggcatccgttccccggctgtctttttttgctgtgcattaacaagttcatcaccatttaaaaggcctggttttccgctaccaagtgaaataaatgccgcattcttatcatctaaaatagacgatactttcccgagaataaggtctccctcatctggttttttggggttgattgcctccgcccaaatatctgttatttcatgatcgcttacaatagcggccgcctgccactcgttttttttaagaacaatgaattccatagccgctctcctttttgctcttttctctagtttacctaaatagtgtaccaactgcacagccaatttgatttttcttaaaatatgcatgaagtaaaacttgctcatccgcctctacatttagatcttttatgacgatttgatagtgatatccacgataaaatgttgcgagaagatcagttaatttcatttcagaagctactgaaacaaccttcttttcccctttaaacgttgttgaataacgttcaagtaaaaaccgtaaataaatatagtgatgatgtttccactctttgaacaatgatacggtaagaaaaatgatcaccatccataaatttaagtgaaatgggaaaaagacgattgttgccatcatgagtaaacataaacaaataaaggacgaatgaagcattactctatgagatgctttaaaaggatagcgtagggaataaaataaaaaaagaagctttccgccatcaagtggccatatcggcaataaattaaaaaggagaatcattaaattatgaagtaggaaaagactgaacatatcatcccataaacctaaataatagaagatcgcgccaactcctatcatccaaacatgttgtaatggaccagcaagaataacaataagctcttcttttaacgggcgatttccatgctcatccactacagcaacaccaccgaacggcaaaagaatgatttcattgactcgccacccaaaaaaacgagctgctcccgcatgtcctagctcatgaataaggacaacaaggaacagcagcagcatttctcgaaaacgcccagttagaatagaaagaccaattgtcatccagaaaagcggatggattgttatcattcttagcattattcgattggtacaacttgaagcgggtcaataaacgcttcgtttttctttatggcaaaataaaacgttcctgtcttgccatcttcagagtttgagacgctcccaagttggtccttcgtttgaacaaaatcgtacagagaaacatcaattgaatccagcataccataccatgactcgcttccatcagtatgttgaagaacaacagtctgccctatcccttctttatctcctgcataggtgaccacccctgcatcgatcgcttcgactccagagcttagtacggtttcaaccataatcccttttccagtggtctcaaaattctcaagtactttgccactcgcaggtagcgcatagacaggagattcagaattcgaatttgtttctggagatgttggaaataaagcaactggatttccaaagttcccttcataccactccttcacagaggcaaactggaattcttccgccatcatatcgttaacgtaatcctgggccggaacgaggcgatcactctctgctttaaataaaatgccagcacctagaaataagcaggccgcaatcatcgctcgcattaaaaaactttgcttgttaaaaagcgggtgaattttcatttcaacattttgatttgtaaaagtaggcatatgatcatgactttgtcttgatcgaggttctccacgcattggctgacgctgcttctttctcgaatggaggcgttttctcacatcatccagatctttccgcattcctcacccatccttcctataagtagtattcagtttatgacttgtcctgtggggatatgtcatttgaatactttcaagtaggaataagtttgagtgtacgttcgggctgcacaatcaatgggtactatagaccaaggattctccaacaaaaaaatcccggccgcagccgagatttaagaacgcattccaaaaaactttttcactttactaaacacgcctctttcttcttgaagagagagaagaggaaccgattcacctaaaattcttcttgcgatattacgataggcaatcgaagcttttgaactaggatcgagcgcaattggctctcctttatttgaagctgtaataaccgtatcgtcatcccctacaatgcccaggagatcaatcgcaagtattgaaacaatttcatctacatcaagcatttcgccactttccatcatgtggtttcgaatgcggtttactacaagtttcggtgcttcgatattctcttctttttcgagaagacctataatgcgatcggcatctcttacagccgacgtttcaggtgttgtgacaacaaccgatttatctgcaccagcgatggcatttttaaagccctgctcaatgcctgccggacaatcaattagcacataatcgtaatcttgctttaattcatcgataattttcttcatttgcgccggctgaacagcagatttatctttcgtttgtgctgccggaagcatgtaaagtgcctcaaagcgcttgtctttaattaaggcttgatgaagcctacatctttcctcagctacatcgacaagatcataaataatccgattctcaagccccatcactacatcaagatttcgaagaccgatatccgtatcaaccagacatacttttttccccgatagtgcaagagctgttccaatgtttgctgtcgttgtggtcttacccacaccaccttttccggaagtaatgacgatagcgtctcccacacaacattcccctttctgtctacaacctagtcaaattcggtcgtactttggtcagtatttgaacgcgatcaacgctaatttcagattgaccgtctttgacaaaagcacattctgcttcatgaatgcttgcccctacttgatcaggcggcctactgattaaatctgcgattttaagctgcgaaggtttcataacagcggctgtaataaccgccttcatatctccataagcccctgcatgagcaatgcctcgaagtgcacccattacaaatatattgccaaaagctttaacagtaccaccagggtttacatcaccaatcaggagaagatcaccttccacttcaagaacctgacctgatcgtaccgttctcgctacggatgtaatcgtggacctcttacgctcttcttcagcttcgtcacgcgacatgacattcgaatcaatgcgatcaatttctagattttgcttagattgaattatcgcacgaagttctctttcttgcttttctgttaaatagcgattcccaagcttgagcgttactgtaatcgtatgtccttccgtctgctgaatatgacgagcggaaagtttttcatcaagttcatttataacatcacgaaaagcgcaggaatcatctaaaatcagattcaagccgtctttcgttcctttaatcgtaacaaaatgctgtgtttgcttttgtaccatagacaatttcattcacctcaacatagaataattcaacgttgctaaaggaaactccttcttttggcctgattttcttgtctacggctttcagataaatcttcaagcaaccgttttacaggatagtaaacaataagcaaaaagattccatttaaaagtaaggaaggaagatagcgactatagaaaaaggaagtaaaggatacgtcggttacatttattaaagaaaatagttcatacacatagaattccatcaatgttacacctagtaacccaagtataagtgtcgtaaaccaatttagatgaaaaactttcgataagtaaccgattatgtaagctgcaaccgacattccaaacatatatacaccaacaagatctgtataaatcagatcatgtagaagtccaaaaacaacaccgtataggacgccataagcaggtgacaaaaccatcccaatcataaccacaatcaccgttacaaaacgcgggatgagctgaaagtgaaagccgtattgttcaggtgcgaacacctgaaaaacggttccttccaaaagaaaaagaacaaatagcgttccaactagaaaaaaacgcctcattcttcttcaccttcgccctcatcaggatttacgttttgtgctccacggtcgataatcattacattgttaatatcatataagtcagacgctggtttcacataagcagtctgggtcgtaccaacgttatccgtttcaatatcaacaatttcaccgataacaatacctcgagggaatattccgccatttcctgcagtaataacggtttggcctttttctactttcgtatctaccggaatttttgagaaaagcaacacttctttttcggtatcatatccttcaatcgttccgaaaacattcttatcttcctgcgtcattgcagcaattcgattcgtgcgatcaacatcactcactagttgaacggttgaagagaaaggctgaacatttttcactttaccaattagaccatcaggcgtggcaacggccatatccgcttctaccccatcctgttctcccttatcaatcgttaacaaatcgttccaacggtcaggtgaacgcgcaatcatattcgcatggaaggtttgatagttcgcgagtccagttgaggagtcaatatttaactcgctttttaaatcttcattttctttcttgacggttttcagctcttctgacaccgcaacaaattcattgagccttgacttcaatagctcgttttcttcatacatgtctttcatttctccaatactctcaaataaacccgctactgaattagcgggtttatagaagattgattgaagccaaccaatggaatctttaaaaaactgctcaggcattgtgagtgcatcgcgttctttcattgatgtaccgattaaagcaactaaaataataatgctcacaagcaatacaatgaggcgtttatttgagaaaaattgtggcatgcgttacaccttccaactacttctgtttagagcgggaagttataccagctctagatttgaacaaatggatattttctagcgcacgcccggtaccaatcgcaacgcactcaagtggattttcagcaacaataactggcattttcgtttcatcgctaattacctgatccaggtttcgtagcaatgctcccccacctgtaagaacgatgccccgatccataatgtcagctgcgagctcagggggcgttttctcaagcgttactttaacagcttccataatactattaaccgtatctcgaagagcaccagacacttcatctgccgatacgctgattgttttcggaagtcctgtcacaaggtcacggccgcgaatatccatcgcgtcaataccttctgtcgttccagcagagccaatttcaagtttaagctgttcagccgtacgttcaccaatcattaagttatatgttttcttcacatactggataatcgactcgtccatttcatccccagcaatgcggatggattcacttgtaacaattcctccaagagaaatgatggcaacttctgttgtacccccaccaatatcaactaccatactacctgttggctcccaaactggtaaatctgcgccgattgctgctgcaaaaggctcctcaatggtgtaaggttcacgcgcgcctgcctggcgcgttgcatcttctaccgctctcttttcgacagctgtgattcctgaaggtacacaaaccatcacgttaggcttgcgtgcaaaaacggaacggtttttttgagcctgttgaataaagtatttaagcatcgtagccgtcgtttcaaaatcagcaataacgccgtctttcattggacgaagcgcaacaatattacctggtgtacgaccgatcatattctttgcatcattaccaactgcctcgattgaacctgtatctgtccgtagtgcaacaacggaaggctcacgaacgacgacgccttttccttttacatatgccagcgtattagctgtacctaaatctattcccatatctcttgaaaatccaccaaacatttatgttaaatctcccttcaattcaagcaaaactcataactatgattatacttcatcagtattaaaaacggtagtgggaaaactattccacaacctatacataccctttttcttttaaactaataaacttctgatctccaataataatatgatcgagcatatcaataccaagcattttaccacactctgcaagacgttttgtaacttcaatatcttccctgcttggtgtaggatcaccacttggatgattatgaaagcaaattaatgaggctgcagatcgtctgaaagcctcacgaaaaacttctctcggatgcactattgatgcatttaaacttccaacaaagacggtttgacgatgcaacacctgattcttcgtatttaagtataagcacacaaaatgctcttgtgataaaaaacgcatgtcttccatcacataattcgcaccatcttccggtgaacgaatcgtatatcgctcttctaattgaagacgacttactcttctaccaagctccatcgccgcaatcagttgaacagctttggcggtgcccacgccatttaacgatgttaactcttcgatactggcatctttcaaaagacgcagcccttcaaaataatgaataatgcgataagataactgaagtacagactcctgtttcgtgccagttctgagaataatcgccaataactcttgattggataacgtctcaggaccctctttcactagacgctctctcgggcgctcttcttcaggataatcgcgaatcattaacggtgttttaagcaacacgcttcctccctggattcatcttcgtgtctgactaacgctgaatctccggaacaattccaaacgcctgcaactctcgaagcgttttggaaatcggaagccctaccacactataataatccccgtgaatacgtttcacaaaggcggcaccgaaaccctgtataccataacctcccgctttatcaaacggctctccggtatcgagataattctcaatatctacatctgttaaatcccaaaactccacttcagttgcttcatagaactgtgaacgctgctcatttgaaaggatgaccacacctgaataaacgatatgggttcggccagacaaagctttcagcatctgcctcgcatgctcgcgactttctggctttccaagaatatcggcaccaagcgttacaaccgtatcggcaccaatgacaacagcgtccgattggttcgtaaatacatcatttgccttcccaaaagcaagctgtttcacaagttcagaaggggggacagattgagagtgatgttcttcaaagcggctaacaataatctcaaattggaggttcacttgctctagaagttcttttcttcgtggagaccctgaggctaatacgaggcgcttcattttaccaccctttttttgtaaatgattcacaagtgggaaaagggcttgataacagcttatcaaatcccttttctttccacaatttaattttctaacgttcctctacatttttcgttttacttcgattctgtatgtgcatacagttaaaatttgtttaatcttattttatttcgttccgaaaatgatattcaggagggttgctcccaacattcatatcgtaccgttaatttagatactccgcaaatatcagattattccaagctttccactacttcttgatatgtttctagcgcatccaataaatgctgctgagcaatccataacgaggatactgttttttctgatgaataggtttcaatctctttcgaggcagcttttaagttttctgccaaagcttccccctcgccctcattccatccctctaattcattacctttttcattccaggtttgaatcgcttgctttacatcagttacttcactacttgatacttctccatctgataaagcaactagatcaagctttgttagctgttcaattatttccctaccctcttgcaaatgactctccatttccgcacccgccactacgctagttccatcaatcgtccataatttcttataaacatcctgtccattgttttcaaaataagcggcaagggcatcctggccttcagcagaagctgagacaccaataagcaagaagtatttttcacctttaaaaatcgtcgctggtagaccttgatcttttagcttttcttgaaattcactggcggactcttctgtttcatacgcacccgactggacaacgtgaagatcaaaagataaatccgtctgactagctgtcactggtgccgcttcatttggcttattagagggcgtcgctacactttctccaccgaacaccataagtaaaccgaatccaaataaaacgccaagagcgatcgcaaagaccgctgaagccaccacctttttatgcaaggtaatgacattcttacttggtacgagattttttttctttttacgcccaactggtaaccttgggttcttctttgactgatcaaaaaaagaggaggcttttttttgactatgccgcttctttaactctacgatctttttagaatcacgacgctccggtaaaatccattcaaattccttttcctcagccgctgcgctttctttatgtgtttctggagtcttatggacttcatcatctagtcgaattgaaatcgtccgtctctccttatccattctcatcctcctcaagtaccggcttgtactacagtctatgaaatctcgcgaaatactagaactgaaaatactagagttgagcaggatgacaacacaaaaaacccctcattcatgagcgaggggtttaaaggtaacctaacttattttagttcgagacagtacaagctaaagagcctgctattcatttcttcatataagaaaatcaaaataccattgtaatagttgttcaccataaaaatacgttattagtgctgccaaagccacagaaggaccaaacggaatatgctgcttcctttttacttttccaattaataaccctgtgatcccaataatcgttccaaataaagtagaaaagaaaaagacgagaattaattcttgataaccaaaaacaacccctagcaccgcaaacaatttaatgtcaccgccacccattccaccatgactaatcacagcgattaataggagcaataaaaagcctcctaccgctcctatcaaagggctataccatggatccatcggaacaacaattcgacccaaaccaaaataagctgcaaaaaacaacagaatgcgattaggaatcaacatatatgtgatatctgaaacaaaaataataacgagaagcgaaatcaatccataggaaatcatcaattcttttgaccaccctaccaaaataggtgcggttgtaaaaagtagcgctgtaacgatttcgacacatgcgtaaataggtgaaatacttgtagaacatcccctacattttcctcgctgaaataaataagaaaaaacaggaacaagctcatatggtgaaagctcacgttcacatgttggacaagatgagcgaggggcgacaatcgatcgtttgatcggcacacgaagaccaacaacattaaaaaaggaaccaagcgcaaggccaattagaaataaataactatgtaacaaaacccccatatctttcatccttcttcatattattgtttaaaaagtaatgatagatttagacccaatccactaacctgagacgaacaacctttttcgatattaaaacagaggaacctgtcattaaaatcattgctgcgcaagcaccttttgtataacccgaaacaaaaaaccctatcctccgccttgtgaaggatggggattttcttatccaacatagcttgcaacgcggtttctaccccgctgttttgcaccagtatacatggctcgatcggcatttcgtatcaaggtttgtgcatcttctccctgatcaggcgctgttgcaacaccgatacttgccgtcacgtaaataacctgacgatcgccgttatccaaatcattaaagatctcaaatggtcgatccgctatggcacatcgtaagtcttctgcaacttgtaaactctcattatgaaaatgattttctagcaataccacgaactcttcaccgccaaatcgagcgacggtacccttatttccaatttcttcttcaagtcgattggctactccacaaagcacgtcatttccgctatggtgcccaaatgtatcatttacttttttgaaatgatccaggtcgagcaatataattgaaaatggagaagggttttcatcaaaacagttatatttctcgtctaatacctcgttaaagaagcgaaaattgtacaaattcgttaaaggacagcgctcacttcgccttttggtctcttcataatgccttgcattatcaacagctacagctaaataattggctaaaatttgcagcacgagtatatggtgtttttcatatgaccgaacgcgatctgatgctagtgtgataatgccgacgacctttttatttcgtttcataggtaccgaaataacagcattcgctgtttgggggagaattccctgggtgagatttttccactgtgcacgcttcgtgtataagcggctacgtccactacgccagactcttctgctaatcccttcttcaaaagaatgatcttttctgctagcttgaatgcctctttccttctcaaaacttttaataatccttaaattttctacctgttctgcatccataatgtaagcaaaatcaaccacaaacatatccttaacctcatttaaaaataagtgaagaatttcgtctatatcgagagactgagtaatttgctgaccgatttcactcgtttgttgaagtagatcattaacttttcgacttgagtaatacaacctgagcataagagatgccaacacaaatgggactccaacaaagaaaatcgcaattgttcctagataggtatgtaacatatagagaagaaatccaaccggcagtgttactcctgtagtaatggcttcccaaagcatatctttatcaaaaaactttgtattaatttctttataaatataaatacgtaaaaaatgaaggagaatttgattaacaatgattaacgaaagaatatagccgatagagggaacaagctgtgtaatcgcatttccagagaattcacctgtggaccctccaagtaaataaaaaagtccacctgataacagggaaacgatcataaacatgagcatattaactggatagcgatgactatctttctttgtaactcgcaaattcaaaagaaagacaagaatcgctaactgagttaaaatcgtttctacgaataagccatatctgagaaatacagctagtgaaatcccctggataaaaaaaaggtctgttccttttacgtttattggcatcattgcaacgacggcaagaagcacaaatagcgcaagaacatcggccttgtttccagtaaaatcagggggaaataaatagaacgttgcaaaaatgagtagtggccaacacaatagccatacaatccaaactttacgtttcattattgcagtcaattgtttccccctccatcttctgtggtaaagaagaatatttttccattctaatgtgattatgtttcattttagcaaaaagtagcgaaaaagtcctatttttttgcattaaattctaattttttagaaaatggcgtacttctgatacaaaatagagagagcccgtaattagaactagctcattttcacttacttgctcagttgttgtttgaattgcttttttccagttttcttcatacgtcttggccgaaaaacttgcacgttgaaataaactctcagctgaaatagctcttggaaaatcaaaggtggtaaacgtcatcgttcgaataagcggatagagtggctttaacattgactcaatatctttatctcctagtgcgctaaaaatgacgtgaatatccttatctggatagtgctgctccaaagttctcgcaagactttcgaccccttctggattatgtgcaccgtctacaatgatagtggggttggaacgaatcttctcaaatcgtcctggccacgctgctcttttaagtccgcgctgaaccatgtcatgttcgatatgtagaccataaaagacgcgcaagtattcgagtcccattagtgctgcagctgcatttttcacctgatgctcacccttcatttgaatgtgtagatcagctagtttccgataaggagattgaaatgagaaatgttcaccttcatcatcacttctcttgtcgccaatcgaaaactcttcattcaaacgataaattttcgtctttttcactttagttgtttcatggaagagtgtgagaacttcttctttttctgcagtcgtaacaagaggtacacctgacttaatgattcccgctttttcatacgcaatttgttttaggtcactaccaaggatatgggtatgatcataccctacattcgtaatgacactaataagcggatgaatgatgttggttgaatcgagtcgcccccctagcccaacttccattaaaacaagatctggataggctttagttccaaagtacaaaagcgcgattaccgtaataacttcaaactcggttggtgaaccaaggggggaagctgtagccatttcaacaagcggctgaacgcgattgcatagcataactaaatcctcttctttaataggttgtccgttaaccgctattcgttcactaaatgattcgatataaggagaagtaaacgtccctacttcatatccagcctcctctagcactgtacgtaagtaagtaactgtcgaaccttttccgttagtcccaccaacatgcacggtttttaaccgtctttctggatggtcaagctgttcaagcatccaatccatccgctctaaaccaggtttaatgccgtgatttaacaagctatgaatccaacttaccgcttcatcataagattgaaacatttcctctcctccttaaaagaagacgaacctccaaaagagattcgtcatttccttatttttttagttcgttaatacgagcttcaacgttgcttcttctttcgagatagtctttttctttcgctcgttcttcttcaacaactttctcgggagccttactaataaaacgttcatttgaaagctttttctgaacacgatctacttcagaatcgagcttcttcatttcgccttttagacgctctatttcttcatcaatgttaattaagccttcaagcggaagaaatagctctgctccagatacgactgccgtcattgatttttcaggagcctgaagatccgaagaaatggttagcgtctctgggttacagaaccgctcaatatattgactgttttgttcaagctgcttttgagcttcccctgacttcggtttaatgcgaagctcaatcggcttgcttggtgctacattcatttcagctcgaatgtttcgaaccgaacgaataatctcagttagtagcgccatgtcggcagctgcttccgggaaatgaagctcttcattcttcactggccagcttgcaacagtgatcgattctccttgatgaggaaggtgttgccagatctcttctgtaagatacggcataaatgggtgaagaagtcgcatcgtttgatcaagtacataagcgagaacagatcgtgtcgttttcttagctgcttcatcttcgccataaagcggaagcttcgccatttcaatataccaatcacagaaatcatcccagataaagttataaaggtagcggccaacttcaccaaattcatagttattaatcaggcgcgtcacttgttcgatcgtatcgtttaagcgagttagaatccatttatcagctgttgatttttcacctgttaagtcgagttcttcatacgtcatgccatccatattcattaaggcaaaacgagaagcgttccaaatcttattggcaaagttccaagttgactctactttttcccagtagaaacgcagatcctgacctggtgatgaaccagtggataagaagaagcgtaaagaatcagcaccgtacttctcgataacatccatcggatcaacaccgtttccgagtgatttactcattttacggccttcagagtcacgtacaagtccgtgaatcaatacatcattaaatggacgctgttccgtaaattcaatgccctggaagatcatacgcgctacccagaaataaatgatgtcataccctgttactaaaacgttcgttgggtaataacgattaaagtctgcagcttcttcatctggccagcccattgtagaaaacggccaaagcgctgagctaaaccacgtatcgagtacatcttcatcttgctgccagttttcgatatctgtcggtgcttccaggccaacgtgaatctcaccagtttctttatggtgccatgcaggaatgcggtgtccccaccaaagctgcctcgaaatacaccagtcccgaatattctcaatccagtttaagtaagttttctcgaatcgttctgggacaaagttaactttgtcttctgatttttgaagcgcaattgcctgctcagcaagtgggcccattttaacgaaccactgagtggaaagatatggttctactacagcaccacttcgttcagagtgccctacggaatgaacgtgctcttcaatgttgaaaagaatccctttttcctgcaaatcttttactagctttttacgacattcgaaacgatccattccttgatagtcgcctgcattctcattcattgagccatcttcattcataacaaggatacgctcaaggttatgacgattaccaatttcaaagtcattagggtcatgggctggcgtgattttaacagctccagagccaaattccatatcaacgtagtcatctgccacaatttcaatctcacgacctactattggtaagatcgctttcttaccaacaagatgcttgtaacgctcatctttaggatgaaccgcaattcctgagtcaccaagcatggtttcaggacgcgttgttgcaatttcgatatgccctgaaccatcagcaagagggtagcgcatatgatagaagtgtcctgtcacttcctgatgaataacttcaatgtccgaaagggctgtttttgtttgagggtcccagttgatgatatattccccacgataaattaaacctttttgataaagctttacaaacacttcgcgaaccgcatcagaaagcccattatcaagtgtaaaacgctctcttgaatagtctaaagaaagaccaagcttcgcccactgactgcggataaagtctgcgtattcttctttccattcccacgacttctcaagaaacttctctcggccaaggtcatagcgcgaagtaccttcctcgcggagcttcccttcaacttttgcctgtgtcgcaattccagcatggtccattcctggaagccagagaacatcgtacccttgcattcgtttcactcgtgaaagaatatcttgaagcgttgtatcccatgcgtgccctaaatgaagttttcctgtaacgtttggcggcggaattacaattgtataaggctctttctctttatcccctgttgcttcaaaaaacttaccatctacccagtacgggtaccatttttgttcggttgccttcggatcgtatttcgtcggcatcgttagctctttattcaccattgccactcttcctttccattcaataagtcttaggccgtttgcatcggatttcccatcccgttttcaacaaagaggtgtttttaaacaacaaaaaaacttcctccatccttaggaaaaggacgaaagaagtttcttcgcggtaccacctttatttacagctaaataaacgttagctgtacgcttcattcgaataacgggattaccggattctcctactactatttcagagaaacagctcaagggcgacttcaaatgcttcaatcctgagaaatctttcagcggatgatttctctctctgaagggttcacattctactactccctgtctttgcctgtcgactatttgtataaataagtttaccgtgtagattcaagatcgtcaagatactaagcgccctttttcttagcttagccagttctctctcttcttaatcaccccatccgctttcgcacatagactatttgtaacgacagatgaaaacaaaggggaaaacactatgaaaaaacgttttgggggaatgaatcgctaccagctcccgccagctgtttataaattcagggatatttgcgctcaatttgtaccgccgtttattgtatttcaaacgattcgaacgattctttttccaacttcagtcgatgtgcttatcctcattattcttgttgcattagaagtgtgtttttattttgaatggatctagaatgactgcagcacattatggattccattcatcacttctatttttttcgtaaataagcggacatgcttaatatgcggccagctttgtctgttttcattaaagaggagcacactattaaaaacaggctcgggaaaatacaaatagcttgcaagaagctctttctcttcttcaaataatgaaaattgcgtttcatatcgagtgatatgcgctgttgtagtagcagggttaaattgaaatgggtgaacagaggaacgaataaaataggccagatcacgaacaggcgtatcgacaacagacctttcaaaattaataaagtacccctttccaccattcatgacatagtgtgaaggcgaacatttcccatgacaaaaaacactacgatatcgttttgcttcaacaacctgttcataccaatttcccaatcttgttttagccagatcacagtacttcattaactgatgaaaatgagtgacaaacgttagttcaaagggtgagaggtagatacgcttttcaattgagttaacgtatttctccatttcaaactgtctgctttctctcattaagatcatcttttgatacgattgtttgatgacttcttcagagaatgcttgatctctcgctgtatatccatgaagttctgcaagattcagaattaatttctcctctttttgagcagagtgcccttcgccaccgtcgacccatggagttaaataagctacacctccacctgtaaaaacaaaggagtcaccgtattttgttcgaacgagcggcacaaaactttcaaaatgaagctgtttaaatcgatcctcaatggagaatatacgatccatctgttctttacttagctttgtttcctttaaggcaaatgttcctcgatccgtttcaacctttgttactttccccattcttacgacacgttcaggatataaatcatattgaaatagaactgctggatcactcaataaccgaaaccctcccctccgaaatggagagctgtaccgaacaggttatctttctcatcgcttcccacttttcaaaaaattcctccatcacttgattcacattgacaccttcatactgaagtgattgaatacacgaccaccagtcccaaggagcgataatcgtttgaataagaaggttactcgtttccctatccacctcattgataaaagctttaaagcattgtttaaactcttcacctttcttttcataccacacatgcatcgctttagggagtacttcatacacgggaataggcacttcatcactactttcaaagtagaattggcccattacttcttttatagaatgatgtgaaattggaatggataactgtgaaatgcttttattatgactaaggcgttttttcacttctggaattaaactaataaggagtaaatagggctctggatatagcgccttgattgtacctagcgcttttaccgtctctcggtaaggaaatgttgcaaatccacgataattgttcacatctacactcacacctattaaagaggagagaagatatccttccatttcagggaactgatcgaatgcaaactcatcttcaaccgaatcatgaactgacagatatccttggtgtatcggaataaacgcctcttgattaatcgttcgaatcatacgattacatagaatgccacatttagaaaaaagacggtcgcggaagttgagatgatactcaagcaaatcccgctcccgccagtatgataacttccgcttacccaaatgtgtcatgatgacttcgggttttcgaacccaacttacttctttaaatccatatttttcagctatgagcactaataaatccatctttattactccttttcacaccaccaataacaattgattcattagctgtcaggcaagcgaatttaccgattcactggtatatataagatctgcccttcctttacctcttcttcttcaagacggttcacgcgagcaaggtgacttggaagaacacgatagcgttctgcaatttcagttaatgaatcaccaggttggatgatacacattttcattttcgaaaattgctcttcttcttttgttaacatactcgttaaataaagggcattttcttcacgaggtgtttgtttcttttgttcaagtatctcctcctcatcataatcgttgtattcattttgaggagagcgcatttcttctacaataggctgattgttatattcagttgatccttccaattggcgagccatgcgtgttaaaaagtcatacgtcggttccaggaattcctcattttcttcaacttctgcacttgtctttgaataatcaacttcatccgaatcagattgtgctcgcatatctacttgaggggaacgtaaatgagaggtctgttcaagtgattcttcctcatgatcgacgtatttaatatcattctcccaaacactttcctcttcttgactcaattcactttcgtcttcttccacctcatcgacctctatttctacacgattttgatcaccctggatcccactaatggatatgtcagctttcaactgaaggcaattctcctccactatcgtgtagtcaaacgtatctaccgtaacaaatatatcttctagacttctaatacgacttgcaggaatcgtaatatctaccggaaaccggtgtcccatcgacgccgtaccatcttctcttacatgaacttcatgaattgagcgatagggagatccctcactgatatcttcatgacctgtttgatcacgctgcaaatattctcccgttaaatataaacagcctttcacagctacataatcttcatactcttcaatcgaaatttcaggatcaagtgaaatagatagaacctcttcaacttcctgtcctttctttaaccagacctgctcctctacggagaaatgcaaatatgagccttcaggcatgctttctcctcctttcaaacattatccatacattacacatgtatgagtaattcacaggattatgtctaatttgaataagattgagaaagttccctctgtctcctcaatcaaaaaagctactggcaaatgccagtagctttggattaaacaagctttgagaaagccgcttctgcagcagcaattgtttcatcgatgtcgtgctcagtatgagcagttgaaagaaacattccttcaaattgagatgggggtagtgaaattccttgtgcaagcatttctttaaaatagtttgtaaagtgttcaaggttagaagaagatgctgtttcaaagttaataacatcctcgttcgtaaagaagaagccaaccatcgaccccgcacgattaacggtatgagggatattgtattttgctgcagcttttgaaagcccttttccaagtcgctctgctttacgttcgaaatcctggtagctttctggtgtgagttgcgaaagtgtttcatatcctgctgtcatcgcaagtggatttccactaagtgtacccgcttgatagatcggaccgcttggagcaatttgctccatgatttcctttttaccaccataggcaccaaccggtaagcctccaccaattactttcccaagacaagttaaatcaggcgtaacattatagtacccttgggcacagttgtaacctacgcggaatccagtcataacttcatcaaaaataagaagcgttccattatcctctgtgatcttacgaatttcttcaaggtatccctgctgaggtggcacaacacccatgttgcccgctacaggctcgatgataacgccagcgatatcatctccgaactcctcgaacgcataacgaaggctttcgagatcattatatggtactgtaatggtgtttttagcaatgccttcaggtacgcctggactatccggaaggcctagggtggcgacgccagacccagctttaattagcaaggagtcaccgtgaccatgatagcatccttcaaacttaagtattttattgcgacctgtgtaacctctagctaaacgcaacgcactcatcgtagcttccgttcccgagtttaccatacgtacgatctcaattgatggcactcgttcaatcacaagctcagcaagttttgtttcatactgactaggtgctccaaaactcgtaccaagctccgttacctctttaagccgatcaacaacctgctcatcagcatggccaagaatgagcggaccataggaaagtacatagtcgatgtattcgttttgatcgatgtcataaattttagagccttttcctttttccataaaaatcggatccataccaactgacttaaaagcccttactggactgttcacgccacctggcattactttagatgcttccttaaatgcttctttggaacgttcataattacccatttaatagtccctctctttcaattctattgatttagccagcgagcagcgtctttcgcaaagtaagtaatgattaagtctgcgcctgcacgcttcatgcttgttaatttctcaagaaccacttcttcttcattcagccacccattttgacttgcggcttttatcatggaatattccccgctaacgttataggcaaccattggaagtgggaagcggtcttttagttcgcgaatgatatcaagataagaaagggccggttttaccattaagaaatcagcgccttcttcaatgtcactctctgcttctcgaatggcttcgagtcgattagctggatccatttgatacgttttgcgatcaccaaactctggcgtactgtgagcagcatcacgaaatggaccataaaaggcagatgagaatttcacagcatagctcataataggaacatcaacaaaacctgcttcatcaaggccatgacgaatggccgctacgaaaccatccatcatgttcgatggcgcaatcatatcagctcctgctttagcttgagaaatcgctgttttagtaagtagttcaagagattcatcattttgtacgtaaccattctcaatcacgccacagtgcccgtgatctgtatattgacacaagcatgtatctgcaataacagttaactcaggaaactcatctttaatttgcgcaattgctttttggacaatccccgtatcacagtaagcctctgaaccaacggcatctttatggtttggaacaccaaacatcataatggatttaataccaagatcaactacttcacgcacttcttcattcaaccggtctaatgaatagtgataaacacctggcatagaaggaatttctcttttcacattttcttcttcaactgcaaaaatcggatagataaaatcctctttatgtaaatacgtttctcttacgagggatctcattgattcagaacgtcttaatcgacggtgacgatgaaagtttgctgtttccattatcatttcctcctatttattaaaaaatcgctcaaggctttcaagcattccttcaatggtatattggtcaggcacgacttggggtacgatgccgtatgatcgtagcgttttctcagtaatcgggccaattaccactattgtgatgcctatgaggtgatctttcaaattgtctgcatcgagaagctgtacaaaatgatgaactgttgacgaagaggtgaacgttatgacatcacaatctttgttatgaacgatcttttttaatgctgctttcgactcaaacggaataactgtatcgtagattggtaaatcggttacatcataccctaacttgcttaattgcccaggtaataccgctcgaccaagattccctcttggtagcagtattttctcattaggctcagcttgctttgccagagcggcaactagtccttcagccacaaaatcatttggcataagatcaatttgaattccgtaccgcttcagggcttttgctgttttacttccaaccgcgccaacttttataccttttggaatattcgcctgcttcaagaaaaaacgtacgccattggcactcgtaaataagagccagctaaattcacttaattcaatcgaatttagcaattgattacggggttggaacgaaataagagggatttcaatcgaaatcccctctctttcttcaattaatttcgtaaatgtcgctgcctgctccctagctctcgtgaccattacacgctttcctgagagcggagaactcattgatctaattcctctttcacacgatcaaggatatctttagcaccctgttccttcattcgattcgcaagcatatttcctacttgtataggatcactacccatttccatttctttaataataacagatccatccggttctccaacaaggcccgtaacagttactttgtcaccatttagagtcgcatgacctgcaattggaacctgacaacctccttcaagtgtatgaaggaaagctcgttctgctaatactgtcctcgttgtttcttgatcgctaaatttctcaagaatcgcttttaactcatcatcgctctctcgacactcgatggagagtgctccctgcccaacagccggaacgcataagtcaggatcaaggtactctgttacaatttcttttgaccaacccatgcgatgtagacctgcagcggctagcacaatcgcatcgtaatcttcgtcttttaatttacggatacgcgtgtcaatatttccgcgaatccacttaatttcaacatcaggacgtatcgcttttaactgtgccccgcgtcttagactacttgtaccaataacagcaccctcaggtagttctctaaatgttttttttgattcagatataatgacatctcgatgatcttcacgttctggaatacagccaatcataagaccatctggaagaacagaaggcatatctttcatactatgaacagccatatcgatatcaccgtttaacatcgcgtcttcaatttccttaacaaataatccttttcctccaactttggaaagggtaacgtccaggattttgtcaccacgagtgacgatctcttttatttcaaaatctacgccggggtttaactcctttaacttactgatcacccacttcgtttgagtaatcgctaatttacttcttcttgagcctacgacaattttacgcatggttactcctccaacctgttctcccttatacataccagaaatgaaattctgacaatgttccagaaaggaagacattaattaatacgataagaaacgcagcaacgttccataacgcgagggaacgcccctccatctctctagccactttttgatataaataagtactataggcgcctagtacaaaaaacgaaataattactttagcatcgaacaagctaaattggtctacctttaagattgcccaaacaattcctaatataagacttagtaatagaagtggaacgccgagaacgctacataaataggaaagcttctcaagctgggatagatcgccaaaccttcttaatcgtttattccatttttttctcttcaacatctggtaaagaatcaaatacatgattgaaaaaataaacgaaagcgaaaatgccccatatgataaaaaagccatcgtaatgtgaataatcgacagctcagacatcaattgttccgtgagcaaacttgaagcctgctctctagtggcaaataaattgatagccataatgctgaaaccgagtacatttgcaaaaaagacaaaaaaatcgactcgaaaaaaccagttaatcaagagcgatagcgatacaatcacccatgcataaaaaaataacccctcaaaaggtgttaaaatcgggaaaccgccaatttcaataatctgcgttacaagaaacgcactttgcagcacccaaacaatagaaagcaaccagaaagcaaactgatttactttccggctgttttgcaagaaatcaataaaataacccagtacactaagggcataaagcaaaatggttatatcataaagccagctggcgttggtcacaaatcatgtctcctctcctaggagcgcaactgcgatgcctgtaataaaggggagtagtcaacggattcatgctgtcttttttcttcgttttctttcactcgctgcttatgaagttctctctcaatttcttcttcaatcgcaaagattttcgtgaagatctcaagcgactcctctgcatttggctctgcagccatctccttcacacgaacaatgggatcacgtagcagctggttcactatacttttcgtatgtttacttaatacttttcgttctcgatccgttaagttaggcaatttacgttcaatactattcattgtttctgcttgaatcgcaagtgccttcgtacgtaaagctgtaatcatcggtacaacgccgagtgtattaagccactctctaaattgaacaagatcttcttcaatcattagttcaattttctctgcttctttcttacgttctgcaatgtttgtttcaacaattccttctagatcgtcaatatcgtacaagaaaacggagtccatattattaagggatggatctagatctctcggaacagcaatatcgaccataaacaatggacgacctctacgctttttgagaagcggtcttacattttgctccgttaaaacatagtttgtagatccagttgaactgattagaatgtctgcatcagcaagcgcagtttctacttcatccatagaacgagcctgtcctttaaaacgagaagcaagctctgttgctttctcaagcgtacgattcacgactgttacttgatctacgccgttactttgcaagttcttagcagtaagctcacccattttgcctgcgccaagaatgacaacgtgtttattttgaagcccaccaaaaatcttcttcgctaactcaactgcagcatagctgaccgaaacggcgttttctccaatttcggtttcagaatgggaccgtttagcaagagtaatcgcctgcttaaagagctgattaaaaattgttcctgttgtctctgagtgctgagcaagcaagaaagcatcgcgaacttgtccaagtatttgcgtttccccgatgacaagcgaatcaagtccagatgctacacgataaaggtgttctgtcgccgcatcgctttcgcgaatcactagatatggtgaaaattcttctttatcaattccgaaccattcagatagaaaagcttttgaataatatctccctgtatgaagctgatcagcaacaacatataactctgtacggttacatgttgataagatcaccgcttctagaatacttttagagtgacgcaacttatctaatgcttcaggcaaatcattctcctgaaaggaaagtttctctcgtatttccacaggggctgttttgtggttcaaccctacgaccaggatgtgcatcgttccacccccaaaaaattgttaaccaaacctaatcttttgctatcatctattaccattataacatgtgacaaattgcacagagttatgaaatgtgaacagactatgaaagcaattatgatatgatgaataaagaattatctctgcatattattagtaatcatacaactattaatgtaccagaaaatcaaatgtatagcaaaacttgtgtatctctttcaactaggaggattttcattgaaacgtcaaagtatttttccgggagttttatttattggaatcggactttattatttatttcaaacgctaaaccttcccttttcagatcatctcatgaattggcaagttattttaattgtgataggtcttgccatgatcattcaaggttctattgcaaaagaagggaatatgctttttccgggaattttgctccttgggcttggtgtacatttctattttgtcactaaaatcgccgtttggcctgatagctggggaatgtatacactgatcctgagtgcagcttatctggttacatactataaaacaaaaaaaagcggtctgatccccgggttactattacttgccctttccattattgaacttctttattctggtttagaactctggctcaactctaccttttcctttgtaggcaagttttggccgcttgctttaattgctataggaatttaccttgtctcgaaaaaaaagtaaggagcacacgctccttacttttttctatctcaacatttcaagttataaaatagaacttaaaaagtcctgcgttctctgttcctttggttcattaaataactcactagggtggcctttctctacgatttttccatcatgcatgtagacgacccaatctcctacctctcgagcaaaacccatctcatgcgtgacaacaaccatcgtcattccctcttttgctagttctttcatagtagatagaacttctcccactaactcaggatcaagcgctgatgtcggctcgtcaaacaacataatatcaggcttcatggcaagcgctcgtgcaatggcaactctctgcttctgaccgccggaaagtttgttaggatagacgttcgctttatctccaagacctacttttgcaaggagttcctttccttctttctccgcttcggcccgctttatttttttcaccattaatggagcttcaatgacattctctaaaaccgatttatgaggaaaaaggttaaaatgttgaaacaccatgccgacgcgctgcctgactttatttaaatcatttttttgagggtcaatcgtttcgccttcaataataacgtttccgctatttttgatctcaagaaaattcatgcaccgaagcagtgtactcttaccagagccactggcgccaataagcacaacaacgtcgctttcatttacttcaagatcaatatcctttaggacgtgaagatctccaaatgatttgttcaatttctctactcgaatcatttctgctttttctaccatcgacagcacctctctctttcttaatcactagcagataatcgtttttcaaggagattaacaagaagcgtgaagattaaaacaaggactagatagtatacagctacaatgagtaaatacgtcatctcatcaaacgttcttgccccctgtgtagtcgcgacgctaaacaattctggaagggctataaatgctgctagtgaggaatctttcaacccaatgataaattggttaccaagaggtggcaacgctcttctaaaagcctgtggaagaataatacgtcgcatcgcaagtgtatgactcattccaagagagcgcccagcctccatctgacctttgtcaatggattgaatggacccacgaaagatctctgcaatataagccccgttatgtagggcaagtccaattgaagcagcccagaatttcgggatattaaactcggttaaaccaaaatagaagatgaaaatttgaacaattagcggcgtgcctcgaataacagcaatgtacacatttgcaatccaatttaatatctttgattgtgaaattttaaataaagcaaaaaacaaaccaataaaaacagctattaaaacagatacgaaggtaacccgaatcgtaagccagagtccttcaaagaataccggatagctctctaatagcgtttcaaaaaaatgagcaaaagttggcaagtgcgatcagctccttagaattcagtaacattacaggtaaaaaaggaatgcgcgcaccgcacacattcctcattcttactcactttcaggattctgggtgatgtcgactccgatgtattcctcgctaagttttgttaacgttccgtcttcttttaactcttctaacgctttgttaactgcctcaagaagatttgagttttctttcttaatcgcaacagcttgttcacttgttcctagctgctctaatttctcaatctcaaaaccttcttccattgcctgcttgcctgtaatatcatctgttatgaccgcatcatgctttccttcacttagggcacgtaacgcagtttggtcactatcataattggaaattttatcagtgtattcctgtgctgatttctcataagttgaaccttttgagacagctacatctttgtcttcaaggtcttctaaactctgaatttcacttccaggttgaacataaagaacaggtcctgaataatagtatggctcactaaaattcacggcttccttacgctcatcagtaatcgtatgacttgcaaccgctgcgtcataacgaccagactgaatagcggataccataccactaaatttaaatttttcaaccgcgggttcaagatcaagtttttccgcaatggctttacctacagcaacgtcaaatccatcaagatcaccatttgcatcaactgtactaaatggaggaaactctcctgatacaacatagctgaatttgccatcttccgttaattccagaccgtcgtctccttcagaactagatgatccactactctcttcattccctccacacgctgttaaaacgagtacaaacattaacattagagccgtgagaaaactccattttcttttcatcatcacatgtcccccttatacgacttttcttttatgcagttaggattatgtaaactgcgttattcctataatatcaatatttagacatttctttcaattctgactcatggtgcttacacctcctattttggtctaagctctgataacacgcaaagagcttgcgcattcttctgtttcctctattttattcccattccctttctaatcagtttaaaaacatattcttcttaataatcagaaaatgcactcataagaaaaacccggtcctttgaccgggtttgaaaactataaataagattttattgcattccaaacatcttcttttccctgtccagtatgagaagaaaatgtaacgagtcgatccgtcggttcaatttttaatgtctggctcacaacttttaaatgtttttgccatttccctttagggattttatccgattttgtcgcaacgacaatcacgggaatttcgtagtgctttaaccaatcgtacatcaccacgtcgtcatttgatggggcatggcgtaaatctacgatttggatgactgcttttaactgatcacgatcagttaaataggtttctatcattttcccccaggcatctctttcttttttagaaaccttagcgaatccgtaaccgggaacatcaacaaaatacaatcgctcattaataaggtaaaaattaagcgtctgggttttcccaggcctttgagatgttctagcaaggttcttacgattaatcagtgtattaataagcgaagatttccccacgttggatcgtccggctaagccaatctctggcaagccttctactgggtactgctctggtttaacagcactgataataaaatctgattttgttactttcatttgttctcccccacaagtgcggtttttaacacttcgtccagatgtgacactggaaggaatgttaaatctttgcgaatgctttctggaatatcatccagatctttctcattttctttaggcattataattgttgttaatccagcgcgatgagcacttagcgacttttccttcagtccaccgattggaagaactcgtcctcgaagcgtaatttctccagtcatccctacgtctcttcgaactgccttacctgttaatgcagatacaagggctgtagcgattgtaattcctgcagaaggaccatctttaggcgtagcaccttctggaacatggatgtgaatatcgtttgtttcatggaatgttggatcaatcgagagctcttcggatttcgagcgaatgtagctgaacgcagcctgtgctgattccttcatcacatcccctagcttccctgttaagatcaatttgccttttcctggcgatagagatacttcaattgctaacgtatctcctcccgctgttgtataagcgagccctgtcgctgtaccaacttgatcttctttctcagcttcaccataacggaatttcggatgacctagcaactcttccagcattgtttcagtaacaatgactcgttttttcttccctgatacaattatttttgtagctttccgacaaaccgttgcgatttggcgttctaggttacgcaccccagcttctcgtgtataatgacgaacaagcttataaagactctcttctctaatttggagattaccttttttcaacccgtgatcttcaagctgcctagggacaaggtaatttttagcaatgttcactttctcaatttcagtgtatcctgcaatttgaatcacttccattcgatcaagaagtggctcaggaatcgttgaaagattattcgctgttgtcacaaacatcactttcgaaaggtcatacggttcttcgatatagtggtcactaaacgtattattttgctgcggatccaatacttccaataatgctgaagatggatcaccacggaaatcattcgacattttgtcgatttcatccaataggaagaccggattgacagtacccgcttttttcatcccacggataatacgaccaggcatcgcaccaacgtaagttctacgatgtccacgaatttctgcttcatcacgtacaccaccgagagaaattcgaacaaactcacggccaattgaccgtgcaacagatcttgcaagtgacgttttcccaactcctggtggtccaacgagacaaagaatcggtccttttaacgactgtgtaagctgttgaacggcaaggtattcgagcactctttctttcactttctcgagaccataatggtcctcatcaagaattttttcggcatgattaatgtcaaggttatctgttgtctcattggaccagggcacttgtattaaccaatcgatgtaattccgaatcacagaactttcggcggagctttgtggaattttttcataacgatctagctctttatacgccatttcctgaacgttttcaggcatattggcttcctcgatcttttcctttaaagtagcgatttcaccagttttgccttctttttcaccaagttctttttgaatagccttcatttgttcacgaaggtagtactctttttgcgttttttccattgagcgcttcactcgctggccaattttcttttcaagatcaataacgtctttttcattttgaagaatttcgatcaacttattcaatcgttcatgggaactatacgtttcgagaatttcttgtttttggcgaatctttaaagagaggtgagaagcaatgatatcagctaatcgcccaggctgttcaatatcactcactgaggcaaaagtttccgccgtcaccttttttgaaactttaatgtattgttcaaacaaatcaagcactgtgcgcattaacgcttcctcttccacattcatatcagcactttcatcgatttgttcgatctcaacttcgtaaaattcttctgtatctttaaactcaacaatcttgcctcgctgaagtccttcaacgagtacacgaattgtaccatttggtaatttcaacatttgctttacagtagcaagcgttccaatctcataaatatcatttacttcaggtgtttcaatctccacctctttttgtgtagacagaaaaatcttttgatcatccatcatgaccttttcaagcgcttgaaccgacttatcccggcctacatcgagatgaagaaccattgagggataaacaagcaaccctcttaaaggtagcaatggtaatgttttatgttcatttttcaatcatggcacctccagacaacaaactataaaaacgttatgaaaataagttttgatccgagcttatactattgataagttgtacttcattgtatcctaagtttcttctacttgtctaatcatccctgctcaaactttaaaaaaacttacacccatagaaaactcactttgtaaaaatagtagcaattgcttcctggaaatgaaaaccgtttagacaattcgatggttaaagcgttacataggaaactggacgaatcactattgcaaaaaagaaaatccccgcccgttaacttcctggctgggattttccaataacgacggaagggaattcttgggattttccagttgcaaatgctgcatcaaacacttccgagagatgtgtaacggctacaactttaatgcctttaattatttgcaacatttcttcatcgttttctttcggaataagcgctagttcagctccggcatcacgcgcagccgtaacttttgcaaaaacaccgcctactggcttaacaaatccatgaatactaatttcgcccgtcatcgcaattttattactaactggagttcctttaattgctgagtagatccctgttgcaatggctacaccagctgatggaccatctacaggcactcctccaggaaaattaatatgtaactgataagcgtcaacaggaatgcccatggactttaatacagtcatcacattttctacggaagatttggctaaactttttcttcgtatggactttgattgattcccgatgctttcttcttctacaattcctgtaatggtaacggaaccttctttatctaattttcctttaactgccgtgacctcaatctcaagtaacgcaccagtattaggtccataaaccgctagcccgtttacgacccctactgccggataaagcggaacttttctttcaggtcgaggcgtaaggcgactcgcatggacgacccattccatgtcggtagccgttatcctatcacggttttctgtaatggctagtccagctgcaatttgcattaaattaactgcttcgcgtccattccttgcataacgacttactcgttcaatgccgtcctcatcaagagttaaatttagctttttggctgctctggttgcaattcgtgcaatttcatcctgacttaactcacgaaaatatacttccatacaccttgaacgaatagcaggaggaatgtcgtcaggtgttcttgttgtagctccgatcatcctaaaatctgccggtagtccgttttgaaagatatcgtgtatgtgattcggaattgttgtgttttcttcattataataagcactctcaagatatactttacgatcctcaagcaccttcaatagcttattcatttggatcggatgaagctctcctatttcgtcaataaagagaataccgccatgcgcattcgtaactgctccttgctttggctgagggatacccgcttgtcccatcgctccagcaccttgataaatagggtcatgaacagaaccgattaatggatctgctatccctctctcatcaaacctcgccgtcgttgcatccaactctacaaatacggcggactgtttaaaaggcgttccccgattacgtttcgcttcttcaagtacaagtcgtgctgctgccgtctttcctactcctggggggccatatatgattacgtgctgtggattcggcccacagatcgctgcccttaacgtacgaattccttcttcctgaccaacgatttctgaaaagcctgtagggcgaatacgctctgataacggttcgcttaaagagatgcttctcaatcgacgtaaatgctccatttcttttcgtgattctttatctatagaaaccttttgagttcgctgattacgaagtaaattccagaaatacaatcctataacaatcccaaaaaacaattgtatcgctagtgctatccctgtccaattcatactcctacctcctgatgattgatcaatagcactagtatctcctgagcattggttccataaaccggaaaataacaaaatgactagccgaaagtcagcatatttaagaaccgatccactaagtgtaagaccgagaaggatatagcgttaattagagaggagctatacatacaaaaaaccaaccacactttagtggttggtttttagattaagcactttcttttggcgatttcttatcttcatcgatcactgaaccatcttcaaggattaattttggtgtcgttttttcgcttactgtagaagcagataatacgcactttttaatttcatcacgtgaaggaagatcatacatgacatcaagcatgatgccttcaataatggaacgaagtccacgcgcacctgttttacgttcaattgcctgtttcgcaatttcaacaagtgcatcatcttcgaattcaagttcaacatcatcaagttcaagaagcttttgatattgtttaacaagcgcattcttaggtttagtaagaatttcaacaagtgcttcttcatcaagtggctcaaggcttccaataacaggaagacggccgatgaattcaggaataagtccaaagcgaagtaaatcttctggaaggactttacctagatattcacccggtttaagatcctcttgtttcgcttcaccactaaatccgataatcttcttaccaagacgacgcttgataatttgctcaattccgtcaaatgccccaccacaaataaagagaatatttgttgtatcaatttgaataaattcttgatgtggatgttttcggccaccctgtggaggtacgctagctgttgtaccttcaagaattttaagaagcgcctgttgaacaccttcaccagatacatcacgcgtaatcgacggattttccgacttacgagctaccttatcaatttcatcgatgtagataattcctttttcggctttctccacatcgtaatccgcagcttgaattagcttaagaagaatgttctcaacgtcctcaccaacataaccagcttctgttaacgacgtagcgtctgcaatagcaaaaggtacgtttagaattctagcaagcgtttgtgcaagtagtgtcttaccactaccggttggtccgataagagcaatgttacttttcgccaactccacatcatcaggtttcgaggatgcattgattcgcttatagtgattgtaaactgctactgataatgactttttagctttctcttgtccaatgacatagtcatcaagaatttggcaaatttcatgaggtttcggtacttctttgaaatccacctcttcttcagttccaagctcttcttcaacgatttcagtgcaaagttcaatacactcatcacagatataaacacctggtcctgcaactaacttacggacttgatcctgtgttttaccacagaaagaacacttaagttgtcctttttcatcgttaaatttaaacatgaattcacccctaacctttgatctcgatgaaacccgagtaggtctatctggaaaaggaactccgtctgttcatttgaactccgattacaaaaagcaatcataacggttatccaccactggtttctcatcctatttatgtactgaaattgtatcatataacgcaaaaggatacgaagtaaaacgactctttatagcttattatgtatcgagtgattgtcttactactatgtttagcaacttcgtgtcatttcattactacttctttttgtaaaaacaaggcgcaattaagcgccttgttcaaaataagccagtctattagcttgaattatgcttttttgctgttatctacaagaacatcgattgctttacgaatgcgtaggtcacctttaagtgcatcagtgccaccttgcatcgttaacatagaacgaatttgttcttcttccatgttgtacattgcagccatcttcgaaagttcttcgtttacttcttcttcagaaacttccacgttttcagcatctgcaattgcttcaagcgttaagtttgtgcgcacgcgcttttcagcgtcttcttgcatttgttcgcgaagtgctttctcatcttgtccagagaactggtagtacatttcaaggttcataccttgttgctgtagacgctgctcaaattcttgaagcatacgatctacttctgcatctaccattgcagatggaagatcaatttcactgttttcagcagctttttcaatcaacgagtctttcttttgaacgtcagcatcttctgctttttgtttttcaagattttctttcgttgttttcttaagctcatcaagcgtttcaacttcttcatttacatctttagcgaactcatcatcaagctctggaagctccttgcgcttaatgtcatgaatcttcactttaaaagtagcttcttgtccagcaagattttcagcatggtactcttcagggaaagttactttaacttccttctcagcgccagctttctcaccaatcaattgctcttcaaaaccagggatgaaagtgttagagccaacttctagtgaatagttatcgccttttccaccttcaaatggttcttcaccaaggaaaccttcgaagtcgatgacagcagtatcgccttcttttagctcgccatcttcaactactacaagctcagcttgtttttcttgaagagatttaagctctgcttctacttcttcatctgtaacgtttgtatcttgttcttcaacttcaagacctttgtattcgccaagttttacttcaggcttaacggttacagttgctttaaagatcaagttttgacctttttccatttgctcaacgtcaacttcaggacggtcaactggttcgatgccagattcgtcaattgcttctgaataagctttaggaagaataatatcaagagcatcttgataaagagattctacaccaaaacgtttttcaaaaagagaacgtggcatttttcctttacggaatccaggaacgttaacctgttttacaacctttttgaatgcttcatcaagcgcattatttacctcagcagcgtctacctcaacagtaaggacgccctggttaccttcaagcttttcccaatttgcagtcatttacacattacctccaacaataaatatatttccactaatcgagcgtttaaaaaagatgacgccttttggagtataaaagcgtctactgtcttttaaacggtctcttttactagtaaatatgggtttgcaactattgtattataacatagaacagccagttttcaacacatacggcgtgaatgaaaaccgtttagccatagtacagcttaacgataatgacgcgttagcgcaagtaaaaccatttcgtttccatgtattactattcgaaaggccgataaaagggttgattctcaatattcatgattcgattcgcagccacttcaaactcggacggctttacttcgtaatacatacgtagatcttcatttgttacgtcttcaccattcatttcagatgcaaccttatggacagcagctgcccacaccgaactatttgaaggctctgcttcaaatggagagatggcaaataaatagtgccaccaaatctgcatgcacatttcaaatagtgctggatttccctgttcgacaacatcagagagcttagatttcacacttaaagagaaatcttgtaaaaagatatcctgtaatgtagctggattcaccttgatctctcttccaaacttatgtacgacaacttcttgatccaattccttttctctcaatacttgtaagacaagacttttcagaagtggatccttgtttgttgcatttaaatatgtaagatatacggggagagacttttgttcatccacagtgcttaatttctgaatggctaaccactgtttttccgtcttatcgctctcaagataatcaatgagcttatcaacatcttcctcgtgaccagcatcataatcagcctcagaatcaaggtcataactcgtcatttgtctgctaaaatgtagcagctggtagagcgactccgcaatgttagacggaagttgattttcttgtaatactgcttcgatcatcgtaactactttctgatactttccaagctgaactaaaattgatatgtatacttgaaaaatgtcgtaatagtccccgatcccctgctgcatcattgtttcgcagcgttctgacgcttcactcaagtcgccaatctccaccaggcttaaaaccattccaaaatgcccctgtggatgttccggctcgatttcaagcagctgactaaaatgttcatgcgctttttttatttctttagctttaagtgctgccattcctttttcgacaagcttacctgccacatttggaaaataaactattttcctttcatccttatctttatccatgacgtaatcgctccactctcttatattctctattaaaagagtttacagcaggaaaggcgcagctacgattagatatcagtttatcagtatccacctgtaaactcaagctgaagcacgctaccggaatctgaaatccttttatctgtttattcatgactgctgtaaaagctaattaacgatataagatatacaatacaaaaaaagccattctatcacgaaggataaatgcctttacagaaaacatattatggtgtcccaggcaggattcgaacctgcgacccacagcttagaaggctgttgctctatcctgctgagctactgggacattgttagtataaaatgatttagtttctagcgacatttattaatatatcggattacattagtaaagtcaatagaaaacattagaaaaaaacacagcatgcgctgtgtttttttctattatgaaagaggaaacattgtggaaatttcctcaatcacttttccattttcatcatggaatgtcacttcaattgcatcactggtccactccacaatagcgtaagtttgaatagcgggttttctcggaagtttcacgctgcctggattaagaaaaagcgtaccttcttcgaatactgttaacacttcatgcgaatgaccaaagcaaactaaatctgcctgggcttcttttgctttatagtgcaatttcattaaggtcatttttacattatacaagtggccgtgcgtagcgaaaatagttttatttcccaccgtttgcactaactcatctggatagcggtcatcaaagtcacaattccctctgactcttacctggaacggaagcatctcctctgcatcataatcaaattcagagtccccacagtggatcatacattccacttcgtgcttatgtcgttctaccaggtggtgtaattcttcaccagagctatgattatcacttacaactagtactttcacattgcgccacctcttttcgttaaaataattccttaaacacctcttctaaacggtcgagtgcttgtcccctatgagaaatcgcatttttctcttcaggagaaagttcagccatcgttttatcataggaaggcacgtagaaaatcgggtcatagccaaaaccatagcttccagagcgttcaaacgtaatcatgccactgcacgttcccgaaaaaacttctgtattttgacctggtatcgctactgcaaggagacaatgaaaggaagcatttcgctgttccttaggaacatctttcatttccattaatactttatcaatgtttgcctcatcatctttatcaggtcctgcataacgagcagaatacacgcctgggtctccatcaagcgcatcgataacaagtcccgagtcgtcagcaataacaggctggtttgttagcttcatgattgcttccgcttttaacactgcattttcagcgaacgtactacccgtttcagctacatccggagcgttttcaatgtcaagtaaagaaagaacgctcagctcatcagattcaaatctccgcttaaattcttttactttaccttcattttgcgtcgcaataagcagtttacgcatctgctgatgatgcctccttgatcttagtggcaaagtctccgattacttcagcttgtgtgttaattaattcttccacaccagtttttccaagtgcaagcatttcattaagttggttcatattaaacgttgcttcttcacctgtaccctgaagttcaacaaattctccgcttcctgtcataacaatattcatgtcaacttgagcagaagcatcttctttgtagcataaatctaataaagctgaaccattttggtcaatgccaactgatgtagctgcaaggaagttcgttaaaggcattttcttaatttgcttccgccccattgcttcttctaccgcaattgcaagagccacaaatgctcctgtaatggaggctgtacgtgttccaccatcggcttgaatcacatcacaatcaatccatatagtacgctcgccaagcgcttcaagattaaccacggtccgcagcgcccttccgattaaccgctgaatttccatcgtacgaccagccactttccctttacttgattcccttatgtttctctgctcagtcgcacgcggtaacatggcatattcagcagcaatccacccttttccctgtccacgcataaatggaggaactcgatcctcaatggaggcagagcagattacttttgtttcgcctactgtaattaaaactgaaccctctggatgttttatataatctctttcaatatgtaccgctcttaactcattttcttgacgcccgtcaactctcatattcgtcctcctattagcaaatcttcccttttctcataaacgatcatgtagtcatttacctctcttaataaacatgaaaagaggcagtatccctgcctctacatcctatcatattctattttaaaaacccactttgttaacgtcctccggtcttgaaaccggctcagatagagcgtttccagcttcatcaatcacttcaggatgaccatctacggttattgccacttctttaatatctgcttgttcagttaacgataaaacaagactatttaacatatcttgctgaagcaccatttcttcagatcctgttaaaatcgcttcattgaaatcaagtgttaacaaaccaccctcttcattagcacccaataatttgatatctttagaaaactgactaaataatccagattgcacaggaggcccttccattaaacctttcaatactcctcttacatcatcggaaacgccttccatccgcttcgttaccggtacataataggagtagtcttcattttgagccatgaagtagactgtaacgtcttcactattagagacatctacaacattgcccatctcatgatttataccattcgctctgcttacattttctccaattggcgtgccatttacgggcatttctgtttgatcataaccgttgatttggatcttcacgttctctacaccatcaaattgggtaagagtccatgtaactgcttcaagaatttgcttctcatttccagcagcatagtctttaaactcgtttgaaaaatcgacaactaacgttttatccacctgatcaattccctgaacaaccgtacctgcaggtaacactgctttaaacccgttaggtagcatttcagttactggaccatccaccacgagatattcaagcgcttgttttgcagcgctttctactgcagggagctgaaaactttgaggcactaccattccatttgcatcaagtagataaagctgacgagtcgtcatttcagtcacttcttcagaaggttcttcaccagttgcctcttctacctctccttccttagttgcgccagtttcattatcctccatctgctccccctcgttaacataatcgacctttggtggatcaatttccttcagtgacttttcaaaaccaaatccacagccagatatcgttagtatacatgaaagcaacaatagcgcgaatccaatcccgcgtaaacgcatagctatccctccccggatggtttgtactaccatttatacgagttatatttcaatttatacctgactgttgataataagttgtatagccatttggaaaggtaaaggtgtgaatgattcagatgttcgttatgaaactgagtgatcagggatgttttattaaagagcgtcatcatatacttttctataaaaaaactctaacccaaaatggattagagctcgatacgtttcacatttttcacaggatattctagccagtggctcgcaatccttgtaaaattatctattgatccagttgttagaaatgtatgtgaaggacggttatcaccagtatatagtagcgagctatattctaggataccacttacttcataggccgtttcatcacctgaacaaataatagtcgtttcttctcccatcaccgattggataaccggttctaacaatggataatgagtacacccgagaatcaatgtgtcaatccctttattaagtaggggggcaagggtatttctaacagtctggtaggtttctttactggatagattacccgtttcaacaagtgggacgaaaggtggacatgcgaggctttccaccttaacatcgtcatcaattgcttttagtgagtattcatacgccctgcttttaatcgtgccagctgtaccgataacccctatatacttattcgttgtttctttgatcgcacttcttgctccaggatggatcacgccccttactggtatattgagctcatcctgaatttcttttagaactactgctgtggcagtattgcatgcgataattaacattttaatttgatatttctcaagaagataatttgtcatttcccacgtaaactgcttcacttcagacgcagacctaggtccgtatggacaccttgctgtatcgcctaaataaacaatctcttcctttggtaattgacgcattatctcgcgagctaccgttaaaccgccaactccagaatcgataaccccaattggttttttcaaaacaattcgcctctctacttaccggtcctattcgttctttttcatttcgtcataaagcaaatgcaaactttcttccaatgctttgacttgatcacctgaaaatttctgtgtaatcttctccaaatagacctgtcttttatgaataacttttttgataatgtcatttcccttatcaagtatatgaattcgaacaacgcgacgatcgtgtgggtctttaactcgttttactagatccgtcttctccattcgatcgactagatccgtcgttgtgctacaagcaaggtacatcttatttgatagctcaccaatggttaaatctccatattcagaaagccattggagtgccaggaattgaggaggtgtaatggagaattcacttaaaagttcacgtccattttgcttaatgatacctgccaccattcgaagtgatttctctatatcaacaatcgaagctggttctctcgttaattcttcagacatttagtctcccccttatcttatcctatagtctattttgattgtaagcgccgtgaattgcaagaagagtgtgctttcatctacgtttacctatttaattcgttctaactcaacccaaacgctatgagacacgcgccaacttttttagtcccttaagaaaacgaattaaaacaaaaaaaagagctatagtttcctatagctctcccgttgcaaaatgttcttgtacataggtaaccacttcttcatttgttgcaagtgaaagaatgtgatcgatgtgcgaagaaatttcttcttttgatagcttcgtcatttgacttctagcaggcaaaattgacgttgcactcatgctgaattcatctaggccaagaccaagaagaatcggaatcgcaatttgatctccagccatttcaccacacataccagcccatttgccttctttatgagctgcgtcaataaccatcttaacaagtctaagaattgcagggttatatggttggtaaagataagagactttttgattcattcggtcagcagccatcgtatattgaataagatcattcgttccaacactaaagaagtcaacttctttagcaaaaacgtctgccatagcagcagttgctggaatttcaaccatcattccaatttcgatttcctctgaaacttggatcccttcaccaattagctcctctttaacagtaagaagcatttctttcgcctgacggaattcaccaacagttgcgatcatagggaacatcactttcaggtttccaaaaacactagcacgaagaagtgcacgaagctgcgtacggaaaatttctgtctcttccaagcaaagacgaattgcacggaacccaaggaaaggattcatttcttttggaagatttaagtaaggtagctctttatctccaccgatatcaagcgtacggatgacaacaggtttgccgtccattttctcaagaacttctttataagcgttgaactgctcttcttctgaaggcaattcgttacgccccatataaaggaattcagtacggtaaagaccaacaccttcgccgccattttcaagaacaccttttacgtcttcaggtgttccaatgtttgcagcaagctcaacatgtttttcatcttttgttgttgtaggctcattaacaagcttagcccactcttgctttttggcttcaaagtgttcttttttcttcgtatactgtgcgatttcttcaacagaaggatctacaatcacgttaccatcgattccatcaatgataaccatcttaccttccacatcttcagaagtaatcgtcttcgttccaacgacagctggaatttccattgaacgagccatgattgcagagtgagatgttctgccgccaatatcagtagcaaatcctttaacaaactgcttgtttaattgagcagtgtctgaaggtgttaagtcttcagcaagtacaatcacttcatctgtaatcgctccaggtgaagtaaacgtaacgccaagtaaatgagcaagtacgcgtttagatacgtcacgaatatcagcagcacgttctttcatgtactcgttatccatgttctcaaacatgctaataaacatatttgaaacgtcactcattgcactttcagcatttactttctcgttattcactttatctttaaccgcattcaacaactcaggatcagataaaacgagaagatgagcagcgaatatcgctgctttatcttctccgagctgttcattggcgtgattcttaataacttcaagttcttctttagcgagatgaacagctgcttcaaaacgttcgatttcagttccagcatcagtaattgaagttttttcaatttctagcgcagggttttcaagtacgaacgctttcgcaatagctattcccgcagaagcgccaattccagtcaactgatttgacattacttgcctagaccttcgttttccataacttcagtaagtcctgcaatcgcctcgtcagcatctgatccttctgctttgattgtgatttcagagttttgttgaataccaaggctcataacgcccatgatggatttcaagtttacagacttcccgttataatcaagtgttacgtcagagctatattgacccgctttgtttactagtgcagttgctggacgagcgtggattcctgattcgcttgttactgtgaaatttttctctgccattttaaattccctctttcaattgttatattttttattttgatattgtgataatatctttgtcttcccgagaaacagtgccttcttttgaaaggtcaatcgtctctccctcttcaaggtttgtgaacacaataggcgtgattgttgaggttgcattttctttaatataagcgagatcaactttcataagcttttggccctgcttaatttcatcaccttcgctaatgaatacttcgaaaccttcacctttgaggttaaccgtatcaattccaacgtgaattagaatttcacgaccattaacagactcaataccaattgcatgcttcgttgggaacacattcattattttgccatcaaccggtgcgacaatcaagccatctgttggttcaatcgcaaaaccgtcacccatcatcttaccagagaacacctgatcaggcacttccgtaattggcatgatttttccttctagaggagatattagatgatcttttcctttaacaccagaaggtttttcagacttttcttctttcttctggtcttgaagtggttttggtgttttcccactaatgatgtctcgaatctgaccttttagcccatcagattgtgtaccaaagattgcctgaatgttatttcctacttccataacacctgaagcaccaaggcgttttagacgttttttgtcaacttcacctttatctgccacagaaacacgtagtcgcgtaatacaagcatccaggttcgtgatattgctttcgccgccaagggcttgaagcacattgtatgctagcgcagtattttcttggccgtcgtctgcaatttcatcttcttcatcttcttcgcgtcctggcgtcattaagttaaacttacgaatcgcaaaacggaagccgaagtagtagattaaagcaaacactaatcctactggaataactaaccaccaggctgttctaccttgtagaactccgaatagaaggaagtcaataacaccaccggagaaagtcataccaattttaacatcaagtaatgccattgtcataaacgaaagtcctgcaaaaatagcatgaatcccgaaaagaactggtgcaacgaataggaatgagaactcaagtggctcagtaattcctgttaagaaagatgttagcgcagctgatcccataatacccgctacaaccgctttcttttccggtctagcttcatggtacattgcaagtgctgctgcaggaagcccaaacatcataaacgggaatttaccggtcatgaacgttccagctgtaagctcagcaccatcttttaattgttcaaagaaaatcttctgatctccacggattatctcaccagcagcatttgtatactgtccaaactcaaaccagaaaggtgagtagaaaatgtggtgaaggccgaatggaatcaatgaacgttcaatgacaccgaatacaaatgctgcaagagcaggattcgcatcaagcatgttgtgagaaaaggcatttaggcctgattgaattggcggccaaacaaaaatcatgatcacgccaagtatcaaagctgaaaccgccgtagcgattggaacaaaacgtttcccagcgaagaagccaagatattgaggaagttgaatattataataccgtttatacatataggaggcaagaataccgacgattattcctccgaatacccctgtttgaagagtaggtattcctaaaacattggcatatgatgcgctttcagctacttgatcagcagaaacaccttcaagcacgcccatcgtaatattcataacaaggaaaccaacaattgcggcaataccagcaactccgtctccatctgataacccaattgctaccccaaccgcaaatagtagagcaaggttagcgaatacaatcccaccagactcctccattactgtagcgagaagttgaaaccattctgcggacataaatggtaatttttcaagcaatgttgggttttgaaaagcattaccaaacccaagtagaagaccagcagcaggtaaaatcgccactggaagcattagtgctttaccaacgcgttgtaaaaccccgaaagcttgtttaaacatgtgttttcctccttttatttttcccccaaagaatttaaatataaaaaaggcatgagtgacggtatgacaattcaatcaggatatactataccccaatcagtttttgtcattccggtttcactcatgcctgatcgtatcagtaacacgttaccgttaagtattaagttatttaggagaaagcctttgcaagtgcattgttaagtaaactgcttctgcatcaggaaaattcgtacgaagttccttttgcattatcttaatcaacttccatgaaagattatagcacacaggatattcttctttcaacactttttctaaacgttcgtgagcttcaactggctgattcaattcacttcgttcaatcgcatgtctgagatgacgaacaagtcgtaaataatcaatcccagttcgatcaattccaagatagagtgagtcttcaatcacatgaaccaattgattgattaaagctgaatatttattaagctttccaacactacgatttgtaatggcgctatggatatgtagtgcaacaaagccgatttctccatctggaagagcgacatctagcttatgattaatgtgctggatcacttcttcagcaatcgtatattcttttggatacatcgtttgcgtttctaccaaaaaaggatatttcacatctaggccttgacgaagacgtttaatcgcaaaggaaagatgatccgttaatgacacatgaatatgttcatcaagttgagaatctaatttgtcttcaatcaaagatatcgaatcattcataatggcaataaaagattccggaacatttggtaccaataatttgtattgttcttgttcatgcttgtcgataagaacaaaatacttgtctacttttgattcatcgagcctttcgccctgtttctgattaaagccgatacctttcccagttaatactacctcagtattttggtcagaaatagcaataacgacgttgttattcagaatttttttaatttcaaatccaccattcatgttcaagttcccctcattaaaccggtttcatttgtgattatgaacgtactaatgatagtaaattacaggtattacgtcaatgagaaaacgttccaatcgatcgtcttccctccatcataaacgttttgggaatatttttcacctttgcagcttgtatttcttccccaagttattattcatgtctctatatttacaagcgcctctaaatctattagccttacttagttgttgaaaacatcgcacgaaaattcatctttaccgttattttagaatagtataataagggttcaacaaatcccttgaattaataggaaaaaccggctttattaaagccggttcaactaaatctctaactctcccagtcgaagcaattcaacaacagcctgagaacgcccctttactccaagcttttgcatcgtgttcgaaatgtggtttcgaactgttttttcactaataaacagttcttctgcaatttctcttgttgttttgtcttgaacaagtagttcgaaaacttctctttctcttttggttaatagtggctttggtcggtagtggttccctttcaacattccaccctcctcgatagggcaacaaagctacttcaactgaaatcatatagtccatacaatatatgaatttctatcatacgtgttacatctattcacattttcaaccagatatctttaataaaaccaatatgacaaccttcgctcttgttcatcatttcctgagaaatatcgtaagtaaaaggagaagcatacatccacaactatcttcatcaaaaaagatccccaaaaggggatcttttttagtgatcacttccaaagaagtttttaaatgtttggagtgaagtcgctcgattcattgcagcaatagaagttgttaatggaatgcccttcggacaggactgtacacagttttgcgagttaccgcagttggcgaggcccccatctcccattaaaccttcaagacgctcctctttattcattgcacctgttgggtgggcgttaaataagcgtacttgagatacagccgccgggccaataaattcggagcggctgtttacgttcggacatgcttcaagacaaacaccgcaagtcatacattttgatagctcataagcccactgacgcttattctccggcattcttggtcctggaccaagatcataagttccatcaattggaatccaagcttttactttcttaagcgcatcaaacattctacttcgatcgactgccaaatctcgcactacagggaatgttgtcattggagccaaacgaatcggctgttcaagctgatctaaaagagctgtacaagattggcgtggtttaccgttaatcaccatcgaacaagctccacaaacttcttcaagacaacccatttcccaaataactggagttgttttctcaccattcgcattaacaggattccgacgtatttccattaaagcagaaataacgttcatgttttgacgatatggaattgtaaacgtttcttcatacgacgcagactcagggccatcctgcctttttattttaagagtaacggttttcttttcactcatcatttattccccgctttcttcttagaataatcacgtttacgaggtgtaattaatgatgtatctacttcttcgtagtagaactctggtttgttgttaactgcatcgtatttcgccatagttgttttcaaccactcttcatcattacgttcagggaaatcaggcttgtaatgtgctccacgactttcattacgatttaaagcaccgattgtaatcactcgtgctaactgcaacatgtttgaaagctgtcgagtaaacgaagccccttgattactccatttggacgtatcattaatattgatgttctcgtaacgttccatcaattcttgaatcttttcatccgtttctttcaacttatcattattacgcactactgtaacgttggcagtcatccattcgccaagctctttatgaatttgataagcattttctgttccattcatcttcataatagcatcttgtttcgcttgctcttcttgttggtgtttctcaaatagagaagaagaaagatcttctacagttgattctagtccattaatgtagtcaactgcattcggacctgcaaccattccaccataaatagatgatagaagagagtttgctccaagacgattaccaccatgttgagagtagtcacattctccagctgcaaacaaccctggaatattcgtctgctgattaaaatcaacccatagtccacccattgaatagtgaacagctgggaatattttcataggtactttgcgtggatcatctcccatgaatttttcatagatttcaataataccgccaagtttaacatctagctctttcgaatctttgtgagaaagatcaaggtaaaccatgttttccccattaattccaagcttttgactaacacaaacatcgaagatttctcttgtcgcgatatcccgcggaacaaggttaccatacgccgggtacttttcttcaaggaaataccatggcttcccatctttataagtccatacgcgtccaccttcaccacgtgcagactcactcatgaggcgaagtttatcatcccctgggattgcagttggatgaatttgaataaattcaccatttgaataaatcgctccttgttgatagagcgctccagctgcagatccagtattaattactgagtttgtactcttaccgaaaataataccaggtccacctgtcgccataataaccgcatcagcttcaaaacttcggatttcagaagtcgttaaattttcaccaaccacaccgcgacaaacaccatcatcatcgagaatagctgataagaactcccatccttcatacttcgtaacaagtcctgctacttcatgacgacgcacttgttcatctagcgcatacagaagctgctgaccagtcgtagcacccgcaaacgcagtacggtgatgctgtgtaccaccaaagcggcggaaatcaagaagaccttcaggtgtacggttgaacataacacccattcgatccattaaatgaataatacctggtgccgcatcacacattgcttttacaggaggctgatttgcaagaaagtctcctccatagaccgtgtcatcaaaatgttcccagggagagtcaccttccccttttgtattaacggccccattaattccaccctgtgcacatacagagtgagatcgtttaactggaacgatggaaagtagatccacattcattccagcttcagcagctttgatggttgccatcaatcctgctaggccgcctccaactatcactaatttacctttactcataagaacggttcccccttaaatgctggctctgtctgaaaagttatgtatcagacgtggtgaagacagttcactttcttaaacaaatgcaaataatgcgcgcatgcctactactgaaagtgcaacgaaaataatcattgtgacatatgtcatcgcacgctgtgattttggtgttaccgtgaagccccagcttacgaagaatgaccataagccattggcaaagtggaagacagtacccagaacaccgacaatgtaaaagatcatcattgctggattcgataagatgtcagccatcatttgaaagttcacttctgctcccatagcggcctgtaatctcgtttgccagacgtgccatgtaacaaagattaatacgatcacgcctgagatccgctgcaagtaaaacatccagttacgcaaatagccatagcggcttacgttattcttggattgaaatgcgatataaacaccgtaaatcgcatgaaataagagcggtaagaaaatgacgaaaatttcaagcaggtacctgtaaggaaggctctccataaagtgcgctgcgtcattaaatgcttcgggccctcttgttgcaaaatagttaactgttaaatgctgagtaacatagagtccgagtggaattactcctagaagcgaatgcaattttcggcttacaaagtctcgacttgcggccatgttttgtgtgtcccccttttaagttgttaagctaccatctgccagtgcattttttctattaaagaagtctttgcatgcacagaaatcatcgctttctgtcgattatattgtgacatacccattgtactcccatcatttaggaccgtcaagaaaacgcgtacattttgagttttcaaaattgctttgcaagactttcatttctatctattgaatgcgcttcctttgttgcaaattctatcgtttgtgctatggaggattttactattaaacgttataataatttagtagaaaagctgggaggaatttatgtttaagaagcgtacaaactcgattgattacagccatgaactagaaacaactacttttgggtatgaattctaccgagaaattcttattcctgaacttcttggaagtgagcagcctgctgttttatactggactggaaaagaaatggccagacagttccctctctccacacgagaagagattgaagagttttttcagcgtgctggctgggggagattatcaattttacaagaaaaaaagaatgaagtaacgttcgatcttcattcagaactcatcacagaacgaaagaaaacaaatcgtattgcctgttatcaactagaggcaggctttcttgctgaacaatatcaaaacatgctccattgcattgctgaggcctatgaaattgataaaaagaatgacattcaatttacagtaaaatgggaccccaaagatcagatttgattgataaaaaggagaccacagcgtggtctccttttcgattacatttgattaacaggtgttctctcatctagctggaatttgtcatgtagtgactcaattgcataaatcattttttcttctggtacgatcgttgatactttgatttctgatgtactaaccatcttcatttcaattccatgttcagcaagaacctcaaacatctgtgcggcaacacctggatttgaaatcataccagatccgactattgatactttagctaaatctgattcatgataaatatgttcataaggaagttttactttgatacgacgaagtacatctagcgttaattcgagagatgctgtttcaattgaaaacgagatgctcgttgtatttttctctcctgtactttgaatgatcacatctacgttaataccatttgaggcaagggatgagaatagagttgggagcgttgtaagctcattcggtaaacctgaaattgttatttttgtgacattactttcaaaagcaagacctctaaccaccaaattttgttccattgatacaacctcctcaattagcgttccaggttcatttgtaaagctcgagcgtacctcgagcagaatattgtagttttttgcaaattctaccgctctcggatgcagaacacccgctccaaggttggctagttcaagcatttcatcgtatgaaatggtagaaagctttcttgcaccttttacataccgaggatcggtcgtatacacaccatctacatccgtatagatttcacaacgatctgccttaagagcggctgcaattgcgacagctgttgtatcagaaccaccgcgtccaagcgttgcaatgtcagatgtatccgttagtccttgaaatcctgcaacaatcacgattttcccttcagcaaggtgttgattcatccgggaagcatctatgtcaagaattcttgcattaccgtgaaacgtttctgttttaattccagcctgccagcctgttaatgaaatagcatcgtatccttcttcatttaaggccattgtaagaagtgctgttgttacctgttcgcctgtcgttaggagcatatcaagttctcttggagatggtttagaagtaattccttttgataaccccacaagttcatccgttgttttccccatcgcggaaacaactgctacaacctcgtctccattgtttacagcttccattagtcttttggaaacatttttaattttttctacatctccaacagacgtacctccgaatttcaatacacgtagtcccactctctccatcctttctttcatacagcttggttatccctatgcgttttactcacatcttactcatactcacgaatttaagagtcgaaatggataaattgctccgctaataaaaagcgatgcctctgtttttttaatatactttaatgattcttttcgctattaaagtataaaaaaacaacaatgagaaaaacctcactgttgttttcataacaaatccaagaaaacgtccctttgtgagatagttctccatccaattcccgggtaggtattgaatgacagctctgcatttattcaatacaggtccagtttcagacggataagcgcctttccacttcggcaaattcccctttcaactacgatcaacgagtcttaacactctcctgtaagcttactaatggtttttgcgcctctaccatcacttcaactttcgaagtgtggaactattaaatttcactcattataacgaacttacgtgaatgccgcaagatgttcttgaaaattaatttgattgattttcaaatcgagccacaacttcctccgctacattcatcggtaatccggcattatgaagatcttctgcagttgcttctttcatctttttaatggatccaaaatgatttaacaacttcttttttcttttctcccctatacctgggatgtcatcaaggcttgatttaagcattgatttacctcgaagctgccgatgaaatgtaatagcaaaccgatgcacttcatcctgaattcgctgtaaaagatagaattcttgactatttcttggtaagaatacaccctgtggaggatcaccaataagaaggtgagacgttttatgtttctcatctttagtaagagagctaacaggaatttcaagactaagctcattctcaagaacgtcttttgctgcttgtatttgagcaatgcccccatcaatgataattaaatcagggagtggtccactttcctttaacactctcgagtatcttcttctgacaacttctttcatagatcctacatcatttggaccatcaaccgttcttattttatactttcgatattcatttttctttggttttccatcaataaacaccaccatcgctgagacggggttggttccctggatatttgaattatcaaaagcttcaattcgaagaggtgcgtctatgccgagctggtcgcccaaattttcaacagcatcaatcgttctcttttcatcccgttctattaatgaaaatttctcattaagcgcaattgttgcatttttcattgtaagctctacaagctcttttttctttccgcgcttaggttgatgaacaggaatttgaagaagttcttcaaccatctgagcatttacctgctgaggaagtaaaacctctttcggtttaggatgattttgctgaaggtagaactggccgatataggttaagaaatcttcttcagcgtcattatagaaaggaaaaagcgaaacatctctttcaattaatttcccctgtcgtacgaagaaaacttgaacacacatccatcctttgtcaaagctatagccgaatatatctcgatcgatgccatcattggattggattttctgaacttccattactttatcgatatgaaacattaaatctcggaactcttttgctcgctcgaaatccatgttttctgaagcagtcatcatttttcgttcgatatcttcttttacttcttgatgacctccgtttaaaaagcgggtaatgccctcaatcatttctttattttgttccttcgtaatgtcgttaacacagggcgcgagacattgtccgatatgatagtaaaggcagacccggtcaggcatctttcgacactttcgcaatggatagaggcggtccaataatttctttgttgcactagctgcatatgcgtttggatatggaccaaagtattttcctttatcttttttgattttgcgtgtagtgattaagcgcggctgctcttcagccgttattttaatataaggatagcttttgtcatctttaagcatgacgttatattttggatcatgttttttgattagattaagctctaaaataagagcttcaaggtttgtagatgtaacgatatattcaaaatcgcgtatttcgcctactagacgctgtgtttttccatcgtgtgatccgctaaaatacgaacggactctattttttaacactttcgctttcccgacataaatgatcgttccctggcgatctttcattaagtaacacccgggttggtcaggaagaatcgctagcttatttttaagatgttgttccatactgactcacctctttactccctttcaaggcgtatctatgttccccttttattgtaacatagtcactcttcaaccgattactttagaaactcatataacacaatgtcatgatagacaggatcatatagcgttgaagaatgaaatgtttggattcgtttcacttgatcttgaatgggtatcccttgtttttcaaacccttccactacttgctctgttaaaaacacacgatgatcttgataatatttaagatctgcgataaaggttgaataagtgtaaatttgttcatgttcaaatgaaacttgattaaaagacattacccttgtttcttcccaagtatacacaataagcggttcactctcgtcttctaagtaatcaattaattgataaacagccgctggatcgtttgcttccttcatggttgtataagaaaccactgactgcacgctaataatgacggctaacaatagcaacattcttttcgacccatcacattgtttttttaacccacaccatagaaaaccaagcaataccattcctggaagcgggagaatatgtcgaggcttatctatattctgtgcaaataaagcccaaagaaaataactaaagatcatactggcaaacgcccatccaaaccaagagacttccgtaatccttattggtttcttcactcgaaccattgttaagtatacgaagagtgctacgagtgataacaatacgaaaaggttttgcccaccaatccctgtccatacaatattatttagaaaaagatgagataggcgctcaataaaagaactcgatgcggaaacagctgttcctccccattcttcaaagtgaccttgagagaagcctaatgctagctgaagaaaagcagcgacccctccttcagaaacagcaagaccaccaacccatatgaactgaaaagctgcagccactagcacttgcatcatcaaaaaagagaggtattctttagttgtgaatttgttttttcgatgaatcaatagcaacacgaaaccaattccgaacggtaaatacgataatcgcactcctagtaataaactaaagaaaaatgaagatattacgatccaaacagttgaatctttagtaaaggcatgttgtaaactccacaaataccaccagagaattgcaaccgctgaagcttcactcatcggttgaaccgttagcacatttataaacaccatagattgaataagagcgactgctacaatgctaaacgtctttgagagaaacgaacgactaattatatacattgggtacatggcaagtagcataagaagagaattccaagttgcaagtgcctgagcggggttaaaaatccatttatttagccaaatacccccaagaataaaataaggatatcctggaaaatgtggctgcattgcaaataaatcgaaacgatcgagtgctaaagtaaagtcaacctgatcccatgaacgtgggaactggattgcataggtaactctccaccatacgagtaacataaggctaatgagtgacaaaacccataccagggtatgaatggcataccgttcctttcgatttctaaaagctcgattcattttgtatcatccttttcagtttcaaacagaggcgcaaagctatctaaacatcgtttgcggtactaatgatgaaaaaaagcacaagacgatttatttcgccttgtacttagtgagtttattttactgcagattcattcatctcgttcgttgctttaaaaacagctttattattaggttcttttacttctgtttttactggctctttctggtgattgacgagcaagtaaatcacggtaaagtaaccgacatacgctataatttcttcaatggaaggcattgaggaatagccaaacaatgctttaaagaaaataccgatatcaccagagagtaacggcgctaccccttgatctcgcacgtaatgagcatagtcaattggatgctcaggtaaaaaccatgttaagtcatacacatgaggcataacactgccaattaatttaatatcctgcatcattgatattccctgtacaaataacccacctgcaatgagtacaataaaaataccagtgattttaaagaaggatttaagtggaatacgcatcgtacctttaaagaaaaagtatgaaacggctgaagcaattaagactccagtaatcgctccccatccttcaaatcctttaccgatgtcccctccagtaatagctgcaaagaagaaaacagtttcgacaccttctcgtagaacaactaagaaagagtgaattaccatgccaataacattacctgtcgtaatgtattccgtcatcttcccctcggttttacttttaaggttacggctatgcgaagccatccagaataccatttgagttaataaaacagctgagataagcataatggaaatcttcaggtagatctcgcttcccatcgcagcgaatcctgtgaaaacaacctgaaacagcatggcaactccaatacttgctacaacggcaagaccggctcctaaccagacaaacttgttatactggcactgtcccattcgtttcatataggtggttatgatgcctataatgagaagcgcttcaagtacttccctgaacatgatcagtaatgcctgaatttccattaaactttcccctttctacaaacaaatactttacgagcgacgacgctttcttgttgtataaacgacaactccaacaataattgctacaagaatgatgagcgggagccaattcgatagttggcctaaatcagtccaatctgttttcccactcggcgtttcttcttcagtcgcactttctccaaagtggccgatttcaaccgatttcatttcaaaatgattttgtaatccatcaagaataactttcttgctttcagcaaactgctcttcattcgactctttctcaccaactccgaacaaaccagggttaccgagagaatcaagtaaaacttcaaactcattttttattgtttcgtcaagttcaggatttgtatctttgactactggagagagcgttttatatgtagcatctgctttcccaaccaattttcttgttgtatcatactcttcaaaatctttctctacattttcaagtcttctagaaatattaagcacgagaatttgctgcatatttgtaatcactgcttcttcgttctcattatctaattcagtttgaacagcctgaaccgcatcatcacccatatgtaattgtatttcttcttttacagaagaaaatatttctttggcttgattgaaattaggaggagattcatttaatttagcagacatctcactataggcttcagctactttttcttcagtaggatcaccatacgaataagcttgagcaagatttggtacagcaagtgtacaaataagtgttagcaaaaagactgatgatagaatgcgttttttcatttgaaatcctcctcattgataatgataatgattatcatcattgaagtcaataacagatcggtaattagtgtgacttttctgccatggttgcttccatcttgttaagatcgagatcatgtgcatgataattgatcgctaccttctgaacggggcgagtcatttccttaaaaatagctggtaaaactgaagttaaatacgctttaaatttaatatatgattcacctgtcgagcgaacttgataagtgattggcacttccttaactctaaatccttttctaacaagatttaatgtgagtacctgagcatagttgtaatcatgaataatttcactgtgctccatcgcctgtcttgtaaaaaccctcattcctgattggccatcatagatccacttttgtaaaaggagtgattgaagaaacgtaaaacaataattgcctagccgccgatgtaatcgcatgccatcaatcgttcctttaaacctggatcccatcacatagtctgcttcgcaattaaaaaccggttcgagtaggtcaggtaattgccatgccgggtattcattatcagcatcaagcataacgccgatatctgcgccaagttcgactgagtgagaaattcctttacgaaccgcggcaccaagtccttgatttgtattaaaagaataaatgtagtctgcaccagctgattttgaaacttctacagttcggtccgaagacccatcgtctatcactagtacacttacgcgaactgtaggatgaatatctcttgggatttgtttgattacttctccaatagagtcttcttcgttgtgtgcaggtaaaaaaacaatgacgtgttgcttcattttattacttcttccttcctatcttgaaaagcttcttctaaaatcgctcccctactatgcgatggaattggagctccaagtaaatgagccacagtcggtgcaacggacgtaaggctatgtttttcttcgacaatttttccttttgcaatcgatgggccatttaagaaaaatggcacgaaccgttccccttcatcaagatgtccgtgtcccccgattccatctgcctgtccatgatccgcgcacacaatcaaagttgtgttttccataaatccattttcatgtaggaagcgaacataatcttctactaatttatccgcttcttcaattttttgaatataatcatcatacagtacacctcttgcatgtcctgtttgatcggtaccaattagctgtaccgtaaagaagtcagggtttttatctagcataatctgacgagcaccctccataattttcgtatccgccacatcattgttcataacagccgttacagtatcaacatcatcacccatcgcatcaacaagatgagcaataccaagaagccttcctgtctttccaacctttcgaagtgaatcaaaaatcgtttctacttttacaccaagattccaaaccatattggacttgataccgtgctcaagtggatatgtacctgtcatcatagaggaaaaacaaacaacagtacgagctggatagaccgtttccatctgactgtattctgtcccatttttctttaaagaatcaaggaatggtgtgttcgcttcctgaaatcgttctttccgcatcccatcaatcacgatcataatgacacgctcatttgtaggagtagatttcactgtttttgtgtaatccgatttcactgctggtttccagtcaaacaggtaatgatgaagaataaagctaaacaaccatattcctgcataaaagaaagcaagtgttgtccaatcaaacgtacttctattcgtgagagaagtttcaataaccgcggtccagatcgataaaatcaacacaaatttagggagctgttcctgtgcattaccgctcgtggaatcactattcttaagtaccaacttccagaagcgagtgaagttaagccaacttgttcctatacgaagatgatagtagaacgtgccccaaaaaaagacagtaaagaaaaaataaagaccgatccccagcatagccgctgataaggagaactgatcaaaaatcaataaatatcctactaaaggaatccacaaataatttcgtaaaaataaaggataatcataaacataataaagtacgagaagtggcaatacagcaacgcaccctagaacaaatgctccccaaaacgcgcccgaagtccactgcgtaataaataataacaacatcgtccccgttacaaaaataggggtaaatggtttaccttcatttagaagattccagcatctagctgctatcttttcaaatcctgaagcttgtttcatgatgtttctcctttctttttcataaacgacctcaactcctgaaatcgaagagggtaaagataaaaagcaactaaaccggcgacaaaagaataagcatatttaaaagcatgagtaacaagcgcaattgaaaaggcttcttcccatccaataccaacctgatgaagtgagaagctcatcacactttcataagtgacaaaaccaccaggagcaagctggaacacccctgacccaactgataaagcggttacccacatagcgtctaaatagacaaaatgatggttaaagccagcaacggaataaacgactattccttcagctatccagctgagacatgaaatgaggaagataagaaccatgtaaggcgagtttaatagtttcttcatcatagcgaactgtttatacaaaaaaccctcattagttttttttcttaaatacaggataagagttaatacgctcaataaaaagagagttagcatacctaataaaaacgttgtcctaaccgtaatcccaaaaagttctgcaccaatcatggcaaaaacaccaagccagaaaagatcaatcgcacgtagaatgacgacggattgaatagaagttgtccactgtcctttttgtttatgcgcaagaacccccattcgtacagcttctcctcccttaaatggtaaaaggtggttaaaaaacaagctgtaaaagattcctgccaaataaactctcatggaaatggtcctgtcaacaagtaacctccaacaccaacttcgtaatataaaagagcacgtatacccgataaccattgcaaacaagaggcccgggttgctgattaactctttagtaagggtggttagggtagtaacattaaattcatttaacagtagaaatgcaaagagagaaattagtaacaagccaattacccattttataattcgtgatagctttttgcccattcaattgtccttcttatcccttcttcaaaggttacttcaggagaatatcccagttcatttcgtgccttactaatatctccccacgtatgtcgaacatctcctcgccgaaacgtatcttctttcaccttcgctctaggaaaatactgagtaagcaattggatcaactctgagagatgcacaggtgatcccgaacctaaattataaacttcagataaaccgtcctgcttaaaggctaacgttatgccctgaataatatcatcaatataagtgaaatctcttgattgctcacgatcatacacggtgatctcctcgccttttatcaacttctcaataaagagaggaatcgccatgtctggacgcccccacggtccatatacagtaaagaatcgcagtatcgttaatttaaagccatagagcgattgataagcgtgacaaaacgattctgctcctgccttcgccgctgcataaggtgatttcaccttcccacttgcttgctcttccttcactggaccctcttctcgacttccatatacagaagaagatgatccgaacaaaacatgagatataccggtttcacccgctgcacttaaaacattaacgactactttgatatcctgatcgatataatctaatggattttttaatgaatattgcactccaggaagggcagcaagatgaatcactttatcataagtgtaggctttgaaatgagccaatgtttgatcagcatctaacaaatcaaacctatgtacacttataggtccatttttcttaatttcctctaaatgttctacctttcgctctacatgataatatgatgaaaaatgatcaattagcgacacgtcatgaccagcttttaaaagcgtttttgcaaggctactgcctataaaacctgcccctccagtaattaataccttcatactatgcactcccgctatacacttcaatcttaaaacttaattacaagagaaatggccgcaattagcggccatttcaatctaaaactattctactacactttctagtttggtcaaaatttgttcacttagtttatttgcctcttcagcatcgttatttgacacagcatcaaaccaactttgtgcgtcttcatacatggcatttgtctcttcttcacctagtgcttccattaacggcatttcgatagcttttaagaaaacattggcttccatagcagcttcttttccttcagaaagattattttcatctaattcagctactttttcatgatagcctttaatttttccagcaaatgctctttcgaacaagtttgatacttcatccgctttaatggcttctggatcattgctaatatcgaatagctcgcttaacttctgtgcagcttcttcatctccgcctgagagagatcctttaatagcttgataaaatccaagtgcttccgtttgcataatttgaagctcttctgtttcaccagagtttacggcttcttcaattttctcagcataagaattcgctgccaagtagtagctcttataaattgatttatcagttacctgctttgtaacagcaaagttttccatatccccttcagaaagagcgtcttcctgtgctgaaagaccattattgatgttttctacaagactagaatctccttcaagttcataataggagtcgcgtttttctgcagtaggaacgaatactttcttagtaagtaattttacttcttcaaaatgaagcatcgcttcttcatcttttttcgcgtccttcgcatcaattaccgcttgttgaagagacttttgtttctgataaaagtatgactgtgtgcctttatcaatcatttgtcgcgcaacgttttgatcaagctcacctgatttacccgcttgtatacctgtcgtgataaaggtatcaaattcattatcgatttcattcacagcgcttttcaattcgcttgagtaggtagattcaataagatcccagtccacttcttcgtcttctttcattttgttcagctcatccaacatcttttgatacgcttccacttgctttgtagtaacagcgttttcaatcgtcatatcatttgattgagtttcagatgattgtgaagcggaatttgtttgttcctgagaattgctacctgtatttgcagcattttcagaatcattaccacatgcagcgagaaccgtagctgcaagcgtaatagaagtaaatagcatagttgattttttcattatgtaaaactccttttcgtcaggtcgtttatccatgatgattatatcgagaacgattatcagtgtcaatagcatttcttttggagatcccacagaaaaaagcatccgaatctgatttacagattcgaatgctttgatcattcttccttattgatgcttagaaagtgtttgtgcaagtgcttcttttggttggaagccgacaacttggtcaacaacctctccatttttgaaaacgagaagcgttgggatgctcattacaccaaatttgcttgctgtttcctgattttcatcaacgtcaagttttactactttcacgtcgctcatttcagcgtcaagctcttctagtacaggagcgatcattttacaagggccacaccatggtgcccagaagtctgcaagaacgagaccttcacttgtttcttgtgcaaaactttgatctgttgcgtgtacgatagccatactgtatcttcctccttaaacatttatcacttgagaataccaggttaaggccggttgcctcagtgtgctctgccatcttgatatttcatcaactggcacaaaatgagtatatcattaatcgtctttctgattccattgttttgacttacattcattcttccctatcttttagagaataaaacgctcccactaaaaacacgattcttaattaatttcatcaaaaaagcgagctgtattagctcgcttttatcttagcttgtttgtaaaacttttttgaattcctgtgtcagaagtggcaccacttcaaacaaatctccaacaattccatagtccgctacactgaaaatgcttgcttcaggatctttattaatcgctacaattacttttgagttagacatacctgctaagtgttggatcgcaccagagattccacaagcaatgtaaagatctggcgttaccactttacctgtttgcccaatttgaagcgaataatcacaatagtcggcatcacaagccccgcgagatgcccctactgcagcaccgagaagatctgcaagttcctgaagtggttcaaatccttcttcacttttaacgcctcgaccgccagctacaataactttggcttctgagaggtcgacaccagaagtcgacttacgaacgacttccttcacaatcgtacgcagatctttgatctctacgttttcttcaaacacttctccagatcgtgattcatcgatctcaagagcagcaatattattaggacgaattgtagcaaggacaatgccttcttttacttttttcttttcaaatgctttaccggaatagattggtcgtgtaaagatgactgcttctccatcaagttcaataccagtagcatctgaaataagaccagcatcaagtttgcttgcaagacgtggtgccaaatctttccccatagacgtatgtggcattaaaatagcatccggatcgacgctctcaacaatctgcaaaaatgcttgaccatatccatcacttgtataattttttagtttttcatcttctactttaatgacacgatccgctccgtagtgaaagagttgatctgttaaggagctcacattttctccagcgatggctgcaatcacttcaccaccggctgcgatttctttcccagcaccaattgcttcaaatgagacatttcgtaattcattatcacgcgcttctgcaaatacaagtacttttttagccatggttgatcccctcctatataactttcgcttcctggcgaagtaatttcactaattcttccacttggtctccaatttcaccttcaagcacttttcctgcttctttctttggtggcaaataaacttcgattgtttctgttttagcttcaatttcatcctcatcgacatcaagatcatcgtagtcaatttcttctagtggctttttctttgctttcataattcctggaagggatggataacgtggttcattgagcccctgctgagccgttacgagtattggtagctgcgcttcaaccacttccatatctccttctacatcgcgttccattgtagccgttgttccatcaatatcgagcttcgtaatcgtggttacgtaagcgattccaagtttttcagcaagacgtggaccgatttgacccgtgctattatcgtttgatacatttccgccaagaataatatcgtattctttatcctcaaaataagctgcaagaagggcggtcgtcgtatattgatcactttcatcaagatcttcattgttaatgaggacggctttatctgcgcccattgctagagctgtgcgtagctctttttcaacttcttcatccccaatgctaaccactgttacttctccaccatgatcgtcgcgtagctgaatggcttcctcaatcgcatactcatcatatgggttgatgataaactcaacgccttcttcgctaatttttccattttcaatcacgattttttcctctgtatcgaaagttcttttcataatgacataaatgttcatatctttatccctccctgaattaatttaccttatttatcttgaaagtttggctgacgcttctcgatgaacgctcgaattccttcttgtccatcttctgaagcgaatgcctttccaaaatactctctttctttttgaacgccttcatcaaatttttctgtttttgaataagtaagtagtttaagagcatagcttacagctacagcgcttttcttagcaattttttcagcgaattctttcgcttttggtaaaaggtcttcctcactatatacctgattcgctaagccaagttctaatgcctcgcgtcctgagatgggttcactcgttagtagcatttcagttgcttttgcttttccaactaacgcgggcagtcgttgtgtacccgcaaatccagggaccaaacctagctgcagctcaggcagacctagcttggcatcttctgttacgaagcgaatgtgacatgccattgcaagttctagccctcctccaagcgcagcaccatgaatagcagcaacaatcggttttgataacgcttccattttgtcgaataattgttgcccatagctacccagatccgcaaagccttcttcagtgctaaccgttgtaaattctttaatatcagcacctgctgagaagaatcttccttcaccagaaatcaagatcacctttgtattaggatcgtcttcaatttgagtgaatgcctctgacaattctcgcaaaacgtccgaagccacagcgttagctggaggacgattcaacgtaatgtgtgctactttgttttcattcgaaatgttaatgaactccacttctccactcctctcagaactttactatcccggtcaaagccgggatatctatttatttgcttaagccgttaattaaaagatgatgtagcggcttagcaagtggttccaattcgaacttgtgatctttcatgacccagtttgtgacggtttcatcaagtgttccaaagatcatttgtcttgcgaggcgaatatctaattcctctataaataatcctgacttaatcccctcatgcaagatgtgatccacaagcgttaagtatttttttaatacttcgccgatttgtgcgcgaagtgctttgttcgtctgtcttaattctaactgagttacaattgcaagttcatagtcagaaccaaggtgcttgaaatgcatatcgatcagcgtaaacaatttatccattgcattctctttttttgcaatttgttcttctgtcttatcgataaagtttcccatttttttctgaaataacgaaattagcagatcttctttatttttaaaataaagataaatcgtaccgtctgccactccagcttcacgcgcaattttagatacctgcgcctggtgatacccattctgggcaatgactacaacggctgcatcaatgatcttatcgtatttcggacccctctttttccccttttctaccatatgaagttctcctttattctttatccggcactcaatcaaaaatgaatgagtgttcattcataatcttattgtagcgatatgaccacaacattgtcaacattagatttctgaacgagcgctcggttggaatcaggagctttttcgcaagttaatcataccacaaaaaagcagaaatgtgcgaatctttccagaataaccgtaactttttctatcattctaaggatatagaagaaaaccaaccgctaaagcgattggttttcttttgctctctcttcatccacaagcactcgtcgcaaaattttcccaactgttgttttaggaagctcctccctaaactcatacaaccttggcactttataagcagctaaatagcgacggcaatgctgatttaactcatcctctgttacctttgcagtattctttaaaacgacaaacgcttttaccgtttcaccacgataagcatccggtacaccaataatcacagcttctagaacagcagggtgctcatataaaatttcttcaacttctctagggtatatattataaccgccagcaataatcatgtctttttttcgatccacgacatagaagtaacctttttcatctcggtaagccatatctccagtatatagccaaccattttttaacacagctgccgtttcatctggtcgattccaatagcccttcatcacttgagggcctttcacaataagttcccctatttccttaatctcagcctcttcatcagctgcattgacaatctttgcatccgtatcaggccacggaagtccaatgctccctacgaccgtaccatccaaagggttggaatgagtaacaggtgaggattctgttaacccatagccctcaactaggcgaccgcttattttttcttgaaacttttgttgaacttcaattggaagcggagctgatccacttatacaagccttgattgatgataaatcatatcgatcaatatctggatcattcaataaagatatatatatagtaggtgcacctgggaaaagagtcggtttttgtttttggattgttttcaacgtatccttcggctcaaatttagggagaataatcatttttgccgcatacataattgataaattcattacgcaagtcattccatacacgtggaaaaaaggcagaattcctagcacacgttcttctccatacttcgcatcatgaatccagtgcttacactgcattgtattaaccacaagattgaagtgagtaagcattaccccttttgcaagccccgtcgtaccaccggtatactgaagaagagcaaggtcttcttttacattaacatctatctttatctcttcatccttaccagatgctacccattcttgaaacgtatgaatttgatttgttgaaggcatttccacaagcaatccttgttttttctgtttttgtactaaaggataaagcatatttttaggaaatggtaagtaatcttgaatttttgttacaatgatatgctgcaacaccgttttatcttttaccttcaaaaccttaggtaagacgaggtcgaggcatataatcatatctgcctgagaatcttttaactgatgttcaagctctctttccatataaaggggattcgtttggacaacaacccctccagccataagaacaccatagtaactaataactgcctgaggacagtttggcagcataatcgaaactctaccaccctttttgagaccattttcacgcaatgaatttgcgagacgtcttgagcgcgtatgaagttcttggaaagttagttcctttccaaggaaatgaacggcttttttattaggatgctttttagctgcatcaacaagataagcatgaagaggcttttcctcatattcaattgaggtcggtactccttcttgataaaaattaaaccactctttttcgggcatgttcatcattttttcatcaacctccctttcacgtctccttccaaccaaaaatctctctttatgataattataatgaaaacgcttcaattatcctatctttttttgatttttttgaatacatcggcatttcccgtcgtaaaagggagacgagtttagtaaaatagtttgctttcatacaaagcgtttcatagctttattcaaaaaggattatctgtcccaagcctcttaattgatctatatctaaagaaaagaagaacaggcccggcctgttcttcttttcaatcaaacaaaataaatcaagtatataattcccgcaataaaaaagattcctgatacgaccattagaactttccataatgtttccataatgtgctcctcttacgaaatccctgcaccaataacaaaggacagtccaatcgaaataaccattgaaataaatcctactgcccgattatcctctgcaatttctttatcaattcgaaatttaggtgtcaaaaattcaaaagtaaaatacccaatcaacaataaaacaaaaccaaaaacgccccatcccatcattgtgacgagagaatcgttatgttcaatcgaaaagcgaaaaatgttggcgattccaaagatcttcccgccggtagccatagatacggcgagatttcctctttggatctcttcccagttacgataagatgtcacaaattcaaagactgatagaaacacgatcatgcaaacaatgacaacactataatttgctgcggtttgaaatgctacactatcccaaagttgttccatcgtgtaaaatcctttctctacttcagttcaacgacggtaacaccaccgccaccttcattcataccacccatacgaaggtttttcactcgcgaatggcgttttaaccattcatgaacaccttttcttagtgcccctgtgccttttccgtgaatgattgaaacctgatgatatccagcaagtaaggcgtcgtcaatatagcgctctacttccatttgtgcatcttcgtatcttttacctcttaaatcgagctctgttttgacctggctattatttcctcgcaccgtaacgaacggttttcgttctactgcgggcttggatttaatcgcttcaagatcatttgcttttaccgtcattttcataattcctagttgaacctggtattcgttctttcctactttttcgacgatatggcctttttgattaaaactaattacttttacttcgtcgccaggttcataaatttttgcctgcgcttttttcggcttcggctttgaagttcttaattcaggctttgcattctcaagctgcttctgggcatcaattaactgatgctcttttaccgcgcctttttggaaagtacgaagatcgtgtataattttcttcgcctgttcctgtgctttctcaacttcttcggcagctttctgttccgcttcttcgaagagtcgctcacgctgcttttcgaatttctcaagctgcgtttctagatctttttttagtgattctgcttcttttctaagatcagacgctccctgtcgatccaattcggcctgcttctggctatcttcaagggaggaaatcattcgatccaccttattactttcactagaaatttgcgaccttgcatcatcgataatatcatccattagtccaaggcgtcttgaaatttcaaatgcgttgcttcgaccaggaacgccaattaacagtcgataggtaggacgtaatgtctctacatcaaattctacactcgcattcataacaccttcacgattataagcatacgcttttaattcgctatagtgagtcgttgcaatcactctcgatccacggttatacacatagtcaaggatggagatcgctagtgcagcaccttcctgtggatcagttcccgcaccaagttcatcaaaaagaacgagactattatgatcaatattttttaaaatctgaacgatattcgtcatgtgagaagagaatgtgctcaagctctgttcaattgactgctcatcaccgatgtctgcaaagatatcccggaagactgccatcgttgagccttcatcagccggaatatgcaatccggattgagccataagtgtaaggagaccagcagttttaagcgttacggttttccctcccgtgtttggacccgtgattactagtgaagagtaatctttcccaaggtaaagggaggaaggcacaacttcatcttgaggaagaagcggatgacgcccctgcctaatttcgagttctccttcatcattcatcgaagggtttgtcgcttttaattcatttgcatatagagcacgtgcaaatataaagtcgatatcagcaagcacctcaacattgtgtcgaagcgtttcagaagcttctgctacacgccctgttagctcagttaagatccgctcaatttcaagcttttctttcactttaacttctttcaactgattattgattgaaacaaccgattgaggttcaataaataatgttgcccctgaagatgattgatcgtgaaccattccgccaaatgaacctctatactcctgcttaactggaattacgtagcgttcatttcgaatcgtaacgagcgcatcagaaagcattttccttgtgcttgaggagcgaatgaggctttctaacttctctcgaacgcgtgactcaaaacttcgcagctgcgttcttaagcgtcgcaatgaatcgctcgctgaatcgagtacttctccatcctgatcgatacaggcgtttatttctttttcaagatccgtctccggcataatttggtgaactaaatctcctagaagaggtagctcaactccatcatcgatcatattttcaagaaaggttttaaaacgacgtcctccataaatagtgctggaaatatcgagtaattcagaaggatttaacatgccaccaatctcagcgcgtttcacactttgtctaatgtcacgtataccacctagcggagcctgtccgcgaaggcgaatcacttttcttccttcttctgtcccttccaactgatgattcacgtcttcaagtgaaaacaaaggcatcaattgttcaactttctgttttcctaatgaagatgaaacatgtttccctaatcgttcttttactttatcgaattcaagtagccgtaacactcttttctgcaatggtcgttcctcctaaaaaacggaatataattagtaatgccgatgaaagaaagcttccagatctttcgccgtatacgtatttaagacgctctctttacgcagccatcctcttcttccagctgatacaccaatttccatatgttcaagcatgtccatgtgatgggcatctgtatttatcattattttaacatgattgtcttgtgctttttgaagccattcagctgcaagatctaaacggtttgggttcgcatttaactcaagtgcagtacccgtctcttttgcaagtttaattagtttatcatgatccagtgcatacccgtttcttcttccaagcagtctcccagatgggtgtgcgataagatctacatggtggcttcggagcgctgtttcaagccgcttcataatggtatcttcgtcttgagaaaaggacgaatgaatcgaagcgatgacgaaatccatttcagcaagcagctgatcgtcataatctagtgtaccatctggcaaaatatccatttcgaccccagcaaatattttgaagtctgtccattttttgttcagacggttaatttcttctctttgttcacgtagcctctctggtgttagtccatttgcaacttttaaatactgtgaatgatccgtaattgcgatataagaatagcccttatccctagcacgttcagccatatcttctatcgtatatgccccatcgctccaggtagagtgcatatgtaggtcacctttaatatcttgtaattgcacgagatcaatcttgtttttctctgcttcttcaatttcaccgcgatcttcacgaatttctggaggaatataagctagcccaaaatgaccataaaattctttctcattttcaaacgtgataacttctcctgtttcaacagactctaccccatattcactaattttctcgcctttcttcttagcaatttgcctcatctttacattatgagcttgtgaaccagtaaaatggtgtagggttgaagcgaattcttctggctttacaagtctaaaatctaccgagacgccatactcatcatcaagctcaagcgtgattttcgtatctcctttgacgatgatttttgaaatcccttctagttcaaggagtttttctgatacatcagcagaagcagtcgtagcaataataaagtcgaggtctttaatggtttccctcacacgacgcaaactgcctgcccgtgcaaacttttcgattttctcgaatccacttaattgtcgttcaatcttttcagcaagtggaagcatgtaagcaattgaaagtcgctcaggtcgtttccctgcttcttcgatcgcctctaagatcttctcctcacttttctttccaaacccgggaagttcttgaatttgttgcgcttcacacgctttttttaatgtaggcatatcaataacaccaagttctttatagagcttagcaagtttttttccaccaagacctggtaatttcaataaaggtacaagaccagacggcacttcttttttcaatgtctcaagcgtttctgactcgccattttcaagaatctcgtttattaccgctgcagtcccttttccaattccattaagctcagccggatcttcaatttgttccatgctccgatcatccgtttccagcgcacgtgccgccttacgaaaagctgatattttaaaaggattttctcctttaagctccatataaaccgcaatatcttctaaaaaacgaatcacattcttcttattcattccatcctcacccttcataaaaagatcattactactatcgtatccataaacccaaacaaatccaattatttttacttgaaaagcggaagcgccccgtttaggtccgacaagcgctggaaccattcgatttgaacacgccctttgtgttcagagcgaaaggtgaagcgactcgaggacctgggcgctacagctagacattgaaaagcggaagcgccccgtttaggtccgacaagcgctggaacatttgtatttacaaacaaataacccttctagttgaagggttatgcgacatgggtactccataaatcttttatttgttccgttaacaccggggtatgtttaacgatgctttctgcaagaaacgaatttgaaatcgctgtttggaccgtttcattcggtacaagtgctgcaataaatagaaacaagaatacgacaatatatacttctacaaatcctagcactcccccgagccagccattcactgttcttaagataggaagatcagcaagaaagtcgagcatcgatccaataatttgcatgatgattttggtaccaaagaacaatagcgcaaacgcaataccactataataggtagcttctaaatttatcgcttcaaataccatcgcagttgaagaagcttcgtttccaaaggatggatacggaatccatagcttcagatgcggtgcaagatccttaaaatacagataggccactataaatgaaacgatgaatccagctaaatgaacaacttgcaggataagccctctacgaagaccaataagaaaacctcctaccagtactataaaaagaatgagatcaaccatctatcgttattcctcttctctcagttttttctttaaatcttcaagttctttcttaatcataacgtaatcattcacaatattcacagctgttaatacagcaagtcgctttgtatctaaataagtattcattcctttaatctcattcatcttctcatcgactaatttcgagacttcaaggatatgttgatgacttttatcaccgacgattgtatattgttcaccatagatttccacagttgtacgaactttaccacgactgtctgtcaccccataagcctcctatcacgagaaagaatcctaacttgtatcttagcacgaaaataagtgtttttgaaatacagcgctcccgaaccattcttcttggttaacagattctgatataataggatgcaagcatagttcacaaaggagttttgttatgtcacaggttgtattaactgtatcacctaccattatgaatgaaattaaaaagaaatacaacagtcacttaagcgataaacaaccgccagggagcgtgttcgtagcgaaaacgtcagcctgtactattacaggctataaatctggaaaggtaatgtttcagggggcagctgcagagcaagaagccaaacaatggcaaacgagcggtacagcgaaccccaaaaagcctacaggatcaaaaaagaaaacagttggtgaccaccaatatgcacccccatccactatctcaacgctatcagcaatcggaagtgatgaagttggtacaggggatttctttggtccaatgaccgtggttgcggcttatgttgatcaaaaccaaattccgcttttaagagaacttggtgtaagagattctaaggggatgaaagatccagaaattatcgagatcgcacgaaatctaataaaaacgatcccgtatagccttcttattcttccgaacgaaaagtacaacaatatgcaaagaaaaggattgaaccagggtaagatgaaggctcttctacataatcaggccattcagaatgtgacacggaaagtagacggctacgatgcgatcttaatcgatcagtttgcaaaaccagagatttattttaattacttaaaaggtcaatcaacggtcataaaagaaaacgtctatttcgccacaaaagcagaggaaatccatttagctgttgcagctgcttcaatcattgctagatactcctttgtaatggaaatcgatcggcttgggaaagaaaacaatgtgaaacttccgaaaggagccggaccggcggtagaccttgcagctgctaaattaattcaaaagcacggcgatcaagtacttgaaaaaatagccaagatgcattttgccaacagcttaaaagcaaagaaaatcgcagatcaaggtcggcactaaaacatccacaaaacaaaagctggctcaaagtgagccagcttattcatattacaaatagagttgtggtgcttctaacccatcctcagctagaagcatgacagaagtaaaatattgaaagaaaagatcacggtctacatcgtcgacaacgacaacttcacggcctgttttatcaagtaccgttctcccttgacttacgccgtctttttcaacacgacagtttacttttcttgagtgaatgaaagactgaggtgtgacagaaacagttgtaagcacgtcccataagtagtatgttgagttggtttcaacgtgaacgagtggcggacacatggcatagcactgcccaataaaatctacaccaatttcttttctctgtgctgcccacatgtttcttacatcattggttaaaggaacttgatttgtactttcaagcgccaccatttcaatcgtgattgacgtatcaaagacagtcgcaacggcttctggatcccagaacgcattccactctgccgtcccgtcatgctcaggttcttccacgtttccaacctctaaaaatgtgccacccatccacactaacttttcaattttttgttcaatcgctggtgctaattctaacgctctagcaagatcggttaaaggaccagtaaaaagaagcgttatcggttctgaactgctctcaagtacatcgattagatgcagatgagcaggtctttctgacattggcgtattcacttgatttgattcattaagaatcggtagtgcgtcaacgtagaaagcatgcatacgccactctttagggaatgggttaatcccccttgagtttgaggctgaaacatccaaatcaataccttttccgaaacggtcaatgatctttctactcgctgatacagccggttctaaatagcaatccgctggaataactgacacgcctaccagttcaacttcatcaatgttcagcaataaaaatagtgatgctaagtcatccacgccaccgtcatgattaaaatacactttcgttttattcatttttatccccctgtgtcacactctcatgtcctttactaccgtctctaccaaacgccatttaaatgaaaatcgattcactcatagtcctattatttcaggtaacagggtagaaacgtgcaggccaattcccgacatatatgagtttccattatttaatcactttgtactctaacagagcgcgaataaggaagcaacatgtattgttttgtcgaacgcttacatataagacaggaatattcaaaacattgtaactttactagtaggtcttgctacctatgaaatcttctgatagattgatgaatacaacttcacatttatctctatataattttggaaatagggtccaaagagtatctacccggcaaccgagaattgctggactatagggaaagtatggcatcgtcgatcagacaagtatgttttgtttttttcgtgccggacttcttcctgtaaactcggacttttctataaaggacgggttttttatttaccaatttttatttgtgaagcaacaattctttttcagggggaatcagacatcatgagtattttaacaggactactctctatcatcggcgtccttgcaattgcatggttaatgagcaacaagaaaaaatcagtaaagtggagaaggatcggggtcggtattttcattgaaggtcttttcgttctattcgtattaaaagttaatgcggggaagattatgctagaaaaggcttctgctgctgtacaaaacgttattaattatagtaacgaagggattcaatttgtatttggaggattatatgaacaaacagatttaacatttgtttttgcgatcaatgttctcgccgtaattatcttcatttcagctcttgtatcagcactttattatatgcgcatcattcctttaatcgttcaagtcattggtgtaacaattgggaaattaatgggtacaactaaagttgaaacattcaacgctgttggaaattcgtttctaggcctagcagaagcacctttacttgtaaaaccatatttgaagatgcttacgagatcagagatctttgccataatggtaggtggtacagcttctgcaagtggagctattctcgtcggctattcgcttatgggaattgagctaaaatatttattaatctccgtctttagtgttcctttcgtctcgcttgtcatctctaaagtgatggaacctgagactgaagtatcacaaacaaacgataaagttaaaatgaaaagatctgaacatgcaaacgtgtttgaagcgattgcggaaggtacggtaagtggagtcatgcttgccctgaacatcggtggccttttgatcgcttttataagtattctagctgtagttaacggcatgttaggtgttgtgggaactgaccttagcaccatattgggttatattttctatccattctcgctacttgtcggtattccagctgatgaagcctttcgcgctgcgtctattatcggcacaaaaatgtcgattaatgaatttgttgcctttcaaaatttaacggcaattcaggatcagctttctgataaaacagtcgccattctttctgtagcgctatgtaactttgccaacttctcatctattggtcaattaatcattgggcttggctcacttgaaccttcaaagcgttcacaagtatcaaagcttggattaaaagccatcattggcggaactcttgcctcctttattactgctatatttgtcggaatgtttatgtaaaacatccattagaaaagcctccctgactgggaggcttttcttactattgacgaagtgcagctccaaactgttcttctacggctttaagaacacggtcatgcgctttctttacttcttcttcagttaacgtttgttcaggattgtaatatctgagagagaaagctagtgatttttgtccttcatcaagatgttccccttgatagacatcaaataattgaatctcaactagcttggatccacccgcttctttaatgacgcgcttcacttcacctgcttcaagtgactcgttcacaacgagcgcaacatctcttgtaaccgatgggaaacgaggaagcttcttgtatttaagatgagcgacatccgctttaagtaatttctcaagattgatttcaaacacgtatgtttcactcaaatcaagttctttctctacttcaggatgaagctgaccaatatatccgataagctcttcatcgagataaacagctgctgtgcgacccggatgaagcttaggctcttctgcacgtgcgaaagtgagacgatcttcaacaccaaattgaacggcaagttcttcaagaattccctttacaacaaagaaatctgacgctttcttttctttttgccacagatgctcttgccatagacctgacacgacaccagcaagatgttcttgttcaaccggtagctcatcacctggtaagaatacagaagctgtttcatagaaagcaatattctctaactgacggtttcggttatattgagcaacctctaataggtgagggattaaactcgttctaagttcacttctttcttcactcattggcatcgcaagacgaacagcttctactgactcatcagagaagaagtggcgccttaatggtgaagtaagtgaatacgttaccgtttggaatagacctgcaccttcaagcgtacggcgaacatggcggcgtttcccttgatattctgacaactgtccaggtgtactttctgtaagaggtaacgttgcaggaacattatcatatccgtaaagacgtcctacttcttcgattaagtcctctgaaattgtaatatccggacgacgtggtggtacttgaaccgtaaacgtgccaccaaaattttgataagagaattgcaaacgctcaaagatagcggcaacttctgtttcagtaatttccgtcccaagaacttgattaattcgatttacttcaatgctaacgtcaagagcttcaattgtacgagcaccttgctcagcaatgccttttagaactgtgcctccagcaatttcttgaataagctgagcagcacgttcgcttgcgcccacaacgcgatttcggtcaatccctttctcgaaacgagcacttgaatcacttctgagtccgaggtctttcgatgactttctgacaagcttactattaaaataagcagcttcaagtaggatggttgtcgtatcctcttgcacttcagagtcagccccacccattacaccagcaacagcaacaggttttgaaccatttgttatcacaagatgttcacttgaaagcgtacgttccacatcatccagagtgaccattttttcacctttagtagctcggcggataacgacttcctttgatccaaagcgatcataatcgaaagcgtgcagcggctgtccatattcaagtagaacatagttagtaatatcgacaacgttattaatcggacgaataccagcagaaacaagacggttcacaagccactgtggcgaaggttttatcgttacgtctttaataacggtagccccgtaataaggattatcttcttcattttctacacgaactgacacatagccttctacgtcttcatccgagcgaacaagctctggtgacggaagttcaatcgaacgattcaataccgcaccaacttcataagcgacaccaatcatgttcatcgcatccgctctgttcggtgtaagacctagctcaagaacttcatcatgtagatttaaatattcaagggcatcttccccaggtgtcacatcatcactaaacacaaagataccatcagcatattccttcgaaacaagtttactttcaattccaagttcttgtaatgaacaaatcataccatgtgaagcttcaccgcgtaattttgcttttttaattttaaaattacccggaaggactgctccaacttttgcaacagcaacatattgaccctgcgcaatatttggtgcaccgcaaataatttggaccggttcttcctcgccaatctcaaccttacaaatattcagcttatcggcatcaggatgttgctgacattcaagaacgtgaccaatcaccactccgctaattcctttattaagctgttcaactgtttcaacctcaataccacctttagtgataaggtctgccagttcatcagctgagtaactatctaaatctacatactgctgtagccaattcattgatacaagcatttattctcctcctaaccttcaaatcgttctatagtgagttaaattgtttaataaatctactatcatttgtatagaaatgacggatatcatcgataccatacttcagcatcgcaattcgctctggtcccataccaaatgcaaaaccagtcactttctccggatcgaatcctgacatacgaagcacattaggatgcaccatgcccccaccaagaatttcaatccatccagttcccttacagacagaacagccattaccaccacaattaaagcaggaaatgtccatctctacagatggttctgtaaatgggaagaaactaggacgaaggcgaatttcacgttcttccccgaacattttcttcgcaaaagattgaagaacaccctttagatcactcatacgaacattctcgccaaccattaatccttctatctgcataaattggtgagaatgagtcgcgtcatccgtatcacgtcggtaaactttccctggtacgatgatctttaccgggcctttaccatttaacttctccattgttctcgcttgcattggtgatgtatgcgtacgtagtaacgtttcttcagtaatgtagaaggaatcctgcatatcacgagcaggatgatcttttggaaggtttagcgcttcgaaattgtaatagtctgtttcaacttctggtccctctgcaattgagaagcccataccaagaaacaggtcttcaatttcttcaattaccctagttaatggatgatggtttcctcttttcactggacgacctggaagagaaacatcgatggtttccttctttaatctttcttctacggctgttttttctaaacgagcaattttctcctcaagttgatctgaaatcgcatttcgtatttcattaacgagctgccccattttaggacgctcttcttttgacaatttccccatacctttggaaatttcggtaatgggtcctttttttccgagaaacttcactttgatatcctgtacttccttcatggaagaagcttgctgtatttccgacagcgcttcttcttttaacgcttgtaaacgttcttgcatcgtttcaacctccacttcatattcgtgttacttcctttaggcaataaaaaaatcctcgctccccagaaaggggcgaagatttgatttcgcggtaccaccctaattcaccgatagatttcaactatcagccttaagcaaagaataacggcttgtaaaccgatccgctttcgtacgaacaaagcggcaactccagagtgaattcggcaacgtccctatagaaatgcttccagtcacggcatttcctccctaaataggcagtggtagcttactactctctatcattgtttttatcatatataagttgcttttaattatagaaaaaaaatgctatatctgcaagtgcaattatgaaggaagaagtccatacatcagaattccagcagcaacggcaacattaagcgactccgcttttccataaatcgggatatacacgttctcatcagcaagattttgaagctcctctgatacgccatttgcttcattccctagaataactgcaaactgagaacgtccttttaaatcatcataaggagttcctccactcacttccgtggcgtagatcggcatgttaagctctttgaacttttgcacttcttctacaagatctgctttttttacagggaggtgatagatagatccctgagtagaccggagcactttactgttataagcatctactgttccatgcccaagaagaatgccgtcgtagcctgcactatccgctgtacgaatgattgttcctaaattacctggatcttgtatagcatcaagcagtaagaatttccctgcacctgggagatgaggctccaccatttcacatactgccataattccctgcggcgtttcggtatccgttaattcttgcattactttctccgttacagtatacacaacaggacgttctttaaacggatagacagatacatcattgccctccgttacgatcacttcaataattggcgcttcaaacttcgcagcctcttcaacgatatgtggtccttcaatgagatagctttgagctttctctctccccttgcgcgtttggagctttttccaatctttcactttttgattttttgcggattcaataatcattatgctctccttcagttttcaatgtttctattataaagggttaaatgggaagattccaatagtactcatgaaatttattgcattcgctcatactaatgatgcttgatcgaacaagcgaatgagaaaggtgaggtggaaagcatggaccttaacttacgaaaagcaattctcgccaacattaatggcaacaacgaggaacagattgaagcgacgatcctcgatgccatccaaagtggcgaagaaaaaatgctccctggactaggtgttctttttgaaatcctatggaaagaagcacctgaaaatgaacgagagcagatgctctcttacatggctcagggtgtaaattaacgagcaaaatccggtggccaacgccaccggattttgtgtttaattgaaaataatttcttttactttatcagcatcaagctttttaatcacttcaacaattaaattaaccgcattttcaaagtcatcacggtgaagaatcgctgcgtgtgtatgaatgtagcgtgtcgcaatagtgatagaaagagcaggtacaccgttagctgttaagtgaatttttcctgaatccgtacctccacctgcaatggagtcaaactgataagggatgttgttctcgtcagcagtatctgtaacaaaatcacgaagccctttatgaccgaccattgaagcatcgtacataataatttgaggacctttccccattttcgattgagcgtctttatcgctcactccaggagtatcgccagcaataccaacatcaacagcaaaaccgatatctggtttaatcatgtttgttgcagttgtcgctccacgaaggcctacttcctcttgaactgtgccaacaccatataccgtatttggatgtgcttcaccttttagcttacgaagcacttcaatcgcaattgcacagccaatacgattgtcccatgcttttgccataagcattttttcattattcatgactgtgaattcgcaaatcggaacaacggaatctcctggctttacgccccattccattgcttcttctctgcttgatgcaccgatatcaataaacatatctttcttatcaactgatttcttacgctgctcagccggcaatatatgtggtggttttgaaccgatcacgcccataatattgccattacgagtcatcacgttcacacgttgagcaagcataacctgttcccaccagccgccaacggtttggaaataaaggaatcctttatcgtcgatgcgcgtaaccataaagccaatttcatcgagatgtcctgcaaccatgattttaggaccttctgcattaccttttttaacagcaattaaactgccgaggttgtcatacatgacttcatcagaaagagattcaatatgcttcttcattacttcgcgaggctcacgctcgttacccgggacaccattcgcatccgtaagttctttaagcatctgcaacgtttcgtctagctttgccatatgtattgcccccttaatatgtattcactgttcattataacggtttccgaaatatttaacaattcagagcagtcttaaacctaatatccctgatcctggcgattatgattcactttattttttttcaaatacgcctcacctatttctttatactcaagtccaatcgtttgtcccaaagttaggtaactctccattaaactgtaataaggctcttctttctcagtagaaagtcgatcaatcgcgcgataaacttcatgaaaggcctgtacttctgatgacgccgttttttccggcaggccttcataagcagtaatgcctaactctagtcctaatgataaaataaaatgaatcccatcaacatactcttctaaaattgtttctttcggtgaaggtgcttttttactccaatatttaaagcagcgcgtttcattcgcaagttctcctaattcaactttaagagcaagaagcttattttcaaacaaatcaacgtcatctagcccgtgttcttgtacaattcgatcatctaattgtttttgtaatgtaaataataactcaaaattcatttcaatcgtcccttcaaaatcttttcattttatgaaacctttctttatcatatacgtatagagaatagaagcatagtgaaaatgaggtgctgactaatgatacttatcctatttcgtcttgtcattctcgcagccatggtgttgattgcttattctgtcattcgcttttttatggatccaaaacgcaagctcgaaaaagcccacgatcataaagaatactattttttcgatgactcgtccaatgttcgaaagaattttcttgtcacttacaatggtgctctctttgaaggggaaaaataccttggaacaaccgaaaattcctttgatattatcacgctttctataggcgtaaaaaacgcctcagaactttatttacttgagaaagaagatttctattttctagagaaggaaatggacatccggtatccaagcgctaaaattgaatggaaaagccctgtgaaagaatttctgcgtcaccgtgaagactcataatgtcaaaagccccctccaagttggagggggcttttaactatcatcttatttcgtaatcgatttatcttgcaggttgaaaaaaatcctcccacttcataacccattcctttcttttaagtaaaaagaaaagaataacaaggcctaacagcattaatagaataagtacagggtcaaaaccactgatcgctgttccaaagaaggaataaaacaaagcaagaggcaagtttgatataagagaagagcgaagataatctcggaaatcctttgacacctcaattaagcaaagcgaaataaaatgaaaatgaacaaagggtaccaatcttagaatagcaatttgcccaattgacataggcatatgctttcgcgtccatctttccttcattcgaatgatttttttgaacaaacccggtgttcgtttcacgaccagataaaaaaccgaacttacaacagtaattccaatgaccgaatagatagttccatagatggctccaaacaatacaccacctgccacacaaactacactaactggcacaaaaacaaactgacgaataaaatgaaaaattatgaaatagaacggggcgtaaattccgctgttcgacacaacctcaacaagcggcaggacgagctcattcatgatgttccccccttccttttacctttatgacaagagacgagctgttatgtcaaaaagcgaagctccaagagaatattttctggaaatacgtggacaataaggggagatttgatgagaacggtaattggaggggatattagatggatgaactcgttattgctcgttcattgtttggcatgacaatgggcgtacatattatttacgctacgctcggagtagggctacccttaatggtgcttgtagctgaactcatgtatcaaaaaacaaaagataaggattacgcgctcatggcgaacaggtggacaaaagggtttgccgtattactcggagtcgcaattccaacaggaacgattgcaggcgtgcagctttctctgttatggccgggatttatggaggttgtaggacgagtcattgccttaccattccaaattgaaatttacgcctttttcctcgaagcactctttatgtcgatttatgtgtatgcagcagatcgactttcaccgcttatgcggatcgttagtgttacactcgttgcctttggcgcgagcgcttcagcaattttaattacaaatgtccatgcttttgaaggcacacctgctggatttgaaatagtagatgggaaatttgttaatgtggatccgtgggaagcattttttaatccttccttcatcgttacagcaggacatgtcacagtatctgctcttatgacaggtgcttttgtcattgcttctattgctgcatataaaatgattcgtcaacgagggaatacgcgtgaatataaatttcaccacaaagctttaatgatgggactcgttattggagggattttttcaattttaacggcgttaaatgggcatgaatccgctcagcaattgtatcaataccagcctgaaaaactggcagcggcagaggggttgttcgaaacacaaacatacgccccgcttgccataggtggctacacggataaagaggaacgagaagtgaagtgggcgatcgaagttccttgggcgctcagctttctagctgacgatgcatttgatacagaagttttagggcttgaagaatggccagaagatgagtggcctcccttgtttgtccatactctatttaatgcaatggttgggatcggctctttgttgatgctcctatcaatagtggggtttacctggtacaaaattctgaaacgaaaagagttcccgcgctggctgatgtgggcgtttattgctgccggtcctcttgccatcactgcaattgaattcggatggatcttcgcttgtaccggaagacagccatgggttatttatcacgtgatgaaaacagaagaagcggtgacaacttctggaaacatcggactgctatttgttctatttctcattgtttatatcattcttatgatttcaacagtgctcgtgctgcgttattatttcaaccgtaatccaattagtgaagaacttgatcaataatccaaggcattgtacgtctattaaaaataagaggtgaacaacatgtcagaagcattctacgccatcacattaatttggggacttgttttcatttatgcggttatggcgacaatcgatttcggtgctggattttggtcgatgatttatttaaatcgaaataacacgaaagcaacgaacatagcaaaccgctacctttctccttcctgggaagtcacgaatgttttcattgtagctattgttgtagcactctttagtttcttccctggagcgacatttactttagggacagtgctacttattcctggaagtttgatcattttattacttgcgctacgcagtgcctttctcgtattttcccattcagcatcggagaattacaaacggatcttaacactcatttcaggaattactggtttcctaattccagctcttctgatttgtgtgttaccgattacgcacggtgggtttatccaaacaacaaacggggaagaacgcttgttattgagtgaattatttacaagtccaagcgtctatgcatttatggcttttgctatctcaagcacactttttctgtcatcacttttactctctgattattcaaacgtatcagcagatcaagaagcttatcaaacgtatagaagagatgccatactcgttgggccaatctcacttgcgatggcaggtttgctcgttctcaccattcgaacagaagcgccatggctttatgaaaagcttatggactatgtgccttggctgattggttcgatgatcacttttgttatcgggtatctcgctctctttattccaagaaaaactggagtcggcatcccaagacttgctatgattagtattgtcattcagtatttactcgcaagctatgcttatggatcagcgcatctgccttatatcgtttatccaaatgttacgattgaaacaggctttacagatcctgctacgtttcgcgcactaattgtcacgtacattgtcgctttctttatcttaacaccaggatttatttatttctggcgcctcttcttaaaagataaacggtaccttaaacaaaatgaatcttaaacgcaaaaaacgcagcatatgctgcgttttatcattttacttattcaagtaaatagaaccgcctatcaaaaagatatgtacaaccataacagcaggaatgccgtaaacaaattgagaatgcttcgttttatgtctaaaccgtttcataccaaaataccctccgatactccctccaattacaataaaaagccacaacgtcttttctgaaatccttcgtgcactcttttttgcttttcgtttgtctactcccattattatgaaactacaactattgataagagccaaataaataaaaaatataataagaccgttcacttctcatttcccccttacttaaagctttctacaaaaaaaccatcctcaacgtgtgagaatggtttttgagaacttatttcaagttttcttttgcttttgatgctagttcagcgaacgctttttcgtcgttaactgctagctcagcaagcattttacggttgatgtcgataccagctgttttaagaccaaacatcaaacggctgtaagaaagtccgttcaaacgagctgccgcgttgatacgagtgatccaaagcttacggaagtcgcgttttttctgacgacggtcacggtaagcgtacatgtttgatttcataacttgctgattagcaactttgaaaagcaaagacttcgatccgtaatatccttttgcgagttttaacgttcttttacgtctgcgacgtgttacgtagccaccttttactcttggcatactaaacccctcctaatttctgtgtctaaataatatgaaaaccgattacttcttgttgtagattaaagtcttaatgcgcttgaagtcacctgcggaaacaagagaagctttacgaagcttacgcttctgcttttgagacttgttaccgaacatatggctagtgtaagcacggctgcgcttaagtttacctgatccagttttcttaaaccgttttgaagctccacggtgagatttcatttttggcatgagtgagttcctccttcaagaattacttttctgcgataggtgccaagattaggaacatgctgcgtccttccatttttggtttggactcaacagttgcaatatctttgcaatcttctgctaggtgctcaagcacctttttaccgatatcagagtgtgtaatcatacgtccgcggaaacggatcgatgctttcactttgtcacctttttcaagaaacttacgtgcattacgaagtttcgtattgaagtcgtgttcctcaatattcgggctcaagcgaacttctttaacggtaataatcttttgtttcttacgcgcttctttctctttcttctgctgctcatagcggaactttccgtagtccataatgcgacaaacaggaggtttcgcgtttggagcaaccatcacaagatcaagatttgcattgcgagccatatctaatgcctcatttttggatttcacaccaatttggtttccgtcagcaccaactagacgtacttcccgagcacgaatgccctcattgacgttcatatctctactaataatcagccacctccatggttattgttcgatgatgatcatctcacatgatgtcattaaatggtttatatccggttcaaagcataaaaaaagcgtcggcgcatacgacacccacacattacacaattataagaacagtgtacctgcaaactaccaattacggcgtcaatcaggtgagaagcgggcgcttctgcttgctttgtttccgatatttaattacctaagacagtataccatgctgaccaaatttatgtcaaggtgataagattcgttcgaagtgcacttgattatcataacgaatctttctctttgtgacaagtgttttttgtaaatttgtttcatcttataaaataaagccggcatctacgccggcttttcgttactttttgtctttaatttcttcttctattcgagcagtaaattcgtttagagaaacagtctcagaatcttgctggctgtagcgacgaacattaactgcttcaccttcaacctctttatcccctactacgagcatataagggatcttctgcatttgtgcttcacgaattttgtacccaatcttttcgttacgttcgtctacttcaactcgaattccagcgcgttgaagttttttctggacactcttcgcatactctaggtgtacatccgatacaggaataatttctgcctgtattggagcaagccatgttggaaatgcacctttatattcttcaatcaagaatgctacaaagcgttccattgtagaaacgacacctcggtgaatgacgaccggacgatggtggttaccatcttcaccgatgtaagaaagatcaaatcgttctggaagaaggaaatcaagttggacagtcgaaagagtctcctctttacctaatgccgttttcacttgaacatctaatttcggaccataaaatgccgcttcgccttctgcttctacatactgaacgttaagatcatccattgcttcttttagcattttttgtgctttttcccacatttcgtcattgtcgatatactttttcttatctgctgggtcacgataagaaagacggaatgaatagtcactaatattgaagtctttataaacttcctgaatcagctcaacaacttcaataaattcttgcttaatctgatctggacgacagaaaatatgagcatcattcagcgtcattgaacgtacacgctgaagtcctgctagcgcaccagacatttcataacggtgcattgttcctagctcagccacacgatacggaagactacggtagcttttcaaatcatttttgtaaatcatcatatggtgcggacagttcatcggacgaagcactaattcttctgtttcatccattttcattggcggatacatatcgtcttggtagtgatcccaatgaccgcttgttttatatagttctacgtttgcaaggtgtggcgtatatacatggttgtaaccaagacgttcctcaaggtcaacgatatatcgctcaattgtacgtcgaattgttgcccctcttggtaaccaaatcggaagcccctgacctacttcttgggaaatggtgaatagcttaagctctttcccaagtttacggtgatcgcgttctttcgcttcttctaaaagacgaaggtactcttctacctgggattgcttcggaaatgctgtaccataaatgcgctgtagcatttgattttcgctatctccacgccagtaagcacctgcaatcgatagtagtttaaaggctttgatcttactagttgaaggaacatgcggtccacggcaaagatcgaagaattcgccttgttcataaattgtcacttgttcatcgtcaggaatcgcttcaagcaattctaacttaaggtcatcgccaatttccttaaacattttctctgcttcagcacgactgacaacaatgcgcttcacttcaagattttcattaataattttcttcatttccttttcgatcttcggaagatcttcaggtgtaattgatacagggcaatcaatatcgtagtagaatccactatcaatgactggtccaacgccaagtttcacatcactataaagacgcttaatcgcctgagccattaaatgagccgtactatgacgaagaacttcaagtccgtcttcactttctggtgttacgatttcaatcgatgcatctacttcaatttcccggcgcaaatcaaaaagtacgccattcacttttcctgcaagagcttttttctttaagcctggactaattgagcttgcaatctcttcagttgttgttcctttattaaattctttcacagaaccatctgggaacgtaatttttaccatttcagccatgcttcttcactcctttttgcatataaaaaaacactcatcccaaaaagggacgagtgtttatctcgtggttccaccctgcttcccgtatagagaaaaccctatacggctcagattgctgtaacgtagcagaaacgctaccctatttccagggcagagttcaaaggtggtaagaatgcttgtctcgctaggaagttcacaccaatccttccctctcttaaagcagacagaacatctcatgtccttatcgtaacaataacgtatatgcgtgtatgtaggtattataagtagtgtacttatgaaaatcaagcttattttaatgattgccagaaaaaaagtttttaacccgtgacaatggaaaaaaacatagtcgttcttcaaaaacattacgaatggtttgagctaacccttcttccgtgtcttctgtatataaataaatttctttaggtgcaagactcagaagcggcaaaagtatttcagaatctatttcttctaaagaaagtccattcggaatggtatcaagcggttcatgcatcccattaagcttatgaccacttagatcatataaacggtaactgccatcaaaaacaagcacaactttttcttgaagagcttctcttgatttaagaagaagccttaatgcttctataaagttctgatattcttgctccagtttatactcgtcaatcgcttcgccaattagctctgttaataaggcacgataaggaccggttcgaaaccgtaaataagagtcaaacaagatcgttccaccctgttcaatacaagaaaatgttgatcgatgcaataaatccacccgatttgtgtagcgatcagacccaggaagttcttctttgtttccctctccaatactttttgcaatcgctgtaatttcaccaatttcatctttatcttgatagtaatattttgttgttaatatttgtttcatccactgcttctcatagatggagctaacacagcggacgatgcattgggatatgtgataacacaactttgcattatatggttccacttgtaaagagagtgttaattccgcttcattaacggaaattttttgtttaacgttcatatcctttatcaaatgttcataaacaaattgaaaatcttctttttgatcaaatgttattgaaaccaatgtattcccccctgtccaccttcttactaaaatctatatggcttgagattggaaatgatgtatagaacaataaaaaagccttccctaaggaagactttagactcgtctatttttcccctgtaaaaagactggggtggtaaaatgctttattctttccatgattcgcttcgctttcgtttcttcaattccacttttatgagaataagcgagatgctcctctaacaaggaataatccaaattagaagaataaagggttggtaatccttctgtcatgcgatattggagcagagcaccaagtatatcatctcgtacccagctcgaaatattttcagccccaatatcatcaaggattaataaaggtgtctcttttaagtaatttaacttttcatcaatcgattgatcttgtatggcactcttcatttgtcgaaagaaatcaggcgtataaataaactgtgaacgaacgcctttttccttcgctaactgatttgcaatcgcccctagaataaatgttttgcctacaccaaaaccaccgtgaatatagagccctttcttcgtttcacccggaacaaagtcctcgacgtattgaatagctgtgccaatcgcttcaattcgcacaggatcttcatcatccaaatccgcaaatgtcgcttcaagaatttcttttggaatatagtagctctgaatcatttcattgcgcttcttattcttatcttcttcaatccttgttggacagcggttataccgaatatcgatgactgaacggttaagaaataactccggctcgtacccttgcatcatattgatacagttggagagacccgggcatccctcacaccgtttagactgagtcgtaaattcatataatcttgcaagacttcgatcaatcattttttcatcgacttcatcttgttcctcaataaatgcttgaatatcttcatctgccatgatcgcttttttcatttcttgatattgctgttggaacttcttgttacccggcattttattaaaggattcttggatggactccatacgtttcaccccgctttattttttgtatttgcttagcatttttttaagctgatcttgtttttctgagcgttcttcatgagacatatccggttctttttgatccgatatccattcaggaactttgtcttttcgagctgaagaacttccttttcctcgagatgctggattcgtttttttcttgggctgctgtagttcttttatggcaagatccatggcttctctcactgtctttaccctggctcttgcccagtgacttgcaaatttttctacgtagtttttcgagagtttcttatcctgtgtttcaataataaaatcaagaagaacgttcattacaccaggagttagcttctgttcatccataatacgctctacaagtttcatatctgcttctgatggcttaccaccttctgctgcacgttgaagaatatcataaggtgtcatttgctcataacgctgagcggccttctcctcttccgttataggctcttttgtatggaattcttgcagtgcagcaggctgtcgcctatattgaagcgcaggtaccttccctcgattttcaagagcaaaccagctgcttacttcctttcgaagaagatcatctgaaagctcatcatgatgaatggctgcctgttccacaattcgccccatttcataaggctcaatcttatagacaaaagcaagtcgctcaattgttttcttaaccgagtcagtaaacatcttctctgttacaatcatatcagaaatgtgctgtttcatcacatcaaagtcaaactcagatgaagtgaaaacaagacccttattatcatttcgacttgcgatctctcgaacttcatcttcttcctcataacctgccgtcatctcagaaggatgcagagaatcgtatacttcgttaaacgaagcagtcatatctttatattctgacagatctggcttttcaacagagaagtacttctttaaatcctggtatcgattacgccctaatcgattgaacaaataaatatttaaaacaccgtcattaaaaaaacgatcaggtgttagaggtggctgaagctcgtaagtaaagtgtctcgtatcttctccgtttttgaggaaagtttttaataagccgatcccctctagctttcgtcgctcttcaagtagtttttttgtatcccatctcatcatcagtaataaatgatggtgagtcatttttgtaacaagactgtcctgttgctcatgggcactccacatcgtcatatagagactgtatgcccctgcaccaattaaaggctgatataacagggtaaggacattcctatcataatcatgcaataacccgaacgcctcaatttgaagcgtatcaacaggaagaagttctttccaatgcatatgcttcacctttatattccttcatagatttttctaactaactgatagcctgagacataataaggtcttgactcataatggcatttgtcttattgacgtacaaaaaaagagcttacactaagctccttttccttactctgctctgttaattaattctttaagctcacgaataaagacattgatatctttaaactgacgataaacggaagcaaatcgaacgtaagccacttcgtcaacttttgccagttgatccatcacaagctcaccgacagtatcactactgatctcggaagctccctgattacgaaggtcgcgttctatttcatttacgatggtttcaagtttttcgagcggcacgggtcttttctcacaggctttaattaaacctcggagaattttttcccggctaaactcttccctagctccatcttttttcacgacaataagcggtatttcttcaactgtttcaaacgttgtaaatcgataggtacacgattcacattcgcggcgcctgcgtatcgatcggccttcgtgaaccggtctggaatcaagcactcttgtaccattatgattgcagttgggacagcgcattagatcatctccactaaacgaacaagatttctacctcttattttagcataaaatgtgtgatgatacacatcctactaaatttgctctgaaatgcctgttccaatcaacgttagctttttcttcaaatctgaataaatcgtttcaattacctttttactaaagccaaaatctacaggtaatggtgtctctgtcgaaactgaaaaatcaaccgctgttttataagcgcgtacggttacgactgttacaacaattaacgcttttttaggagctttcacttgaaatacaaattctccgcgttcgggtgaattggtcacaatttcacctttgtagtgtttttgaagaatggctttcgcttctgtaaaagcctgttcttttgtggctttaaaataatgcgttttcagtgcatcattttgatgcctttcccctgtttcagaacgattgttgaaaaactcttttattcccacccctagtcctcctctattttttttaagaatagcaataaatgactgataaatcaatgaggtcgcgctaaatcgccattcatcaaaagttaagaaatttattggctaaactaaaaaagggcacccagggtgcccttttaatcgaagtattattattatgaagtaaacgctgactgttcttctctaactttaggttttacaggtcccatgcctcgtggaagttccatgttctcacgcgtatccgctccaagtgcatccgcaatgtagtttgcagctacgtttggatcaagatcaccgcaagtataaacatcaatacttgcataaccatgttccgggaaactgtgaatcgttaaatgtgattcagaaataataacaacaccacttacaccctgaggtgcaaatttatgaaatgctacttcccgaacctctgcaccagactttagagcagcttcaacaaacgtttcttcgataaatttcatgttgtttaatttttcagtgtcacagccccatagttcagcaatgacgtgacgtcccattgtatccatagcaaaattccccctttatttttactcatgcctaaagcatgcggtattgaaaatccaccacgggggaaagttagtccgatgaggtcctaaccctttaagtagttttcaatgccaaattgctataaaagaagttcacgaaaaatagtataaggcttttaatttttttttgcaagaataaattaaatgctgattttgtttttatatcttcaacttcacaaacccagtgtctttgctactctttccgcgataattaaaacatatccaaaaaagtcgagatttatcctttatttcagaagccgtcataagtgataacaaatcaaaaaagaagcgggagacgttctcccacttccttccttttcacctatacgcttactttcaacctttcgggaattctttccccaacgtacttcgccatatcaacgactcgacaagaatatccccactcattgtcataccaggcaagtacctttacttttttattttcaacgaccattgtcgatagtccatctacgatagaagaatgagcattgccattgtagtcaattgatactaatggttcatcagagtaagcaagaatacctcttagcggcccctcagaagcagcttttaaagcatcattaacttcatcaattgtcacttctttcttaagatcaaccacaaggtctactaatgaaacatttggtgtcggtacgcgaagcgacattccattaagttttccttctaaatgaggcaatacttttgaaatcgctttagctgcacctgtcgacgttggaataattgattggccacaggcacgtgctcttcttaaatctttatgcggattatcgatgtttttctgatcatttgtatatgcatgaactgttgtcatcatacccgaaacgattccaaaggacttatcaagcacttgaacaaccggggcgagacaattggttgtacaagatgcatttgatagaacatgatgttcttgatcattgtattcgctttcattaatgcccatcacaattgtaagatcttcattcttacctggtgctgtaataattactttcgtagctcctgcatcaatatgataaccggcttcttctctcgtacgaaactttccggtagcttcaatcacaatgtcgattcccatctctttccatggaagagtttttggatcacgattatttaaaacaaccacttttttattgttaatctttatcccattctcaattggtgtaacctctccatcaaatgtaccgtgaatgctatcatatttaattaaatggctgagcgtttctggcggatagctagcattaattgctacaacttccaaactatcttccattattgcctttctaaataccattcgcccaattcttccaaagccattaattgctactcttgatttcattcagcgttcctcccgccacatatgtgttatacttatttcccttatcacaaaattagtataacatataatatgcaaatgaaaagattaatttacactatttttgtggaacgtctttatctaagcacataacgattaaaaaacaaaaaacacgtcgttttcagacgtgttttttgtttatattatttcccatttttttagaatgttgttaaggtgttcttccgtctcttcacgtgttccagtgttatcaattacgtcatcagccagttctttcttttcttcaatgggcatttgcgattggatacgatcaaaagcctcttcttccgtgctaccatccctttcaactaatctcgatagctgggtttttgcatcgacataaacgagaagggtatgatcaaccatatgagttagctgactttcaaataacagcggaatatcgaaaacaatatgcgggcttccctgttctttaagagctgctgcttgatcaagcattcctttccgaattgcaggatgaagaacacgatttaatactttgcgcttttcctcatctttaaaaatgacagatcctaacttcttccgatcaagcccgccatgttctgctttcatgtcatctccaaacaatcgaaagatctcttgaagtgctggctcaccaggttcaactacttttcgtgccattacgtctgcatcaatgattggtatctcatagcgtcgaatcatctccgctacagtactttttccgctagcaattccaccggtaagtccaatatccatcgtctttctcctttcactacattctcatgaatcctaaaataatgagtaggcatcctggtaaaaatgatagtttatccatccatttaatgtttgaagtaaggtttccgaactttaatcctaagagcaaaaacagcgaactcatacaggcaatcaaaagtgacgtttcaatgggaggaaacccaaccattgaagcacctatgcccgctccaaacgcatcaagagacaatgcagcaccgagcataatcgcttcaatccctgtaattgtaccagaatcatcaaaatctgctgttgtcggttttctcaaaatgctgataaccactccgagcgagcggatttcataatgaagaagaattcgctcagaaaccgttttttcaacctctttgttgttacgaatcatttgatacaatacccatccaccgagcgcaataagaatgccgccaccaattcgctgagctactatatctgaaatccataactgtaaaagtgagccaaaccccattgcgattaacatggagatcgccgaacaaatcgaaataataagaatcgacttaaaaggaattttcatccttctgaggccatacgttaagccaactccaaatccatctacgcttacagcaaatgctaagaaaaaaagagaaacccagtacataggcgagctccttccatactaaaatcttaaatagtatatgaaaggagcccatccaacgctacgactcactcattcacctgacagatcggacaaaacgttgttcctcttcctccaacaacgattttctcaagctcagtttgacagtttttacacccctgaccgacgcggccataaacaaagagattatcctgataagtgcctactttcccctgactgtttacataggaacggattgtactaccgcctttattcacagcatcagataacgtatgaacgatctgttctctaagtgtttcaatttcccagtttgaaagcgtcgatgcgattcgctctggatgtattctagctttaaacagtgcttcatcaacataaatattcccaagcccaacaacaagcgtttgatctaacaacactgttttaacttttcgagaggttttttgaaacccattttgtaatacttcaggggtaaaatgttctgaaaaaggttcatgtcctagttgcgcgagtggcaactcgttttcctctaatccaataggaaaaagatgcatcgtaccaaacttcctcacgtcatgataacgaagctccgttccatcttcgaacgtaaaaaacacatgcgtatgatggtcaaattcttcatcgatagcagataacttatattttccttccattcgaaggtgagagacaatcacatcatcttcaagaaccagttttaaaaacttccctcttctttcaacacctgtaaaagtctgaccaatcactttcattttgaaggcttcaacatcatctggtttcttaatgattttaggccactttacaacaacatttgtgaccttctttccaacaatcaaaccttctagtgtgcgtttaaccgtttctacttctggtaattcaggcatatttccctctcctttgatgcctacttcgcatcataccaggtggagccatactcataatcaactttcagtggcacgtcaagtttgattgcagattccattacttcaggtacgatacgttttaacgtttcaatctcatcttgtggtgcctcaaaaatcaattcatcatgtacttgaagcaacatacgtgtttctaacttttcttcttttaagcgtgtctccatttgaaccatggcgagcttaataatatccgcagccgttccctgtattggcgtgttcattgctgttctttcagcgaagccacgttgattaaaattccgagaattaatttcaggtaaataccttcttctctgtaacagcgttgagacatatccgtcttcttttgcttttgtgacaacgtcttccatatagttttttactcctggaaagctttctaaatagcgttcgataaattctcccgcttcttttctagaaacgtcgatgctttgcgataaaccataatcactaataccataaacgattccaaagttaacagctttcgcatgtctgcgcatattcgacgtaacatcttctttatctacattaaacacgttcatcgctgtttttgtatgaatatcttcatcctgctggaaagcctcaatcaaattcttatcttgcgcaatatgtgcgagaacgcgtagctcaatttgagaataatccgccgcaaacatcacccagtcttttcgagatggaataaacgcttttctgattttgcgaccttcttcgaggcgaatcgggatattctgtaaattcggatcggtcgaactgagtcttccagtctgtgttaaagcttgattaaaccttgtgtgtattttacctgtatctgagtaaataacttttaacaaaccttcaatataagtggaatttaatttaccgagctgacgataaaggaggatttctgggattacctcgtgtttactttcaagcttttcgagcacatcagcagacgttgaatatccagtttttgttttcttaataactggaagctccaacttctcaaataaaacttcaccaagctgtttaggcgagttaatgttaaactcagttccggcgagttcaaaaacctttgcttcaatcttactcagtttttcatttaactcttcgcccatcttctctaggaagttggtatcaacggaaacaccttttgtctccatttcacctaaaacaagcgtaaggggcatttctaggtcgtggaacagctcatactgctcattgtttttcaactgttcttcaagcttgtcttttaattgatataccgcataggcttttcgaacaaggtgatccgcaaactcttcaacttccggaagtttacgtttcgctccctttccataaatggactcatctgaagaaacaatagaaaagccttctcgtctcgaaatagcagataaatcatgcgtcgattcagatggatttagaagataggaagcaatcactaaatcaaacgtaataccttctaatgaaatgtccttccaacctaaagctacaacggctcttttcgcatcaaaaacccatttcttctgagtacgatcttctagaaaatttcgaaacaactgagactgcagagctaaatctgttgggataaaataatttcctttttcattcacaagggagatcccttgtatgtcggcattatggtaattttcatccatcacttccacaatcatggcagaaggactaacgagatgtttggcttctatctcgttgatcgtctcaaaatctaagtcatcgattttctcgtcctctacttctgtccccccgattcgattaagaagagacttgaatccaagttcactaaacagtgtagcgactgattcctgatcataaccgctgtagcctaaatcagttattcctaattcaagcggtgtttctttaaaaatcgttacaagctctttgctcatcatagcctgctcttgattttcttccaatttttcttttagctttttaccagaaacatcgtcaagcgattcaaaaacggcatccaccgtgccaaactgttttaataatttaagagccgttttttctccaacaccaggaacaccaggaatattgtccgagttatcacccataagcgccttcatatcaatgatttgatcagggctaagtccgtatttttcacgaaggaaggctgggtcatatgtatcgatatcggttattccttttttcgttagggctacgtgaacgttatctgaaacaagttggaggagatctttgtctccggaataaatcttcacttcccaatcttctttacttgcaagatccgatacggttcctatgatatcatctgcttcataattcttaatttcatatcgcttaatttgaaatgcgtccagcacttcacgaatgacagggaactgttcgcttaattctgaaggcgttttctgtcgccctcctttatactctgtgtacgttttatggcggaacgttgttttaccggcatcaaaagcaacgagcatatgtgttggcgattcattctctataattttcagcaacatcgtcgtaaatcctagtacggcatttgtatagacacctttatcattatttaacaacggcaatgcaaaaaacgcacgataggcaatgctatttccatcaattaaaactaacttgttcttcaatagaagtcctccatttcattcattacgcaatttatcgatcactgtacatccaaaaagacgcctgctccatatattttaccacgatggtaaaaagaatgaaaaacaagcgtccaactgattaattctgttttgctaatcaaagacaaaaaaaagagagacgagaaaatctcgtctcaaaattgtgctctcgtcatgatgaaggggtcaattgttactttacagaaataatttaaaggacatataaacagactgtaaagaaatcgtaaagattaatattgtctctctttatttaaagtgatgacaaaagttgtcccttcaccaggttgactgttaactccgatgtgaccctggtgagcttcgacgaggtgtttcactatagcaagtccaagacctgtcccaccagaatttctacttcttgcacgatctactctgtaaaagcgttcaaagattcgcggaagctcttcttgtcggattccaattccgttatccgagatcgtaaactgaacggcatctttttcttggttaacgaaaatcgtaacgcttcctccttctggagtatacgtaatactattggcaattaaattaagaaacacttgttttaaacggtttgcatcacctttaatttgaaggtccccattatagatgatttccacttcaatgcttttcttatctgctttactttttgtcattaaaaggcaatcatcaatcacttcttttaaatcgacatcctgccaatttaacgcaaaatgcttttgttccatctttgagaggtcgagaagatcctgaatgaggctctgaagacgatcactttcatttaaaataatcgtaagaaaacgagtgcggaaggctttgttttccatagctccatcaagtaatgtctctgcaaagcctttcaatgaagtgacaggcgtctttaactcatgagatacgtttgctacaaaatcttttcgcatttgttcgagcttttttaactctgtaatatcgtggaaaacaagaacaacaccttttagcttttcatcatggttaaggatcggcgcgcctgagacgtcaaagtggcgcatttcgattccaacttgtaactcaacttgtttcctaacagtttgctcaaccaatagcgtctcttccactaatcgaatgatttctctatacggaagtgcttcataatagagcatatctaagtattcttcggttttgatatgaaacgtttctttataaaaacgattaacgaggttaatatgacctttggaatcgatcagaattaaaccactatccatattttcaattaatgtcatcaaccggttttgctgaatttcataagaatttgtcatgttttgtaaattacgagcgagaatgtttaaggcgtgactaagttgccccgtctcatccagcttatattcataagttcgtgctttaaaattccccgaagcaagctcattggcaacattcaatgccccttctaaaggttttgttaactgatttgagatgcggagactaaggtaaataataatgaaaaaagcacctgtaaatgaaaagattaagattagccacatatttgataaagcctcttcgctagcattatcgaatagaattccttcaaataaattacctatgaaaacaactaagatcgaaaagacaagaaaaagtataacgaattgagcattcagaaaacgtgagcggaaccgcttcatttaacggaaggctcctctaacttatagccaagccccctaattgttttaatgtattcaggtttacgcgtattttgctcaattttttccctcaaatgactaacgtgtacgtctacaatccgggtatccccaacaaaatcataattccaaaccgcactcaaaagctgctctcttgttagaacacgacctttatgacgtacgagatacactaataattcaaattctttaggggtaacctccatcatttctccctggaaaaatgattcgtaattattaggataaacttctagttcacctacctggattttctctgattcttccatctgggtagctactttagattcttcaagctgttttacccgcctaagaatcgctttaacacgcgcaacgacttctctaggactaaacggctttgtcatataatcatcagcacctagctcgagaccaagtactttatcaaattcatcatctttggcagtcagcattaaaacaggcgtatgaatgtgtcgttgtctcaattccttacacacctctaacccatccatttcaggtagcataagatcaagaataatgcaatttggcttctcagcctcaactactttcaatgcttctgcaccatcttcagccgtcacaacatcataaccagcttgttcaagattaaattgaagcaatgttaaaatcgacatttcgtcgtctacaactagtattttttgagccatcgtaaaatccccctaacgaatttccccattcatcaatgccgatgccaggcttttcttttattttagcctgaataccctcatcatactattattttcataaaggcaaaagaaaaacttgggtgttttagcagtatgaagcgcttttatcaaaaacaaatgaaaaatgcataaaaaaagagccttattcaggctctaaaaattctcaaaggatgttgactttgttaatggctttgcaggatatggcgggcagacagtaaacataccgtctaagatagcttctcctgtttcatttatgcccttaacgtttatttcaacttcatgtgcttttgtaaacacgttcataacttcaaactgaaaatgaagtgtctcataatgatggacgggattctcgaaaatgacttcctgctttttaatactactccccggcccaggtaaatacttagatatagcacctgttacaattgcaagaagcataatttgcgggacaatcggttttttgaaaggtgtcatcgaagcataatcatgctgaataaaaagaggattattgtcatttgacagcccgagatataaaagaaggtcccgatcctctattttttccgtcacttcaagtttttcacctactgacatttcatcgatcattcgtccaagtttacgtttttttcctagtaacatcactactccccctttttgaaaacgttttctttttgttttaaaaagagatccggttctcacaccggatctacgttattaacctaataccgtcattactttacgaacggaatcagctgatttatctagctctttcttctcttcatttgttaaatcaagttcaataatttcttcgataccgccaccgccaagaattgtcggtacaccaaggtaaagcccgtcataaccatactcgccttcgaggtaggcaatcgttggaagaacacgacgctgatctttaaggatcgcctctaccatctcaacaagtgaggcagcaggtgcatagtatgcactaccatttcctagaagacttacaatttcgccgccacctttgcgcgttcgttccacaatttcggcaaggcgttcttcagaaataaggctctgaagtggaataccacctgcaaacgaatagcgaacaagtggaaccatatcatcaccatgcccaccgaggacgaaccctgtaatatctttaacagaaaggttcaactcttcagcaataaatgaacggaatcgggcagaatccagtattcccgactgaccaatgacacgatttttaggaagcccagactccttaaacaccgtatacgtcatggcatcaacaggattcgttaacacaacaatggtagtttcaggagaatatttcacgatatcctgagtcacacttttcatgattttcgcattcgtattcacaagatcgtctcggctcattcctggttttcttgcaattccagccgtaataacaacgatatctgaatctgctgtatcttcataatttgaagtaccggtgattttagaatcaaatccttgaacagggcttgcttcaaacatatcaagtgctttcccttttgtcgggccctcctgatttgggatatcaacgagtacaacgtcagcaagttctttttgagctaaaagaaaagcagttgttgccccagtaaaacctgcaccaattacggaaacttttttacgtttcactgtcatttaaatgccactcctttcatacaaggaaaaatagtgatttattttagtccatattattgatgagttcatcaccaaattcagatgttttcacttccgttgcaccgtccataagacgtgcaaagtcatacgtgacaactttatttgcaattgttttttccatggaatcaagaacaagcttcgccgcttcattccatccgatgtgctcaagcataaggactcctgaaagaataacggaggaaggatttactttatcaagaccagcgtattttggagccgttccatgtgttgcttcaaagatagcgtgtccagtttcataattgatgtttgctccaggagcaattccaattccacctacctgagctgctagagcatcagaaacatagtcaccgttcaagttcattgtagcaactacgtcaaattctgctggacgagttagaatttgttgcaagaaaatatctgcaatggcatctttaacaattaacttgccttcgctttctgccttggactgtgcttcgttcgcagcatctttccctttttcttcaacgatgcgatcgtattcagaccaagtgaaaactttgtcgccaaattcttgctccgctacttcataaccccagtttttgaaagctccttcagtaaatttcataatattccctttatgaacgagcgttacatttctgcgcccctcatcaagtgcgtactgaatagctgcgcgaaccaagcgcttagtaccttcttctgaaacaggcttaataccaataccagacgtttcagggaaacggatattttttgcacccatttcatcttgaaggaaagaaatgatttttttgacttcatcagtacccttttggaattcaattcctgcataaatatcttctgtattttcgcggaaaataaccatatcggtatcctcaggacgctttacaggtgaaggaacgcctttaaaataacgaactggacgaagacaagtaaataaatcaagctcttgtcgtagagcaacattcagcgaacgaatgcctcccccaactggtgtagtaagtggtcctttgattgcaattatgtattcacgaatcgcatcaagcgtatctgccgggagccattcacctgttttatcaaatgctttctgacctgcatatacttctttccatacgatttttttcttaccaccataagctttatcaactgcgccttctaatactttcgaagcggccgcccaaatatcaggtcctgttccgtcgccctcaatgtatggaataattgcatgatctggaacgtttagtacaccattatttacggtaatcttctctccattagccattatatattcctcctagtgaatgattaacatttaataaaagggaagaaaccttccctttttttattatctattttctacttttacatacgtttgatttgtcgcccctacgtattcagcacgcggacggattaaacggttattgctgtactgctcaagaatatgagcaatccaaccggatacacgactgactgcgaatagcggtgtgaacaaatcatgatcaatcccaagactatgataaacagaagctgaataaaaatcgacattaggcgggagacccttttcacttgtcacgatttcttccatctttgtcgatatctcgtaccactttgtttctccagtaagttctgttagcttacgagacatttcacgcaaatgctttgcacgtggatcaccagttttgtatacgcgatgtccaaagcccatgatcttttctttattttcaaatgcattctgcaaatatggttcgacgttatcaacgcgatcgatttcacttaacatagccatgacacgttcgtttgctccaccatgaagtggtcctttcagtgcaccaattgcagctgttacgcctgaatacatatctgaaagtgttgcaacacatacgcgtgcagtaaatgttgaagcatttagctcatgatcggcatggagcactagcgctttattaatcgctgtaacagcaacttcttctggaagttctcctgttaacgtataaagaaagtttgcagcaaagctaagatctttcttaggctctactggaactttcccttcacgaatacgtgaaaaagcggttacaacagttgggatctttgcttgaagacggatcgctttacggtaattcgcctcttcactcatatcgtccgattcttcatcataaagtgcaagtgtagaaaccgctgtacgaagagccgccattggatgcaccttatcgattggatacgatttcatttgattcacaatttcttcaggaatagaagcgttactagcaaattctgctgtgaattcctcaagttcagtcttattaggaagtttatcgttccataatagatagattacttcttcaaaactagcattttcagcgaggtcatcgatattatatcctctgtatgttaagacatcatttacaatagaactaatcgatgatgttgttgcaactacgccttctaatccgcgagtagtcgtcatacgtctccctctccttttccatattattggctctagtattttctaaaaattctgctttgataacgcttttaaaacgctccaaaaaaataagaacctatgtacaagatggtgcgtcaattctcattataaacaattctctgatatttgtgaatgaatatgcataatttcgtcgattcctttttttctcaaatgtccgaaaaatgataataaagaagcgaattatgcaaacgttatgcccttctgagcagacgttcaggtgaaaaattcaacaaccttcattgccatataagcaatgcccgccccaatcaatggaccgacggcaattccttgaaaaacagctacggcaagaattgtaccaaatacaagcgctgttgtaatatgcggatcattttgtagtaaaacaatcccttttgaagcgatgatcgcaacaaatataccagctcccattgcaatccatgcataagaagatttaactgcttcaccaagttgcttaaaacctatttctccattcgcaattggtacgagcacggcaatcgtaatgattgttactccccaggagattccttttgattgcaatatcggaaagactttatcaccaagtcccaccgctttcacaaccaataagatcgctacggcaataataagcgagctattcttcgcaataagcgcgattgcaagtaaaatgagtaaaaaaatagtaggctgagaaataattgacataacgctccctctttcacattagcagaactcttttagcataacaaacttttagaaaataagcacgaaactggtttactccaattgctagttttaaagcaagcggtgtaaaatataggaaagggatcctaggagggttaaaatgaattggaaatatatacatagagttttacgttttttctttgtaatctttcttattattctttccttaattgccttttattatatttggcatcttgcttacccttttgtaattgccttactccttgcttttttaatcaatccaatggtcgacttattagaaagaagaggaaaaatcccaagaccctttgctgtagctctctccattttatttctaatcggagtgcttgcagcttttattgcccttctcgtaaatgagcttgtccagggcgtcgtttatatcgctagcgtattaccaggaaactttcaagaaatcgttcgtttcgtagaagaactcttcgtgtcacacgttatgccactttataatcaattagaagacctgtttaaagatttaaataaagatcagcaaacgactgttcttgacaatattcaatcgatcggcacaactgttacaaccgctgtaaccgatattcttcaatctcttgttgaaggaatacggtcgattatcgttagtttaccaaccatattaactgtgcttgtcttctcgatgttggccactttttttatcagtaaagactggtataaattcattaattggctaaaaaagaaggtgcgtagtgatatccaaaagagtattggtacggtctatgttgatttaaggcgggctttgttcggctttcttaaggcgcaacttacgctaatctctatgacggctattatcgtccttatcggtctatttattttgagagttgattatgcgatcacgattgcgattattattggcctagtagacctcttaccttaccttggtactggagcaatttttgtaccgtggatgatttattcttttttaactggtaattatgctctaacaattgggctttctattctctacggagtcgtcgtcattcaacgccaagttatggagccaaaagtcctttcttctaatataggacttgaccctctcgcaacattaattgcgctattcgtaggctttcaactatttggattcatcggcctaattatcggtccagttcttctcgttgttcttaaaacactttaccaagcgaatgtatttaaggatatatggggttatataaaagggtcatccgttaaatagcgaaaaacaagattattgatcaacaaagcttattgaaggcaaaaaagcattaaaaaaccctaggagcaacgtacaaatgatacgttgctcctagggtttaatttgttaaaagcatgaatcttttagctcaaccattatttttgtacttcagtagcgtcataaactttaacgtctaatggagccaccaaatattctggtgctttcccaacaaatgcttgaaaatgagcactttgattgtgcttttcgactgcagccatgtcttcataagcttcaatcattttatatgtgctctctttttcaatctctttcgtcaaagtataagaaaggtttccttcttcttttctagcttcttcaataagagtagctacttcgttaagaaacgcttcttccttagccgggttaatttgtaatcctgcatgaataataatcattcgttatctcctcttttcaatgtttatttttatttccactctgtaattgattcaacaggtaagcgaacagatttgtacccttcgtttgctgctttgccaattgaaatcagcatcactggatagtaacgctctttatccataccgtaagcttcagcaatctgatctttctcatatccaccaattggatttgtatcatatccgtgtgctcgagccgctaacatcaattgcatggacactaacccaccatcaatgatattcatttctctaaattgctcagttgacataccttctaacaagccttttatcgctggaagctgttgatctcttacttctgctggcatatatcctttttgtacagcagtgtcataaatttcatcagcatagtccaggctgttcatatctacaaataccgcaataactgctgcagatgtttcaacttgtgattgattaaatttagcaagtggtgctaatgttgtttttccctcatcgctatcgataacgacaaaacgccaaggttgaaggttgactgaagatggtgccagagtagcttcagttaaaatttccgtcatctcttctttagtaattttgactgacggatcgtaatgacgaattgagcgtcgtcctgtaataatttcattaaagtcatttattttggttgcattcatcgttaaatctccttatgtcatttcttgttagtattgaatttcttcaatgttatattgaatacgactaagcatattcgataattcggtttgttccttctcactaaagtcttttagcactttccgaatgaattcttctttctctattcgaaaagaagcaattttctctctaccttcttctgttaacctcacaaaggtaaaacggttatcatctggattcttgcgtcgagtaaccatttctttaacctcaagctgctttaaatgtcttgttacagcagcactatcaatattgacttctttctgcaaagctgtttggctaatttcctcaacctcaaacaatttatgcaggatctctaagcgagactgactgatgccagtacatctttcgaatttcggactcatttgtttgtatatatcatttaacttgtataatattttacctttatctgagcaagaagccttcaacgcatcctcctccaatcatttgatgggtcaatcattgactcatcaactaatatactagttgtatttctgaatgtcaactggaaaacactaattaattgataggtcaatcattgactggtcaattaaagtagtagacgaatggttttaatatcaactaaccgctcactactccacgaaaacaggagcttgaatgtatactcaagctccttaatgacttattttttatgatgattactcacgcgctatatggtacaattctttaccttctaataaacataaactgaccattattcattcgacgttcaaggaatttcttaatccatctcttaaatggttttctggttgccggtacaagaagcaaaaagccgactgcatctgtgataaatcccggcgtgagtagaacgacaccacctacaagtatacacaaaccatctagaatagcttctccgggcatttggccagtctgcatttgtctgttcaccttctggatcgtctctgctccttctttacgcgcaagccaggccccgaggattccggtacctataatcaataatactgttggaataagccccagtgttcttcctgacagaagtaacaaagcgatttctagagccggtacaatgataataaaaagcaacaaaatacgaaacatgacatagctccctcaattataatcgggaaagtgtcccgttatccctattatacgtgtttttcaatttttttcgaactcaattgcctcattcgttcattataaagaatacccacaagaatttttggagtatggaaaaaggctgtcgatttactcgacagcctttaaaagcttaaatcatacttataggatacttgctttcccgttgtaaataattcctgttgttgcatctaacgttacttgttgaccctcttcaaatagctcagtagcattctcaagaccaacgactaccggcaaaccaagacttaagccgacaacagcagcatggcatgtaagaccgccttcttctgtaataagtccagctgctttttctagtgcaggaaccatatctttatcagaagcaatcgtaacaaggattgtgttagcatctgctttttgaatcgcttcttcagctgtttttgcaatcgcaatgcgtcctgaagtagatgttttgccaataccctgtgcttttgcaagaatatctccgataacgtgaactttcatcaagttcgttgtaccagattctccaacaggtacacccgctgtaatgacaacagtatctccgtgattaacaataccagattggattgaagcgtctacagctacttctagcatttcatccgtagtcgagactttatgtccttcttgtgcgtgaacgccccatacaagagcaagcttgcggcatacgctagctgtattcgttacagcaacaattggtgccttcggacgatatttagagatcatgcgagctgtatgaccactttctgtagctgttataatagctggtacatttaagttataagctgtgtgtgcaacagattcactgatcgcatttgttgtatttgtttcagtttctttacttcttacagaaagaagatcacggtagtttagtgatttttcagtgtatgatgcgatgttatgcatcgtttgtacagcttcgattggatatgatccagctgctgtttcacctgacagcatgatcgcatctgtgccatcaaggatcgcattggcaacgtcactagcttccgcacgtgtcgggcgaggattacgctgcattgaatcaagcatttgtgttgctgtaataactggtttaccaagtgcattacatttcttaataagctgtttttgtactagaggtacttcttcagctggaatttcaacaccaaggtcaccacgagcaaccattaagccgtctgagatctcaagaatagaatcgatattatcgacaccttcacggttctcaattttagggataatttgaatatcagtagctttatgcttctctagaagtttgcgaatgtcaagaacatcggatactcgacgaacgaatgacgcagcaataaagtctacaccttgctcaataccgaattcgatatctgcagcatccttatctgtaataccaggaaggttaacacttacattcggtacgttaacaccttttttgtttttcaacgttccattatttagaacctcagtatatagttcattcttctcgatttgcttaacttcaagttcaattaatccatcgtcaagtagaattttagatccaacgtgaacatcgttaacaagttcaggatacgtaacagaaatcttttctgttgtgcctagaacttcttccatagatacgataagctgttgacctgcttcaagatcaatgccgccattttccatattattcgtacggatttctgggccttttgtatctaaaagaatcgctacgtttttacctagcttctcagccactgaacggattgacttaatacggttaccgtgttcttcaaaatcaccgtgtgagaaattcaaacgagccacgttcattcctgcattaatcaatttttctaacgtttgttcattttcacttgctggtcctatcgtacagacaatcttagttttgcgcatgggtctgtctcctcctaaaagctatgcttcaattagttttcttcataacagagttgttatgtattttttcaggcattacgatacaccccttaactatgaaggggtgccccgcatattgctaaatggatagctcttttgcaagctgacacattttctggttcacttcgtgtggaagtgcaagagcttcgttaatatccagatcaacaatttggttcttttgaataccgacagttctaccttccgctccttcaagaagaagttcaactgcacgtgctccaagacgacttgctagaacgcggtcagatgctgttggtgaaccaccacgctgaacatggccaagaactgttacacgcgtttccatgttcatttcttcttgaatttgctttccaatttcaacgccgcttccaacaccttccgcaacaacaataatgctgtggcgctttccacgatcatgtccacgcttcagacggcttagaatgtccgacatctcgaacttctcctcagggataaggattgattcagctccatcggcaagtcctgaccataaagcgatatccccagcgtcgcgtcccattacttcaatcacatatgtacgctcatgtgaagtcgccgtgtcacgaattttgtcaattgcttgaataacagtattcaacgcagtgtcaaagccgattgtgaaatccgttccaggaatatcattatcgattgttccaggaattccaatcgttgggaaaccatgcccagtcaatttctgagcacctcggtaagaaccgtctccgccaatgacgactagcccttcaataccaaacttctttaagttttcaacacctttaagctgaccttcaagtgtcttgaactctggacaacgtgcagagtaaagcatcgttcctccacgatgaatgatatctgctacagagccgatttccattttctctatatttccattaatcaacccggtatacccgtggtagatcccataaacttcaatatcatggtaaattgcttttcgaacgacagcacgaatagctgcgttcattcctggtgagtctcctccgctggtaagtacaccaatacgtttcataactgttcacctcattagttctttgtgttattaaaatatcaaatacagccccttaatacaatagcaaaggtccatcgcaaaaaagtgctttctcttttgtgagaaagcactttccttatttcaagccaatggtatcggttacaaacgtatattgtccaatatttctgtatttttcataacgatgatccaccagctcttctttggtaagttgtgtcagttcttcaagagatttagatagggcgctctgaattgcttttgactgttcttccacattgcgatgcgctccaccttttacttcagggataatctcatcaatgacatttaactctttcaaatctggtgctgtaattttcattgtatctgctgcttgttgtgccaaacttgaatctttccacaaaagagccgcagcaccctcaggggaaataacagaataccatgaattttcgagcatgtgcacatggttacctacaccaatggcaagagctcctccactcgcgccttcccctataacaatgcaaataattgggactgttaatccagccatctcgatcaggttccttgcaatggcttcactctggccgcgttcttctgcggctttacccggaaatgcgcctttcgtgtctagtaagaaaatgaccggacgctggaatttttcagcttgcttcatcaaacgaagcgcctttcgatacccctccggatgcggcataccaaagttccttctaaggttctcttttgtgtccttaccacgctgatgaccaataactgtaacaggattgccttcaaacgtagcgattcctcctacaatggcctcatcgtctccaaacagacggtcaccatgcaattcaagaaaatcatcaaaaatacgatcgatgtaatctgatgtcgttggtcgctcaggatgtcttgctaattgaacacggttccacgctgttaaattctcgtaaatttcactttccattttggaaagtcgtttttcaagtcgtgaaacttcatcagtaagatccacattcttctcttccataaaagcatgaagttctttgattttatcttctaactcttgaagcggtcgttcaaaatcaagcctctgccccattatttctcacctctatttccatgaatcatcaaaacttggctaagcgtcttcttcatatccgctctatgaataacacggtccaattgaccatgatttaacaaaaactcagctgtttgaaaatcttctggaagatcttcacgaattgtttgctcaataattcttcgcccagcaaaaccaatcaaagccttaggctcagcgaaattaaagtcacctacagaagcaaagctcgctgaaactccgccagttgtaggatgcgtcataatggatatgaacaatccaccatcattgctaaagcgtttaagggctacgctggattttgccatttgcattaaactcaacacaccctcctgcattcgagctccaccggaggccgtaaaaatgataaaaggaattttttctttatgtgcatgttcaatcgctcttgtgattttttctcctacaacagaccccatgctacccattcgaaaacgtgcatccatcacagcaatagctgttcggtaaccgtcaatcgttccttcacctgttaccacagcttcgttcaatgatgatttcttttgatccttttccaagcgctcaacataatcagggaaagagagcgggttttcggaaatcatctctgcatccagttctctaaatgaaccttggtcaagcgtattatttaatcgttcaggggcagacatctggtgatgatagccgcatttcacgcaaaccttatgggatttttcaagttctttcgtataaataatacttttgcaccctgggcactttgtcatgatgccttcagggacatcctgttttattttatctgaaggaaccgtcgcatactttttcttcttgttgaacaaatcttttaacaatgtggaccattcctttcgcttatcctaatggctattcttccgtttttttcatttcatacttatccaaaagattaattgcggcttcctgatttcgagaaacgagcgcattaatcatagcctcataataatgagtcggacgaaatgtcaattgatgccaaattgtctggtgataatccgcaagctccgcccataagcgcataagcaagtgattatgtgtggatgaaacaatgacacggaagaaagcagtatcaaactcagtcgaaaaaatgtctcgatctgaagagttgtccttatgttccatcatagttcttaaacgatcaatgtattcatctgaaatccgttcacaagccactcttagtatatctttttcgattaatttcctcgtttcaagcaaatcttctttcgacttggtatcttttaaaataaaagaagcaatcacttctacaagtcgatgatctctagcattggctataaaagtcccttcaccgcgtcgcgtttcaataagacccagcatttccattgatcttaacgcttcccttacagaagatcttccggcacttaagcgatcagaaagctccctttccgaagggagcttatcgccggtttgtaaaccatcattatagataatcgactttatcttctgaagaatattctgatagactttcccctgggttgtcattggaagtcaacaccctttcttagctctaagaacaggagaacgttagaataacctggcttttcaccaggtattctcaaaatacaatccgcgctcataaataaaatgcaagaaaaaagtgagaaagtcaagctcttccccacttattcgttatctgcttcaatgattgcaagagaacgcgtcttttctttaacagcttcagggtcaacatttatacgagctactccggtttccatagcagcttttgctacgcttgcagcaacagccggtgctacgcgtggatcaaatggagcaggaatcacgtagtctgcatttagatcttcctcagcaactaattctgcaatggcttgtacagcagctactttcatatcttcgttaatgtgagtcgcccgaacatcaagagcacctctaaagataccaggaaatgcaagtacgttattaatttgatttgggaaatctgaacgacctgtaccgatcactttagctcccgctgctcttgcatcgtcaggcataatttcaggatttgggttcgccatagcaaaaatggtaggatcctcattcattgactccaccatttcttgtgtcaatgcgccttcaacggatactccaataaagacatctgtattcacaatcacttctttcagcgatccttcagctttatcacggttagtatatttggctacttccgctttcacatcattcattccgtaagaacgaccttcgtaaatagctccttttgaatcacacataataatgtcttttacaccaaaacgatttaaaagtttaataatggcaatgcccgctgctcctgcaccattaatgacaactttaatttcactcatcttcttacctgatagtttcaaagcattaactagccccgctacggttacaatcgctgtaccatgttgatcatcatgaaagatggggatatttgtttcttttttcagcctttcttcgataacaaagcagtttggagcagcaatatcttcaagattaatcccaccaaaagtaggttccattaacttaacagtttgcacgatttgatcgacatctgttgtatttaaacaaattggaaatgcatcaaccccggcaaaactcttgaaaagaacggcttttccttccattacaggaagagccgcttcaggtccaatatttccaagaccaagaactgcggtaccatctgatacaacagccaccatgtttcctttcatcgtatattcatatactttattcttgtcatcataaatttccttacacggctctgctacaccaggtgaataagctaggcttaaatcagtggcattacgaacaggtacttttgattttgattctaactttccttgcctcactctgtgaatatgtagggcctcttctcttgtaatggacaatcattccactctccttttttcagaagcattagactatgttaacaattcccctaggacatttgggcagtggtcagaccactctattttcaccattataacaaatcaccatttgctgtaaagattttcatcacggctttttcacgacgttgcggtcaccaagtaattttttcaacgtgtgaacacagtctggatcagggttcactagccatccttcacctaatttaactgttttatctgttttactataataaataacaacctctgtatcgcctgagtggtgatgaagcactttcttcacttcatttaagacgccttcatgatgcggttcaattttaagaaataacgtttgttttgcttttttcggcttaatatccgctaacttcataacccttgatataatgatattcgtctgatcatttcgcttttgtcccaccccatcaacatatagaaattctcctttaatcaatagtctctccattttctcccaaacatcaggaaaggccactccttcaatttctcctgtttcatcaccaagtgttagaaaggccatcatttgacctttcttcgttcgaatacttcggaccttcaatacctctacagccaacctgagcggtgcacgatcctcagcaactaccgcatctttcgtaacgttccttacataaccttttaatttgtccaaataaggatcaagcggatgagccgttaagtaaaaaccaatcgcttctttttcaaaagctagcatttccgcttcatcaaaaggggggacgctttcgtaagctggttccgtttcgccatcttggaagaagccttcctggccactttgttcagatccgtaattcattgcaccctctaatgaggcaagcatagaagaacgacttaccccaaattcatccattgccccagcaaatataattgattcaagagcgcgcttgttcactactttcaacgaaatcctcgcacataaatcaaaaaggcttttgtaaggatgagttcttttttgcacgatctcttcgatcgcatttctcccaacattttttaccggcagaagtccgaatcgaatggtattattttccaccgtgaacgtctcttgactactattgatcgatggtggttgaaccgtcatacctttttgtctcgcttcagctaaatatgtcgcaagtcgatcctggtttccgacggcagaattcagaagacttgaaaagaaatagcgcgagtagtttgcttttaaataagcgagctggtaagcaatgacactataagcaaccgcatgacttctgttgaagccataatccgcaaatcgaacaatatactcatatactttaagagctgtatcttttgggtaccccttctcaaggcatccccttacaaagtgctctctttctgactcaagaacttcacgcttctttttagatacagctcttctcaatagatcagcttctcccagagaaaaaccagctaacttagaagcaatttgcataatttgttcttgatagacaataaccccatacgttgattcaagaataggttcaagatcatgatggagatattcaattgtcctttctttgtgtttaccagaaataaaatgaggaatattctccatcggtcccggccgataaagcgcattaacagcgacaatatcttcaaactcagtcggctttagctttctaagtacttgacgcattccatcagattcaagttgaaatacaccagttgtatcagctttttgtagtagagagaaggtagcttcatcatccattggtatcgttgatagagaaggcctttgacccgtttcgtcttcaatgtcatttaatataccttcaattaaggttaaattccgaagacccaggaaatccattttcaatagaccaatctcttctaaatcattcatcggaaattgggttaggttaatgtgatgaccaccaagcaaaggaacatgatgcgtgagaggctctgctgaaatcaccactccagcagcatgggtggacgtatgacgtggaagcccctcaattgtactagcgatatcaaaaacacgtttcccttcttcggatgaagagatgagatctttaagaaccttcgactcatctttcgcctgatttaacgtcaggccggggcgtgaggggatcgctttagacatggcatcaagaagcttgttgtctacctctaatactcttcccacgtctcgaatggcagcctttgctgcaagcgtaccaaacgtaacaatttgagcgacgcgatcatgaccatatttctcatgtacataatcaatcacttcatctcgtcgaacgtcaggaaaatcaatatcaatatcaggcatcgtgacacgctctggattcaagaatcgctcaaataaaaggttatgttcaatagggtccacatctgttatatgcaataagtaagcaacaagagaacctgccgcagatcctcgacctggaccagtaatcatttgatgctcatgcgcatatttcatgaagtcccaaacaatgagaaaataatcattaaaacccattttgttaataacagaaagttcgtaatccaatcgttctgtgacgcgttcatcctgatatgaatagcgctcagaaagattgtcgaaacaaattttctgtaaatactcaaaagcacttaacccacctggtaccgggtaaagaggcaaatgtgtttgattgaaatttaattctacattgcaccttgccgcaatatcggttgtatttataagagccgtctcataccctctaaatcgctgagtcatttcttccggagacgttaaaaagtactcatggttaggtagcgctacgtgatttttgtcttcaaatcgatgtcctgcgtctatacacctcaaacaatcatgtgcttctccatcttcccggtttatataatgcgcagcatttgtcaccgttaagggaagattgaccttgtttgcaaacgtcgagagcaataagttgagttgcctttcttctcgtaacgaatgatcctgcatttcaagataaaacccttccttgaagacacgctgatactccatcgccatttcaaatgcggtcgtttcttcaccatgtaaaagctcctgtccaattttgctagaaatagaccctgaaagagcgataagcccgcttgcgttttcaactaaatcttctttttctatgtaagggatattacccgctgcacactgcatgtgtgtactgatctttaataaattttcgtaccctactgtattaacagccagtaaaacaagatggtcgaattggccacgagtttgaagtgaagtacggtttcctacgcggacatccagaccaatgatcggtttaattccctttgctttacatgctttgtagaaagggatagttccaaacatggttcctttatccgttagggctagcgactggtaccctttttgttttgctgattctatcagcgattcaatacgacttggactgtctagaagactatattcactgtagacacgaagatgcacgaattccatagattatcccactctcaatttgctgttatcctctattatagatacttcaagcttctcaaacaaacattatcaagcataacattctctcatggttgcataggctgtactaaatgcaatcatttgcctcgctttatatacaccaagttattttttcgttcatttataagaagatgctaaaggaaactgattagaaagaaggaatcaaaatggagaaagtaacgctcgttaccttgattattgctttttttgtagcttttggagtgatcgttgggggttctctcatcggaggtattggagcatttctctctggtgaacctccgctacactggatgtttattgtggcacaacgattaaaaatctgggcgatcgcagcagcgattggaggtacgtttgacacaatcaataatatggaaagaagttttctcagcggttcaccagacgaaattatgcggcagtttttatggatattctgtgcgctcggtggcgcccaagctggaatggaaatcattaactggctaacacaggaacggtccacgttatgagagtccccccactctattctagaaagggctggcagcgatttctagccggcctttgtgtaggggtgatttttggttggctcttctttcttatgctttttggaattatgtacgaaaagcagattacgacaatcaaagagcaaaaaattgaaatctctgatttaaaaatgcagaatcaaaccttgctcgacgataaagaaaattacaatagcaccgatatcgagaaaacactgcttgtgaaaaaaattgacgttacttttgaaaaagataaggaattaccacttaattccttaacccgccatgaactaaaaaaagaaattcaaagtgaattgaacgaccttctcaacaaagatcttggagcgatatcgagaacaagaagttttatcatctcgtccctcgaaaataaaacgttattgattgatgacgtgaaatatggatttgaagtaaaacaatttattctttggacaacagttgaagtagagcttgcaatcaagctcgtccagtagcgaaaatagatctattttgtgaccttttgtcagacaagtcgcaattttcacaagcgtagtatatgataagagtatagaaattgtggaggtggcgcgatggttattgatcgcaaacaaatcgcgagagcaaaaatcgctgatttaatgaatggacgatccgcttacgcagagtcccatgaaatgactgccctaattaaaaaggagctgcaatcacttaacatcgacgtgcacgaagacgtgacaagctttggttcatggtttattcctaaatcacaggatcaggtgtaaacaaggaagaccggaaatccctttaaaaaaggagataccggtcttttttgtcacttactcgtggcacactttttcaagttcagcaagaacctcgtccgcttcttcccatgtatacactgtggcacccgcagccattggatgtccacctccgttgaactgtgctgcaatttgatttacaacaggacctttcgaacgaaggcgaacgcgaatttggtctgcctcctcaataaagaatacccacgcttttaatcccgctacattggagaaggtattcactagctgggatgcctcgctagcggttactccgtatgaagcaacggtttcttttgtgattttcatccatcctgcacccgtttctgatgtttcaaaatgttgcagaacatagccatttagacgagcgatatgctgctctgtcctgtatagttccttataaagaaacccagtgtcaacaccaaactttaaaagctccccagcatacataaaggtacgttgagtcgtattagaaaacataaaacgacctgtatcccctacaattcctgcatacagaagaaaagctccttttttagatagctcgtatcctcgttcctttgctgttagatataaatcaacaatcatttcactcacagaacttgaagaagtatctacccataggaggtcaccgtaaggatcttcgtttggatgatgatcaattttaatgaggagattgccatttcgatagcgctcatcacttacacgcggctggttggctgtatcacaaacaataacaagggcatcttcataaatctcatccgagatcttgtccattcgatttagaaatgtgagtgaaggttcttcttcaccgacagtatagaccttcttcttaggaaaagaagttcgaataagctctgcaagaccgccttgtgatcctaatgcatcaggatctggacgcacgtgtcgatgaataataaccgttccatattgttcaatagcatctaatattttttctttcataaagcttctcctttcgactgccttcctaattgttattgttctgacatagattttccctattattttctatacaatagaaaagaacctttaatatggaggaaagcagccatgcctatctttgttatttttattgttttttcaattgttttctatttgttctacaaagtgaaagctgttcgtcatagcggtgtagcaacgacacagtggcttcattcaaaagcaagtattgcattaggactgttccttatcttttttgcgattaattcacttactgtttccttatcaactgtaacgtttatcgtcgctgccgtcttcattctactcggtcttgcaaacgttatagtcgggtacaaaaaataccgccactaccttccttttgccattgaagaggcaaatatgatgaagcaaaactaaatacgaaatgaacaatcaaaccgccacagtaaatggcggtttttttatcgatcaatgagctgtgccatcatgagcgccttccctacaactgacccttcatgataaatttcaacatcaaccttcccaaatttacgtgagacttcgagaactttaggaacaatttcaattgtatgatcaatttgaacgggttttataaaataaagcgtaatattttcgacaactaaatcaccttttttgtatttctttaatacccggctacccgcctcggttacaagggttgtcacaaccccatatgataaagtaccaagaaggcttgtcatttgtggcgttatttcacagctgtagcgactttctgatggtgttgacacatctttaatttggctcgtaatcaggtcatcaaacgtttcaccgatttgaggctgttgctgaatcatttgaagcgcttttaacacatcttgtctgctaataattcctatcaaacgctggtattgatcgagaaccggcagcatttcgattccttcccagatcatcgtatgcgcggcagaagcaaccgatgtttgttcattaacggttaaaggatgtttcgtcattacttttgaaattggtgtttcgttacgctctccaagtatatctttagaagtcacaattccctgcactttcatattgggatcaacaacagggtaacgactatggagcgttttctcatttaactcatgccagcgacctacgttttccgtcgtcacaagaaaacttgttttcgtaagtggcgttaagatatcacttactaaagcaatttccttttttatcaaccggtcatatatcgctcgattaatcatggttgctactgtaaaggaatcgtaggatgttgaaataatcggtaaatcataggcatctgccatttttttcacatcgtcctgcgcgtcaaatccacccgtaatcaaaacggcggcgcctgcttcaagcgcaattttgtgaacattgtctcgattacctacgatgagtaaactcccaggatcaacatagcgcatcatcgcttccaatttcatcgctccgataacgaacttgtgaagggttttatgtagaccgtttctccctccaagcacttgtccatccactacgttcaccacttcggcataagtgagtttttcgatgttttctttttctttttttgtaattcggattgtgcccacacgttcaattgtgctgaccgtgcctttattttcagcatccttgatcgctcgataggctgtcccttcactcactttcagctctcttgcaatttgacgcacagatattttactacccacttctagcgtctcaatatattcgagaatctgttcatgtttcgttgtcaatttctttcaccatactttctacgttcacatctgtatcagtagatatactacttctgttatagtggtgtttgaattgacttcattatacataactcatccctataacttcaacgactgtattgtttttttcttaaatcgactggtaattcctcttctgatataaactgagtttctctcttcccaaagaacaagccagcaagatttccaccaagtgccatgacagcaaagagaagccaaagactaaagaaagcaccttcaagcgttaaatcaatttgaaaacgcgggacagcatcatacattaaaaatagaatacacaatacagataaaaacaatcgttgtttcacaccaattcccccttacagtctttctaaaagggtatgtttgtaacggctgatttaatacgcttatccaacacaaaaccgatgcaatgcatcggttttgtgttggattataattcgattgtttcgcctgattgtaaaactttacctttcgttcctttaaggctatctacaaacgcctcaccatcttgttcaataagcggaaacgtattgtagtgaattggaacagttacgtctgcgtcaatccatttcgcagcaacagctgcgtcctctggtcccattgtgaaattatcaccaatcggtaagaacgcaagatcaattgacttatcagacaaaagcttcatatctgaataaagtcccgtgtcgccagcgtgataaactgtactgccttctgcactaaagagaataccagacggcatgcccgtgtaaataatttgctgattttcttcctcagtatagctggagccgtggaaagcctgagtaagcttgacctttccaaactcaaattcatgagcgccaccaattgccataggatgagtattcacccctttaaatccaaggtatgtagccaattcaaatggagctacgactaaagcatcatttcgtttcgctatatcaactgtatctccgacgtgatcattatgtccgtgcgtcagtaaaataacgtcgcacttcacttcgttagcgtctaacttacattgtccattacctgaaattaaaggatcaattaaaatcttcgctttttccgtgacaatctcaacaactgaatgaccatgaaatgtaactttcattcgttatcgctcctttaacgtttggaattttcaacctccatgacaaaatatagaaggattgactctagtcagtaagttccctttgagtaatgatctaaactagtaatacaaccatgctcgttcgtatttttcaattaaatgaggttgaataagcgtattcggttcaaatcgaacctttttcccttctctcatcatctgttgatcttcatctttcccaaacacgctaagggagggaatcatctcacttgatagatattcagtttttacagtaaactttagcttctcttgatctaccggctctctcgtccccatcacaaaaccccagttaccaaagctcggaatgtcgacatggtaattcgaagtaattaaaccagtctccgcaatcgttcgatctattgtccaataagcttctcttgcaaacaacggactagttgcctgtaccattaacgctccgtttaattccaaatgattgcgtaacaacgaatagaattcccacgtatacagtttgtttaatgattcattatttggatcaggcagatcagcaatgatcacatcaaatgctttttgttctttcttaatatattgaaaagcatcttcatttcgaatgtggacacgtttatcttcaagtgcatgctcgtttaattcagttaataagtgatgttctcttgcgagttttaccatttcgggatctaaatccactaccgttacggattgcacgctatcatactttaaaagctctcgaacggcaagaccatctccacctcccagtaataatacattctcaggattgttaactgtcgccatcgggatatgcacgagcgtttcgtggtatcgatgttcatcacttgaactaaactgaagctgtccattcaaatagagcctaagatctccctgttccctcgttaaggtaattttttgatatgaagtttcttcagagtaaatgatcggatctttgtataaacgctgctcaaaagagaaggccatttcctcaccaaaaatagtgccgacaatcattaataagaacaaaagtattgctattccagtataaacagctcgataaaccagctcttttcgaaatgaataaatcatccaaaaagcgacgagaatgttaacgagagcgacaagaaaagctgattttacaagaccaaactctggtcgaaggtaaaaggcaaataacagtccccctacaagtcctcctgcatagtcggaaaaaagcactcttgctgtacttttattcatttccacaccaatttcattcgcttttcgaatcaagattggtagttcaagacccgttaacccgcctacaataagaatagtggtatagagtacaatagtggttgattcttctcccgcaattgccataattccaaacaccgtaaaactagaaaacccacctattaaaccaataagaagctcaatggcaataaatcttgtaatcaagtttttcacaactttttcactcagggatgcgccaatccccattccagtcagaaagagcgaaatggttaacgtatattgctttacaccatcgcccagtatgtacgaacctagcgcaccgaacagcacttcaaaaataataccgcagatcgatacaattccagaagcccagtacaactgactgcttttactaaacgtcctgctcatgactttcaccttcagctgatcatttctattttacgtaattgatgcccctactactaaaccaagaccaatggaaacgcacatggagagtatgcctaccgatacaacaccttcactaagcttttgttccactgagaaactccttgtaagaaagtcaaagatataataagccactagttgaagaacaactccataggctccccatacgactgtatcgagaacatctgcactatgataaatggcgaaagccaagataagacaaatcccaataacctttccacctatggatagcgcaactgccgtatttcctttttcgacctgttcccaatctttgtattttgtcgtaatcaattcaaaaataattaatccgacaaccacaacaacaatcgctgcaataaaataaataaatgttaataaaaatggtcccattatgatgatcctccttcaattatttccctgttcctggaccgccaccgcgactcgatcctcgaaaagacggaatcgttgtcggtcctttatatgtaccacctgtggtgccatatcctccataacaattcccggttgcgttcaaacagcggtttttttgttttttcccccagtcatctacatccagaatttcatctaaaatataataagctagtaacccatcaaagaaatcgggttggtagttatctcgtacaaatccaaccgtagcgacttcgacgagggtattcgatgcatcatcactttcttgcaacgtaacgatatggtcatcataaacaagaatttgcttgccttcttttaattcactgacttcattcggctttatttgttcctgtaagtaggaggcaacagtagggatatcttcctcagcattgtaaacctttgagacatcgcttgaatccacgctgctttcaacgacatcttcaagctgataacgatcttcgacgatttcttgaatatccttggtaatcccacatgccgataagagcagaatgaatgctgtcagtaatccagtgagccatttcattcttccaccccatttaaggggaaagcttattctttccccatttttttcttaagctctgccaattcatcatcgataccgtcgtttttgtcaagtgcatcaagctcatcatcaagagagcgacttttcgaacgcatatcttcacttgtctcagcttccgcctcgtattgaagaactttttcctccattcgctcaaaaccacgtctagaatcatcaccgccaatatcagacatggcacgatttatcttcgttttcgtttttgctgactctgcacgagcctttagactatctttctttaactgcatttgacgatactcttctttcatctcatctaactttgaacgaagagaatccgcatccgctttcgctctttcataagacgtcttcaatgtttccgcttttgcttcatgatcttttttatcttgaagcgctcttctagctaaatcgtcgttatccgattccaaagccttcatcgcctgatcctggcgctttgaaaccattgcgttggcatcatcccatttcttttttaacattttttcattcgatatttgttttgctactgctgtttccgcatctcgaatatctgcttccatatccctcataaactgttctagcatctttaccggatcttctgccttatcaagtgcagcatttagttcagaagacatgatcgtttttactcgtttaaacatattaaacatttgctctcatcctctcatttacttccagcaagaattttaatttcatactcttcaatggcatatcctttgctcacttctacttcagaaccccagacttctattgatagaaagtttgtttcatcttcatttgaaaaatcgtggtactctacttcctgcccattcaaattactaccacgtccagttccagacacttttgctcgaccatgttcttctctataatacgtaacatcgtccatggttagcttttctggtatgggttttgccagcttttcctttacgttacgataaatgcctagctcaagttcgtcatccatttcggcacttagccataccgaggatgctcccgatttcagctgatacgcgtaccacttatagccattattctgatacgtgagtgaaccaactacttcataatcttcaaggtcataagtgacaatatcaccaaccttaatcgaaaaaacggttctttctttaaccggtttttcgtctttatttccgaacaattttgataaaaaactcatttactcgcctcccaccctcatagttttatacgaatcatctctaaaaaagttcccgttatttttttggttttcgatgagaaaccattccctcttgctcagtataatagaaatccagtggggggcgttctgttaaaagagctttcttttcaagtttaaagaagctgattttccgaaacggatctccttcgatgatcggagcttctttctcagaatgaatgtacgagtccacagctttttgaactatatcaatccaaaaaggaatatgacggtgttgttcttcaaagagttcaaacgtctctttcgacatataaaaaggtttagaaggaatacctccaaggtgagtgataagaaaagaagcatcgagttcattgttatcctttacaagaacttttaacgaaataccatcacgtttcttttctgcgaatttaccgactgcctgtcgtatttcatgtagggttgcttctatcatcgctggatgatccgctttactgttttcattcttttttttccaaaatgccatgttttcacctccacatacacatgttccgtattgaatgaagtaaacccttttcttcattcccacttcttaaaataacgagtcttcttcaaaggcgtaaaaaaataaagcagctactagctgctttatacctcttttacttttcaaggagtgagcgagcacttttataatcaagctgctgcgcttcagctactgcttcatacgttacaaaaccatgcatcgtgttaatcccctttaacaaaggttcattttcaagacaggctttcttgtatcctttattcgcaagctgaaccgcataaggcacggtcacatttgttaaggcaatcgtggatgtacgtggcactgcaccaggcatattagctacagcgtaatgcacaacaccgtgcttcgtataggttggattatcatgagttgtgatacgatccgttgtttcgaatatacctccctgatcaatcgcaacatcaacgatgacggaaccgggcttcatttctttaatcatctcttccgtcactagttttggtgcttttgctcctggaataagaacagcaccgataacaagatctgattctctcaccgcttctataatatttagtggattggacatcatcgtatttatttcagttccaaaaatatcatcaagctgcctcattctttctgggcttaaatccataatcgttacgtctgctccaagtcccattgcaatcttggctgcattcgttccaacaactccgccgcctatgacagtaacttttcctctctttacgccaggaacgccccctaatagaatgccaagtccacctttgggtttctcaagaaattgagcaccgatctgcgcagccatccggccggctacttcactcataggagttaaaagaggtaacgagccatttggtagctgaaccgtttcataggcaatgccaattacttttttttcaacaagcgctcgtgtaagctcagactccgcagctaggtgtaaatatgtaaataaaattagcccctcacgaaaatagccatattcctgaggaagtggctcttttactttcataaccatttccttcgaccacgcttctgccgccgtttcaacaagatgagcgccagcttctagatactgctcatctctaaaaccagaacccactcccgcccctttttcaatgtatacttcatggccgaagctcgttaaacttaatactccagcaggtgtcatcgctactcggttctcattgtttttcacttctacaggaatgccaatatgcatgcatactcctccttcgtctctctttggcccgtataaaatcacccaaccattctaaagttaccaaaatcattcaaaagatgattctctaaacgtatcaatataagtatattttcgcaatgttcacactattatcatataccccacagttaccattaacaacccgctaattaagctaacaacgatgtaaacaaccgatagccaaacctttgttgcagcgagctcaaaagcttcgtacataaatgttgaaaaggtcgtcaacgctccgagaaaacctgttgagatcccaggcccccaatctcccgctccaaacgccatccccattaagaaacttcctaatagatttactaaaagagttgcaagcgggaaatgaaatcgattgaagcggtttacccctagtgctgtgacataacgaagccatgccccaacgccgccaccaatagcaatcatcaaccaatccattcttagtccctccccactttttccgctaaggaaacccctatgatgacgcttaagattccagctagaatactaccgcctccatacagagctaatccccaaaagtgaccctctcttatgtatacaaacaaatcaagagaatacgtggaaaaggttgtaaatgagcctaacaaaccagtcgcaataaattttttcactgaatctgaaagatgagggctcgatcttacgaattgatagaaaaaacctagaagaatggagccgacgatattgactataaaggtagcgatcggactgccattcagcactgtaccaattacccctctaagagacgctccaactgctccaccagctatgacagcaaaactatttttcacttgaatgcggctcctttcacatctttcctcatcttatcgaaaccgctattcaaagtctactgatcgttttcatcccatacccaggtgtataaccttccgctcgcatccatccactttaattcaaatcgttccgcgttttgataaccaaagctgtccatttttttcacaagttcttctactcttgcaatttcggttacttctagatgttgaaacaaagcttcgacttccttttttgcccgctctcccttttcaacaacatttccggtctcaacttcaaattcattcggactagagaactcccattcatgttcaattccattagaaacaaccatacatttaaatgaaaaactgttttggagtgtggaagcttctgctcgaattgtaaacagacataagtaaacagcaaaagttatgatggtaagtttcctcattattcatcacctcctccttatgctgactgaaagtgatgaatattattcctaaacgcatcattagaattgcttccgcttaagttcacaactaaaatgaaactatatttgttttgtaaaaggagagtctatgagcagtttaccgaaatcatctaatcctattcaaattgaacgatatggacttgaatccgttccagaaacgtcgcgcacgacacgctggtacgaatatgccatgattcaaatggctgtatccgtgaacgccgggaatttccttgtgcctgctcttgctgttctcgaaggaggacttagcttcatttgggcagtgcttgcaaccgtactcggagcaactgtcgcctttccattcgtctcattcctatcctttccaggagcaagacgcggaatcccgtctcaatatgcagtaagagcatttgtcggtgtaaagggagcccaatactttgcttcaccagttagaaccatcacatcactgtactggttttccgttcaaaccattggcggtacttatatggttgttgaattaatgaagcgcgctttttcaataaaacttctgtttcttccaacgtcactgtttcttgctactataatggcgttacttgcgttagtcggtttcgatgcggttaaaaaagtgactaggtattttcttcctcttttatttgctggaggcgttgcgatgttcttggtttacttcacttcttctgtcaacgggagcagctactcatccgtcatctcatttaaaagtgaaccaaacagctcattctttttctttgccagtcttgcatttgttcagtatgtatctggagttagcagctcttccgacatggcaagatacgctaaatctcctcagcatgcattctggggcatattctctgggaatacccttgggtttacattaaccgcacttctcggtgcctataccgctacagtagcaggaacatggaatccttttttaatcacgagtcaacagacccaatctacttttctgttaatcctaatttttgcatccgcactttgttcaatgatcatgattaacattagcaatgcgtacacgggaggatatagccttctaaacacgtttccatctctcggacgagtgaagagtgcccttttactaggttgcgccgctgtagtattaagtgcatttccagcctttgtggatgaagcggaatcgtttatttctttgcttggtgcttttgttattcctttatctgccgtaattgtgactgattttatggtgataaaaaaaggaagcttcacaactgccatgctcgagactttatcagagaggacattaaaccgctcaggattcctcgccattttattgggcgtttcattttaccttttgcttcctgctaattattcaccaggatttttatcttttctattaacaggcatactatacctttcgttccaccgttttaagaaagaaaacgtttactgaatggtactatgaaaaaagttcatgctcatggcatgaactttttccttattaataataacttttccgatcagctttacgaggaagcttctttgcttctttttgttcctcctcattgatcgcaccgctctgatacgattcacttagctgttggtgtacagccatttcaccactttcatcataaatcaattccttcttcttatcagtcatgacgtaacctcctgtcgtttcggtcttgcattcgtattctttccaacaacaggacggtttacttatcgaatgaggatttattcagaacaagtgagcaaatgcataacaaaagattacttatgtatggagtctgagcacaattagaagaaataagccgttatttacgaagctctcgcacaatgtgaggaagctctgggattaacaacttagacatcgctaatttcacggcacctgaagaacctggcatagcaaagatggccgtttcccttgtaacccctccaatggctctgctaagcatagctggcgtgccaatatcatctgtatagctaatcatacgaaacagctcgccaaacccagctagctccttctcaagtactccttcaacaacttcataggtgacatctcttttagaaatgccggttcctccatttaataaaacagcatccacatcactagcagcaatccctcgctgaatggccgaccgaatttcctcttgatcatcttttacaatggttcgctcgatcaccttatgacctttttcttctagtagagaggaaatgatttttccgcttttatctgtttcgtttgttcttgtgtcactgacagtgataatcaaacagtaaataactgccggcgcactggatttatgttcactaaagctcatttccatactcctctctaagttcatttagaaaacgtttctcatagaacttatgagcgatttcactgactgaccgagtaaatcgatagttcacggctgctccaatcgctatgccaagaatcggaattccttgaatcatttttttccgtagcatcattagtacggtacctttcatcatttgcttcatcggcccctgtaaccaattggcatcagcaattccttcaggaccttcataaaaatatggatgtgcctgctcttgctttacctcttgctctaattctcgccaggctcgctcttgtaaacctttaggaagagtagccatgtggaaaactttaagagctatcatcatttcagaagggtaattgacggggtaaccataagtcatcgcaataagctggaccgttcgtaggttaatggcaagcaccgccggtaaatcaagacctaataataaaaaacttcccgtgcctgcaagtcccccttgcgcaaatgaaaccattcgctgtcgcgcaatttgttgatcagcaatgtagacaagctgatcaacagacaagttcttcatatcctgaatttgttcgatttctggatgaaacaagcgtgcatcggttaacagccgatgactggcatcgacctgagattgtgaattttgtataagcgaatgcatatgaaaaagcgccgagtccatcacggcatacaaacgtgttttagctttagaatccagctgattgagctggtggttatacaatttgtgaaatgttcgctctacgtcagttgcttcatgggcgaagtgctcttcttcccataaatggatatcagtcattctttttcgttctctttctgtccacaccaattgaaatcgctcctttcaacccctttcctatattgtatcttttcccttccaaaacttccaacaaaggtgaaagaaggacaaaaaaaaagcacccttttcgggtgctcttgatttatttagaaagtcgaacagtatctcgtgcaatcacaacttcttcatttgttgggataatcataacttttacaggtgagtgagggtagttaataaaagcttctttccctttcaccttgtttagagctggatcccagtaaacgcccataaattcaaggccacgtaacacacgtgcacgaaccgcgtcactattttcaccgatacctgctgtgaaaataatcgcgtctagtccagacatacgtgcagcgtaagacccgatgtatttatgaatacgagaagtaaatacttccagcgcaagttctgcacgttcgtttccagcttctgctttacttgtgatatcgcgaagatcacttgagaaaccagatacaccaagaagaccacttttcttattcaacgtgttcattacttcttctgcagtttggcctgttttttccataataaacggaattaaggcaggatcgatatttccagaacgagttcccatcgtcacaccagctagtggtgtaaagcccatggaagtatcgattgactttccaccttcaattgctgcaatacttgccccgttaccaaggtgacaagaaaggatacgcaattgatcaagcggacgaccaagcatttctgcagcacgctctgagacatacttgtgagaagtaccgtggaaaccgtacttacgaacaccataatcttcataatattcgtaaggtaagctatataagtaagattgctctggcattgactggtggaaagctgtatcaaatacggctacagatggaacctctggcaaaatctcgcggaacgcacgaatacctacaaggtttgcagggttatgcaaaggcgcaagctctgatacttcttcaattccagcaagtacttcatctgtaatcattgcagagtcattaaatttctctccaccatgaacaacgcgatggccaacaccttcaatttcatcataagaagaaataatagaaaagctaatcagcttgtccaaaagcatttttactgctaccgcgtgatcagggatgtttgtaatttcttcattcttttcaccgttcacttctattgtaaagatggcgtcatcaaggccgattctctccacgagtccttttgtgataacagtttcttccggcatatttaaaagttgaaacttcaacgaagaactaccggcgttgattgcgattattttcgccatatgtgacagctcctttaattcaataaaattagaatacgacacgaaaatagaagggtaatccccttctatctttagcactcttattatttaaacaccgaccattactttattcaaggtgaaaaccgcttacattcaagtattccgtcaattcagatttgtaaacgtttcacttctgttatgaaagctgtgaaaaccacccattgatctgttgcatcatgttcagcatcgcttcacgatttgagaacgatggaagttttgccatcatcacttgctttggttttaacgtatgttctccttttttctgagcaacgaggatgcttttggcctgtgattcattcgcaaacaagctagttggcaattgaataattccatggataacagagcggtcgttgagcaaattccttacttgctttgcgccatcatctccaaagagaaagtttggaatcataaagaaaagcataccagagtcttccgtcatgtttaaactttgttcgatcaagagatgatgaacataagacattccctcttccgcttttaactcatatttcgcagctgcctcttcgtgtgggtaatacccgacaggtaaatctgtcaccacagtatttacttgaggaatgtagagtggcttcacactatcctggtgaagaaattccacttgatgcttttgcaagttagcattaacaaaccccaggtgcaagagaagatcgtcgggttcaacaccgtacgcttctacgttctctccatccaattgattgaggactgacgttagcaaattcccagtgccaacagcaggatcaagaatcttcatgttatcaagatttagaacctctttatattttttcacaagatacccaattaaatgcgccacactatcaggtgtcattgcatggtgaggttgaataccttttttcattcctttaagcagagccagttggatccctttccgcaccgtttcttgttctgctccatcaagactacatgagtcatacagattttttagacgcacaaccgtatcagcatctaattcttcttgaaggactttattttcaaatatatttaaacctgtctcgacaagtgcttcaagataagacatctctaacttattttgaatgacaagtgttgattcatctaacacgttatatagattttctacagttaattcggacattaatcggcctcctatcagttcgccgtctctattgtaaacagtcttgacttctttcgcaacaatgatagatgagaaaccaatgtcttctttccgtgaaattagctaaaacgtaatcgcctaacgtgtaaaaaaggacttcgatgaagtcatcgaagtccttttcgtaggagatgtattattccgcttgttttgcagcatttagagcagcatcataatcaggatgattagtagcttcactcacgtactctgtgtgcacaacctcaccgttactattcacaacaaacacagctcttgctagcaaacgcagttcctgcatagctacgccaaatgctttaccaaatgaaaggtctcgatgatctgataaggtaatcgcatcttcaataccagcagcaccacaccagcgtttttgagcaaatggaagatcagcactaatagttaatacttttacgttgttaagttttgcagcttcttcattgaatttacgtgtttgggcatcacaaacacctgtatcaagagatggtacaacactaataagacgagtacctggataatcttcaagcgtcttttcagatagatcatttgcaagcacagtaaaatcaggagccttgtcaccaacttttacttcttcacctaaaagcgtcattggcgtttctttaaatgtaatgttagccatgttcatacctcctttataattggtcgtatgtacgactaatttcatcatataggtgtaaccagtagatttcaagaaatcagcagtagctacaaaaaaaagctacctcattataaagtagcttaaaaatcgagatcttgtttattttcatcttggtgtctttgctgtccccggaaaagatgtttggattgagagttttgtcttgatgatcctgaaccgttctgttgaccttgttgaccttgttgatttttttgatttttatttccatttgaattctgatttatgttttgaagaatgctttgtactttttcaatagcctgcggtgcaaggtcaagtagtctctcgtaaagatgggttgtattgtcaagatggatcatttttatatcccctgcgctgacgattagaaaagcaatgggggtaatggaaactcctccgccacttccgcctccaaatggctcgcctttactttggccctgctggttggactgttgtttcaacataaattcactaccaccagcagcaaatccaaatccaacctttgaaaccgtcaaaataacactcccatcaggagtttcgaccggatcaccaataatggtgtttacatcgatcatatctttcagattttccattgccgtttgcattaatccttcaattggatgttcagccatgtgttttcctccttcacttcctaaaccgctaagcctcctgtaactttttctgagacttcatcaatttaattaccgcgatcatagcatgccccagtttgaacgtaatcatgcatttcatataagtttgaattgttttcatttcatagattggtgtgacgataagctgcgggattgtatgaaggtttgagtagtgtgatagaagagtaaagatcgctaccttcgcattcattacaatttcagcaaagacagctgtattggcagcatttcctaccccaaaattggtttcccattgaacatttttaaaacgtactcgtttcaagaaaaataagaacgactttctggcacgaaatgctttttttaatacctgaaccaattccttcgtttcacctttaagccccttttctttcttcttctttttgacagtttcttccccctcttcaaataactcgattaaggggatagtcgtttcatagacgacaagtccaaaaagcgctctcacagctatctgaagttcctccaccgttgaagaatgttccataatcaccgttactcttacagtcgaaaaaataataagaggtaaggatgcgatgattaagagtaaaagaatagcagcgatcgcaataatcactaaacatctctctccttttattttttgtaagagatcaaaaaattagagtataaaataaacctgcccaaaataggcaggtttattcattatgagattttatttttcatgtacaacagtcgtatcagcaaacaaatcatgaatgccttgtttcttttttgtgaaggccacgacgagaaaacctacaaataaaatcgtcttgcttataaatcgaccaattccttctctaaaaataacggttccccaggttaacttcctcttattaagggacgctacctttaatccgaaaagcattttcccaagtgtctgagacaaaaattttgtcatcaaaataaaatacatataataaacgatacctgttagaattgcctgtaaaggtaaaatggccggttctgttgctggtaagtcaaatcctcttattagaggtgttatcagaatgccattcaaacttgctaccacaataatgtcaaccaaatatgcccaaaaacgcatccagaagcccgcataacgtacgtgcctcgcttctgtgtctaccgatgcgggaggggcagtcatactcattgtttcgtccattctgcctgcctccttattcagaatataaatacattaactcaggggattgcggcgttgatagaagttgctgaatgcctaaaagatctttgtcgggccccatgagttttgcagctgtcatttcaaataatgaattaaaaccaaggttttgcttatattgaataacttgtagcttgttatctccaagatctttcttcattccttcaattgtatcttctaaattaccaagatcatctacaaggttcacttctttcgcttgtcttccatcgtatattctaccgtcagcaagttcacggactttgctttcgtctattcctctaccttcactcacgacccgaacaaactgatcatatgagttatcaatcattgattgtaaaatctctcgctcttcttcggtcatttctcggctcggtgacatgatatctttatgaggaccgctcttaatcgtctcccacttcacaccaactttttcagctaattctgcataattcattgattgcatgattaccccaattgaacctgtaattgtagaaggacttgctacaattttatctgtcggagcagaaatgtaataacctgcagaagctgtcatacttcccattgaagcgtagatcggtttatccgttttttctttgatctccaaaagtttatcgtgaatctcttcactttctaccacaccaccgcctggcgtattcaaccttaatataataccttttacgctcttatcttctgcagcatgctctaaccgcttcataaatatatcgtgattgtatccagcctgcggtaaaaagctggtattcgttcctgtatcttgaataacaccttccacattaagaacggcgattttattcgagctgctcccttcttcaataaccgtctcagcaaattggtctgtcgtgttcatttcctcctgccacccgccaaatgccagacttgaaacaaaattaaagccaagtgatacgatgatgagaacaactgtaatacctaatgcaatccatcgttttccattcatagtaagcctcctctatatcctgatgctatcttatgtacgatgagaccaagttattggtttcatatttttgagaataccatacaaaataaggaagcgcacttcctagacgtacggaaacaaatttagtacaactctattggatagaataagtattgttcttctcactccattttaaaatcgttttaacgccttataaaggcaactaaattcaattttttcttttttctaaaaagagagagtgttaaagtaaaaaggactaacagttggacaaggaggaattcaaatgccaaatcgacgtaatttgttttttttctacaaacagacaaaagaaatccaggaaaaggtagaacctttgaaggcacttgcagaaaaaaatgattttcatattgtagaaagtcctgaagaggcgagcattatcgctagtatcgggggagacggagcttttcttcaagcggttagaaaaacaggctttcgtgaagattgtctctatgtcggtatttctactggcgagctaggattttattgtgatttccacatcgacaacattcaaaatatggtggacgacattttatcagaaggtattgaagtacgtcgttatccgacaatagaagtaatggtaaacaacgaatcctctttctattgcttgaatgaatgcaccattcgatcatcaattattaaaacacttgctatggaagtatacgtagaagattttcactttgaaacgtttcggggagatggcctcattgtttccaccccaacaggaagtacggcatataacaaatccgtaaatggtgctgtggtagatcctaaacttgcttgtatgcaagtaagcgaacttgcttcacttaacaataatcattaccgtacacttggctctccatttttattaagtgatgagagaacgcttacgcttcaagtcattcaagacggcaatgactatccggttatcggtatcgataatgaagcgatgagcatacaacatgctaaagaaattcaaattcatatcccagaaaaacgcatcaaaactgttaagcttaaaaacaattctttttggcataaagtgcaaagaagttttctttaaggaaaagcgccgcaaaatatgcggcgcttttgtattgaattaaatttgactaagagaaatcatttttttcatacacaaccgtttcatccacaactgtcatgaccggatttgtttcaagtataagatctggatcacaatgaaagatatcacgatctaaaacagtaaaatcagcatcaaagttctctttaatcatacctctttcatgctctcttccaatagcaaacgcactgccttttgtaaaaagagagacgctctcaaacaccgacaacttttgttcaggataatacccaccatgagattcttcaggacgttttcgtgtaacagctgcatgaatacctagtaatggattgacaggttcaattggcgcatccgacccaccagcaatgggtaccccactttcaagaagggttttccatgcaaaggacattcccattctatcttctccaagacgttccataacccacggaaagtctgatgcaacaaatcttggctgaatatcgagaatgactgaaagctgttttaatcgctttaataaatcttcacgcattacttgagtgtgaatcaggcgatctctcaaaccgtatggagcagggtactgttcaatggcttcaatcgcatactcaagagccagatcaccaatgacatgaatggccacaggcatatcatgcgacctcgctttcttaacaagttcagtcagcccttcaatgctatgaatggcaactcctgacgtgtcaggggaatcattgtatggatggcttaacaatgccgtccgtcctcccagtgccccatcagcaaagatcttcatcgcaccaagttcaacatagtttgttccatctccaaagcctagcccctgttttcgcatgtcttcgataacttcgtgatgcacgagtaaattcgctctgaatttgcgctgaccattgatcacattcaaaaaagtttcgtaagtacgcgtaaacccaccgtaatagtttaaatcttcactatgaccacctgtcactccttgcgcaacgagatcatctactgaacacgatagtgctttttcgagaaactcgatgcttacctcaggcatagcatccttaactaattcctgtgcacggtcaagtaaatacccagttgctctgccgttattatcacgcataatcacgccaccttcaggatcaggcgtatcatccgtaatccccgcaagatcgagcgcaattgagttagcaagaatcgcatgtcgacatactcttgttaacatcatcggatgatctggcgcaatctcatccaactcatcacgatgaaagatttttcgatcctgaaaattgttttcattccaaccttctccaatcacccactcaaatggggcaatttcatctactttcttttcaagaagacttttcatttcttctgcagaaccagcttccgataaatcaaggcgaaggagcttttccccatgcccaatcatatgaagatgactatcgacaaatccaggaatcatcacattccctttcaaatcatactgtgccgtcagttcttttccgaacatcgaggtaagttctgatttagacccgaccttttttattcggccattttctgtataaacagcttctactgtttcattttcatgttcaagcgtatagatctttccaccaaaccaaagcgttcccactcatgttctcccctttatgccaattgtgagcttattgtatcattcctattataaactgtgaatcttctggtttttcttcaaactcttggttgatttttcaatcatgatacaataagaataactaagagaaagtgcaagacaattgttgaaggtgaggaaatcacgttgaagaagaagattttatttacaggcggtggatcagccggacacgttaccgttaatttagctcttatcccccgtttcttagaagaagattgggatatccattatatcggatccgaaaaagggattgaacgtcagcttatagaacccgttaaaggtgttaggtatcatcacgttgcaactggaaagctaagaagatattttgactggaataactttaaagatccttttaaagtcattaaaggcgttggagaagctttctctattattaaacgagaaaaaccatctgttattttctcaaaaggtggatttgtttctgtcccggttgtgattgccggtaaaatgaacggagtacctgtcattattcacgaatctgatttaactcccgggcttgctaacaaagtagcaattcctttcgcatcaaaagtgtgcaccacttttccagaaactgtgaagcaccttcctgaaaataaggcagaatacattggggctgttgtccgagatgaattaaaaagcgggaaccgatcaaaaggactctcattcgctgaatttagtggaacaaaaccagtaatgcttattatgggaggtagtctaggagcaaagcggatcaacgaatcggttcgtaaccagctcaatcagttgctccaaactttcgatatccttcaccttacaggtaaaggacaggttgatgagtcacttcaaatgaaaggttacaaacaatttgaatatgtaacagatgaacttcctgatctattagcaatggccgacttaatcgtttctagagctggatcgaattctatctttgaattccttgcgctaaagaaaccaatgttgctcattccactatcgagagcagcaagtagaggtgaccaaatcttaaatgctcaatcatttcaaaaatcgggctatgccaacgttttgttagaagaagatttaactgacgcttctttcttaagattagtacgcgaaacttatgagaaacggtcgacttacttaaaagcaatggagcaagataatgccggagatcaagcgaataaaatcgagtcattgattaaaagcatcgcaaaataagaagaagaggaccaaaaaatggtcctcttttttaattacctataagatgtgttgtcttattttatgaagctccctgcgtttctttttgtcggagttcaattcttcttatctttccagacgtggtctttggaagttcctcaataaattcaatcttacgggggtatttgtacggcgccgtcagctctttaacatggtcttgaagctcacgagttaacgcatcacctgcctgactggtatcttttaatacaatatatgctttaacgatattccctcttacttcatctggacttgccacgacggcacactcctgaacagctggatgcttaacgagagcatcttccacttcaaaaggtccaatggtatatccagagctaataataatatcatcacctctcccctcaaaccagaagtagccatcgtcatctttggacgccttatcccctgttaaataataatcccctctatatgccatctgtgtacgctcttgatcttgatagtactttttgaaaagagctggcacatctttatgcacggcaatatcgccaacttctccaacttgagccggctctccctcttcattgataatttctacctggtttcccggggttggtttccccattgaccctggttttacttccattccttttagaatgccaacaagcagcgtattttccgtttgaccgtagccgtctcttacatcgattttaaaatactttctaaacgtatcaataacctcacgattaagaggttctcccgctgaaacggcactccgtaggacggcgagattgtagcgatccaaaccatctacttttgccattaatcggtattctgtcggagtacaacaaagaacattaatgtcgtatatggaaaggaaaccaagatatgcttcaggatcaaatttaccactgtataagaatccagtagctccactgcctaacgtagcaacaaatggactccatatccacttctgccaaccaggtccagctgttgcccaaacgttatccccttcctgaatatcaagccaggatgcagaagtggttcttaaatgagcatacgcccaaccatggctatgcacaacgcctttaggattaccagtggtacctgacgtataggaaaggaatgccatatcatcacgcaatgtgttaacggcctcgaaagaagcgttttcattttcggattgttgaagtaatggaagccacccacttgtctctttcccgacactgaacttatatttcagtgaaggcgcatcactttctacccctgcaaatgcttcaattaattgcgattcacaaataaccgcctttgcttctgcatgatttattcggtataccagatccttcttccgtaacatttccgaggaaggaataacgacaaggcctgcttttagacatgcaatgtagacagcatatgtatcaataagcctaggcatcataattaacacccgatcttgcggtgctaatcctccacttgttaaagcaccggcaatgcggttcgccttttcaaataattgcttgtatgtaatttcctgctcatcaccttgatcgcttcgccattttaaagcaaccttgtcttcattagaaacaaatcgttccatttcacttgttaaattataatattctggtgcaattaagtctttcatcgtatgcctcctctattatgtaatagttacattatacacaaaagtatgaaagttttgaatctaatcaagcgaaaacagccgctcatacaacgctgctggaagcaataaaagaggaagatgctgatgcatcttcctctgagccaatttattcaattatttggaatatcctccgaactgctgttcagactgctgaacaagacgctttgtgatctcgccaccaactgagccgtttgaacgtgaagttgaatcaggaccaagattcacgccaaattcagaagcaatttcatatttcatttgatctagagcctgctgtacaccagggactacaaggttgtttgaactgttatttgccatgagttaatcacctccttgctcatatcatgtgatagacaagaaggtgctatccttaataacttatggcattggggtaaaatgctggaagtctaaagcaattcatcaaatgaatcgtctttttctttaatgaggatcgtttcaacaccatttaccgcttcctcaacaagttcatcaattggcaagtattgttcaaatttattcgcatgctcacgtttcggctttgtttttggagcttcaggcaagaataccgtacaacagtcttcgtaagggcgaattgagatgtcatacaagtcaatcgctcttgaaattctcataatttcaattttatccatcgaaataagcggccttaataccggatagtttgttacttcgttgatcgtattcatactctgaatcgtttgacttgcaacctggccaagactttctcctgttgcaatggccaaagcattatttttctcagcaagtttttctgtaatgcgcatcatcattcttctcataatcgtcatgctatagttatctggcatttccttttgtatcgccttttgcgtatttgtaaacggaacgatatgaaggcgaatgtccccaccataacgggataaaacttttacaagatcctccactttttgtctcgaacgttcgcttgtaaaaggcggactgtgaaaatgaacagcctcaacttttacgcctcgtttcattgtaagatagcctgcaacaggactatcaataccaccagaaagcatgagcatcactttattgtcttgtacagttggcaatccacctgcaccttcggaattattgcagctaagataagcaccatcttgcttcacttcaactttcaattccatgtcaggatggtgtacatcaacagtcaatttctctgtgttacttaatacataccctccaatatcacggttcatgtcctgcgatcggtgcggaaactgtttgaatggccttctaaccgttactttaaacgtcatactgtcgttacccatttgatctttcactagctgtaatgctttttctttaatcaaatctatgtcgtgttctgtttttatagccacacttaaagaatgaatcccaaaaattgttttaagtttcattaaaattggttctggatcttcgtcattaagtttgacaatcattcgatcaaaagattgatgtacttcaattgccgggtaatccgacaatacttgcttcactctttttttcaaagatgtaataaaaccttttctatttttccctttaagagaaatttcaccgtagcgaaggatgatgtgatcatacatagctattacctcattacttgttttagttttggtacttcagtttgcaattcgtttagaaatatatcaatttgctctttagtcgtttcaaaagaaagactaattcgaatagcagatcttgctcgtatcgtggtcataccaactgccgctaatacatggcttatttcagccgtttttgatgaacatgcggaacgcgtagaaacataaatctctttttcttcgagcgcatgaattaatacttctggtttaataccaggaactgaaaaattcacaatatgtggcgcgcctgacattgaactatttagctcaattccgtcgatttttgatagctctgcaaacacgtgcgttcttaaagtttccagcatgctcttttgagtttttgctctatttaaatacaagcgaagagcctttgccatcgcaacaattcccgggccattttctgtaccggagcgaatttccctttcctgccctccaccagagaggagtggaagcaaagtgatcttctctcgtttaattaataaaccatttcctttaagaccgtgaaatttatgagctgagtacgaaacaaaatcggcctgaacatcattaaaatcaagtggtacttttccaatcccctggacatcatcaatatgaaaaagggcacgtgacttctgcttaataagatgtccgatctctttaataggttgaattgatcccagttcattattcacatgcataatggaaacaagaatggtatcaggagtgagtgctttttttagctcatctaaagataccttcccatcttgatcaactggcaaataggttactgaaaatcctaataattcaagttgtcgaaatgcttctaaggtagaggcatgttcaatgcaactcgtaatcagatgcttcccccggttcaagtactgaaatgctgttcctttgatggcgagattattactttccgttccacctgaagtaaaaataacttcatttattttcacgtgcaataactctgcaatgcttgatcttgcttggcggagtaacctttctacctctcctccttttcggtgaagagaagaaggatttgcaaaaaacttttcagacactgtacgaaaagcatcaagcgcttcgttatacggcttcgtcgtagcactattatccaaataaatcatattatgacaccttcagtcatcttttatttccaactaataatcttaccataggttaaagtaattaccaaatcaactattctatcttaaagagaaggaacgataggattaaaccttttcacctatgggtgatattaccaaagtcgctttattccatatacgaaaagaggaaaaatagtcagaataattaatcattagaagaaacgttatgattcgtcgattaattgtgttaatatgaagtccgaaaattaggacatgttaaacagttgattcaggaggcaattatgaaactaaaattatcgaataaagacacattgacgatcggattaatgctatttgcactcttcttaggtgcgggaaatatgatcttccctccagcgcttggaaactctgcaggtgaaaacatttggattgccacagctggctttcttatcacaggtgtcggcttaccacttcttggcgtaacagctattggcttaaccggtggaagtttaagggacatcgcatccaaagtacatccgctatttggacttattttcacagccattctctaccttgcaatcggcccattcttcggaataccgcgcacgggtactgtagctttcgagatcggtgttgtgccatttctaaatgactctacaaacgtaaatgaattgcctttatttctctatacacttattttcttcggattaacattctggttatcattaaacccgacaaggttagtggatcgagttggaaaaatactaaccccaattttaattttagtcctaggtagtctcatcattggagcatttataaatcctcctggacctttatcaacgcctgcacctgattataagagcggcgtgttctttaaaggctttatcgaaggatatcttacaatggacgctattgctgcccttgtattcggaatcgttgtgatacaagctgtcaacgataaaggcgtttctgatcgtaaaaatgtttcgattgctgtactaaaagcgggcattcttgcagcgattggattaacggccatttatctttcattggcgtatatcggtgcaacaagcacgagccttgttggatccgcaaataacgggggagcgatattatcaagtattgctagctacttatttggctcattaggaacgcttttgctcggggcggcgataaccttcgcctgcttaaccacatctgtaggcctcgtaaccgcctgcggagaatatttttctaaaacatatccaaagctttcctacaaaaccgttattctagtcgtaacgctatttagtacattcgttgcgaatctcggtcttacacagcttattacgtttactttacctgttttaattgccatttatccgatcgctatcgttttaatttttctaacatttattgagaatgtttttccgattcaccactatgtttataggggagcgattatcttaacagtattcattagcgtgccaaacgctctagaaggagcgggaattgttttgccaggtatgggtgtcatgcaaacactgccgctttatagcgaaggcgtaggatggattatcccggccattgtaggcgctgtgatcggcctcttactctctagaacaactaaacaagcgtcgtaattcgagaacgcaggctatccgcctgcgttctttctcttttgttaaatgtccattcactgaaacgaatcattaggaagatcttgagacacaaaaaaagctctcctcgaaaggagagctacgattcaacaggttctcttacatcatttttaagagtttgaagcacctgtggatctactttttcaattgcagcttcagctgtagacaaggcatcatcatactcatattgtctaaagtgattttctgctttttgcagcaattcatccacacttcgatgcttcccacgataccgattgccaaactggatcaaacgttccgttaagacagcgtcttcgacaagcttcttcgtaatttccgtgctgtgctcaaccgcacgttccgcgtcagctaacacttcattaatctgatagatatcaagcggtacgtctgaaaggcgttcacttaattcgataataatgtcttcagctagttcatagccatcaagataagactcaggtatgcctggtaaattacttaatttcatcattcttctagattcgattaacttccgctttagatctttgattgtatctagtgctttaagctcatctcgcctaagcatgtgcaagttttctttctgaatctgcatttcgtgatcaatcgttgcaagatcttcttttagagaaagcactgactcagcaagagtcgtataagcttgttgattaccatctaccgcttcccgaacagcattaaagcgaatatgcatatctgaaattttcagttcgatatcttttatcatgtttagttcctgttcttctaaccgatagcttagttgaacaacgttcgtttcttcctgtaaatcctgaagataagaatttgttttgaacagttcatgttcgatctcttctactttttcagtaacgaggtgccttgcatctacctcggcttctaattggtcataaagtccttcaatacttcttcgtaccgaatcgatttctgttttcatttcttgaacttctgtcttctcaatggcagattcaaaacgtacgaggtctgattctacctgttcgatgtgatcctgaatttccaggtgatcaagaacatagccttcagatgccatcgcagaagtaccatcttcaagctctttcaattgagcaggtatttgcgtatgaactagcgcaattaattctggtgttacagcaattttatcctgaacagctgttaaccgttcttgaatttccattagtacgcttcttgcctcaagataatttccttcttctgtatgctgttcataatgcttaagattctgctttagctcatcaagctctgcatcaagcgttggataagcttttccaagcgaacggttctgagataaaagccgttgctttgcttccctaaacacttcttggacagaaataatatccgttcggttttgctcttcacttgaaacaagttcattaatatcttccaacattaattcaattcgcttttcaatttgctctaaccgttcgcgcgtttcaacgagagtcgctttcgctttccgaaagcgatacttctccgctgcttcttctgtatccatgagctgttcttctagattaggaagtttaacggcaacaatttcgtcccattcttcacgccacttctcaaatttctcttccgtttgccctgacatcgttaatccctttactctcgagatctcatcagttacaggtctattcaatatatcaatcttccattcttctagacgatcgatttcattgtatatttttcttctagcaaaagtgccatataatatgacggcaaccagtaaaataatcgcaatgacaatatactccaacggaagcaccccttcttccacatcatcaatttatgtatgcatgctaattaagcagtctaaatcatcagatatagatcttttataaacaaatatgtaggaaattcattaatgtttttatgataccatgtaattacctctttgactaaataaattcaatattcgacagctaaaatccttgattatattataaactttttcattttttgaaagaaggtgctttagaatgaatatttcatacgatggacacatccactctcctttttgtccacacggctccacagatcaatttgaagagtatgtagaagcagcaatacaagcaggttataaaggaatgacttttacggaacatgctcccctccccgaaacctttactgatcctgttccagacaaagacagcgggatgaagtgggaggacgttcatagttactttgattccattcaacaactgaaagaaaagtataagggtttaattgaaattaatagcggacttgaagttgattatattgagggttatgaggaagagacaagacaattacttgattcagttggtccacttctagatgacgccgttctttccgtccactttatcaaacacggcgatttctatacatgcctggactatagcccagaagcattcaatgacttgatccaagcgttaggttcggttgaaatggttcataaaaagtattatgaaactgtgctaaagtcagttcaatccaatttaggaaattacaagcctacccgtataggacatatgacactcgcaaataaattccagaaaaaatatccggttaaatacgattttcaaagtgaaatagctactattcttattgcgattaaagaatacaattattctcttgactacaatggcgctggtacagtgaaaccactttgcgaagaaccctatccaagcgatcaagtcgtcaaagaagcgttaaaacgagaaatccctctcgtctatggctcagatgcccatagtgcaaaagggattggacagggagcagatcggctgatcactcatttgctccaaaagccaaataaattcaaccattcataacaagcgggcgctcgtcccacttcttctccttacaaatagttaactgaatccactgatataactgtttgttatatttttcaataaaataacgttcattcggttgaatgtgatgcacttcgagaatatattgagggtgtaaaaacggcatcgaaagcattcctttcatttgcatcacaatataatcaatgggttgagggcgaaactcttttctcgcaaaacccacttcgaaaatcctagtgaaataatacttttctttcgccagataagtggtcataatttcacgaacgagaacggaatcgaatgtgatctctcggtgtacaaatcgagctaactgtctattcaaatattgatattccatcacacgatcaatcgcgtcaataagacatgtttttgctgagtgcccttcaagctgttgatatgcagcttcaatctcttttacatatccttcaagaaaagaagtcattaaaaactcagctaatcctttttttccattaaagtaataagagattagcgcaacgttcacctctgctttactcgcaatatcacgaactgaagtaccgtggaatcctttggtgttaaagagttgaatggcggcctggatgacacttcgcttcgatactgtatctcgctcctgtttcactaggaaccacctccaaatagttcgttcttagtaactcattcgttaattgctcctccattcctttaataatcgtgcgacaaaatatgtgtgttcctcaacaagatttgatatgattatcataatttcgagttaaggaagaggtgttttgacatgtttgaggtcgaatcctattcaggtaaaagagaaaaagactatcaaatggtaattaaacaattaagagcactgctagatggcgagacgaatcagctagccaaccttgcaaatgcttctgcattattaaatcagtttttatcagatgtgaactgggtaggtttttatttatatgaaaaagaaaccgatcaacttgtcctcggcccattccaggggctacctgcttgtgtcagaattcagaatggaaaaggcgtatgtggcaccgcatccaaggaagtcaaaacaatgagaattgagaatgtccatgagttccctggacatattgcctgcgacgctgcgtctcaatctgaaattgtagtgcctattctttctaatggagcacttcttggtgttcttgatattgacagcccagaagttggacgctttgatgaagtggatcaagagtatttagagaaattcacattagcattgcaagattacctttaagatcaggttaatcttcatctataagaactttaagaaatgataaaacccgtccaatggagacctccattggacgggtttttatttttcaagcgcttgttcgatatccccccaaatgtcttcccatgcttcaagtccaatcgaaagacgaataagcgattcactaatccccatccgtttccgctcttcttcaggaaccactgcatgtgtcatcgtcgccggatgttgaataagcgtttcagcatctccaagactaactgcaatttttatcattcctagctgattcataaaattttgtgcttcttgtttaccaccatttatttcaaagctaattaatccccccgggcttttcatctgcttttgtgcaattgtataagaaggcgattgctctcttcctggatacatcacattcgttactgatggatgctcgattaacttttgaacaatgttatgagcatttgagcagtgacgatccatccgaattgggagagtcttcaatccccgaaggagtaaccatgcatcaaacggtgaaagaattcctccgatatccttttgtgtactctttgcaatggcagtaattgtcttcttatcactcacaactagtccggccaccacatctccatgtcctccgatatattttgtagcgctgtgcaaaacaatatcacaaccaaattctagtgggcgttgtagatacggcgtagaaaatgtattatctacaacaaccgtgattcctttttcctttgctacagaagaaatcatttcaagatcaattaattttaatgttggatttatgggcgtctctatatagataaccgttgtatttgggcgaatagcttgttgaatttgttccaatgaatcaagcggaagcaagtcatgctcgatcgcaaacttctcttctaacattttaagtaatccaaacgtgcagccgtacactccttcagaacaaaggatatggtctcccgactttacaagatacataagaacggcagaaacagctgccatgcctgaaccaaaagctaatccaccctctgcattctcaagagaggcaatcctctcttccagcattcgtacagttggattaccaagtcttgaataaatgtagccaggctcttcaccagcaaaccttctttcaccagcttcggctgtttcaaatgtaaaagtggatgtttgatagatcggtgatgctagactattatgatgtaatttggaatcatatccatcatgaattgtttttgtctcaaaacgttgctctcccaaagtcataaccccctgttataaaatcacacattacacttttattgtaagcgttttcaataataaggtgaagagggaattatctttcttaacagatcattgacatcttcttattcatctcattcctactatagttgacatctcaatctgaaagagttacaattgcatttgtgtaaaataagaatgggcagcagcgtgacgggctgcgatttcattgtgttccttttaataggtacgccgcgtaccctccggctgtcgaggtgaaggcgtgtgaaaacacaatgtgcgcaaaccggaatcacgacactgtttttattttataccaataataatggtataaaggaggagctaaatatggctcgttatacaggaccaagttggaaaatttctcgtcgtcttggtatttctctaagtggaacaggtaaagaattggaaaagcgtccttacgctccaggtcaacacggacctaaccagcgtagaaagctttctgaatatggacttcagcttcaagagaagcaaaagcttcgtcacatgtacggcatgactgagcgtcaattccgtcgtcttttcgatgatgctggtaaaatgaaaggtgttcacggtgagaacttcatgattcttcttgaagctcgtcttgataaccttgtttatcgtctgggtctagctcgtactcgccgtcaggctcgtcagctagttaaccacggccacatcactgtcgatggcaaacgtgttgatatcccttcttaccgcgtagcgactggtcaagtgatcagcgttcgtgagaagtcaaacaaccttgacatcatcaaagaagcaatcgaagtaaacaacttcgttccagaataccttactttcgatgcagataagcttgaaggtacgttctctcgtcttcctgagcgttctgaacttcctgctgaaatcactgaagctcttatcgttgagtactactctcgttaagctgtttcaactccccggaatttattccggggtttttttatgtcaaaaaagtgaaattggtttatacgaaaaaagagatgctcctaacgagcacctcttcattaacaattaatatgtgagaaggaagtatttctttttccctcttcgaataataacgtattgattttcaatttgatcgctttctgaaattaccttatccatttccttacagcgttcaccattgatataaacggcgccattcttcacatcttctcttgcctgacgcttggaagatgaaattccagcttctacaagtaagtctatcaatcctttttcatgatcttctacatgataggatggcacgtctttaaaccctaaacgaatttcttcagccgttaattgcttaatgtccccactaaaaagagcttccgaaatattaatcgcctgctgaagcttttcttctccatgcacgagcttcgttacattttcagcaagtgtacggtgcgcttctcttttttctggtgcttctaaatgcttcgactcaatttctttaatctcttcaatacttaagaatgtaaagtaatttagaaactttacaacatcacgatcatcagtattaatccagaactgatagaattcataaggagatgttttatcagcatctagccagatagcgccaccttctgatttaccaaacttggagccgtcacttttcgtaacaagtggaaacgttgcaccgtatgctttcgtcgattcttcgcttccttcttctttacgaattaattcaagaccagcagtgatatttccccactgatcactacctccgatttgcaagcgacaattttcttttcgataaagttgaagaaagtcatacgattgaagaatcatgtacgtaaactcagtaaaggaaattccggcttcgagacgtgatgtaaccgaatctttcgcaagcatgtagtttaaaccaaagttctttcctacatcgcgaagaaatggaatcacgttcaattcgccgatccagtcatagttgtttacagcttttgcagcattcgcttctgtaccaaaatctaaaaagcgcgctagctgaccctgtaatttattggtccattcttttacaatatcttcggaatttaacgtacgctcattcgaacggccacttgggtctccaataagtccggttgccccaccaacaagtgcaatcggcgtatgccctgcaagctgaaatctacgaagcgcaagtactggcaacaaatgtccaatatgaagactatcagctgttggatcaaatcctgaataaagagcaattcggttgttagacaactctttttcaagaccttctctatcggtcacctgatttaacaggcctcttgcttctaattcatctaaaatgtgcatatcatcgtctcctctaattcatagtaattccctatttcaagcaattaacagttctacaaacataaaaaaacccgcccctaaaaagggacgagattgatcgcggtaccacccttgttgaagaaagcatgctttcttccactcagtcagaataacggtctgaaccgtctaatgctacacagacgttgtctttcccattagatgctcatggaggtaattcgcattttcctttatgctagttctcacctaccaccagctctctgaaaaagggagaaaaacgctactttgtccaatcgaagcatgtcgttcattaaaaaacactatataaattaatatcacaaacggaaaaccatgtcaattctaagcctactgaaatcctaccagtttatacaaatctcgacgacatatgctataataaataggattaatttgagggggtataggaatgcgagagcttttttctactatcaggcagaagtggaacgcgttcattgatagattacaagaatacaacatattatccggctctagaattgcctataaagttatttggaatctttttctgatctttatagtaattggtcttatgggcacatttttcgccggtggtgttggtgctggatattttgcatcgcttgtaaaagatgaaccgattcgctcttacgatgagatgaagagtgacgtttataactatgaagaaaccagtgaggtctactttgctggagacgtatttcttggaaacttccgttctgatattgagcgaaaagaagttgagttaaaagacgtttctcctcttctacaaaaggcggtcatttccacggaagatgaatacttttacgatcatgacggcattgttcctaaagcaataggccgagctgtactgcaagaagttacaaattcagaagatcgcagtggtgggagcacactcacgcaacagctcgttaaaaaccagattttaacgagagaggtttcatttgaacggaaagcaaaagaaatgctgctcgcgcttcgactggaaaacttttttaataaggatgaaattctagaagcttaccttaacattgtcccttacggacgaaatgcttctggtaataatattgcaggcgttcaagcagcctcacaaggcatattcggagtcaatgcaagtgatttaaacttgccacaggctgcctttattgcaggtattcccaaaaacccttatacatacacccctttcacaaactcgggtgaggtaaaaaaagatctttcagctggaattgaccggatggaatttgttctttatcgcatgtatcaagaagaaacgattaccgaagatgagtacaacaaagcgctggaatacgatatcgaaaaaaacctgactaaatcttccccttcaccagttgagaaatacccataccttacatttgagattgaagatcgtgcaaagcgcgtacttgcccagcagatcgcagatgaagaaggttatgatggagagaagcttgcgaagaatttagataactacaatcagattacttatgaagctaatattaatggcgtaagcgctactgaaattgcaaaacaaaaagaacttaaatgggaagaaattcagaaggattctgaagtttttcttgagtttatgagtaatgcagaagttgaattgcgcaaaaacggttataaaatctatacgacaatcaacaaagatatgtacgataaaatgaatgaagcaaaagataaagcactgggtaatccaaactatttccaggggacaaaaaccgtttctgtccaagatcctgagactggcgagttggttaataaagagcttccaatggaagttggaagtatgttaattgaaaacaaatcaggaaagattttatctttcattggaggcagcgactttagtaaggagcaattaaaccatgccacaggagcgtatcgttctaacggttcaacaatgaagcctttactagattatgcaccggcaatggagatggggaaagttcaaccgggttatattgtacctgacctcccgtccgataatctcccatggcttcctgataactatggtaagagcttccatggacttgtaactgctcgtacatccctggaaaaatcttataacgtacctgccgctaaaatatatcaaaagatggattcttatcaagctactgaatacctaactaaaatgggatttagcactcttaccctagaagatcgttcaaattatgctacttccataggctctttagttagaggcgtcagcgtcgaagaaaacaccaatgcctttggaacattcgcaaatggtggaaaattcgtcgatgcttatatgattgataaaatagtcgacagagatggcaatacgattttcgaacaaaaacctgaaccagtcgaagttttcagtcctcaaacagcgtaccttacgatcgacatgatgcgcgatgttatcagtcagggtacagctcaagatattccgagcaaattaaaatttgcttctgattgggcaggtaagactggtactggacaaaactataaagatgcctggtttgtagccgtaaatccaaacgtctcactaggggtttggacaggatatgatctcgaactaccgatggattcaaacctttattcgaaacggaataaaaacttatgggccctctttgcaaatgcagcgtacgacgctaatccagaaataatggatccagaagaatctttcaaaatgccaaccggtattgtacaacgttctttctgtgggatttcaggaaagcttgcatctgacctttgtcagaaagctggtcttgtccaaactgacctattcaacgccaagtacgtaccgactgaagtggacgacagcctcactgaaggacgctatgtagttatgaatggtaatacgtatcaagcgcttagctctactccagaagagttcgtgtccagcggagtgatgatcaaagaagattatttctctggagtcgatcttgcatcccttttaccatctgagtttaagaacctgaatattgtttccgaaggcactactgcttcggaaaacggaaaaaaaccaggcgcagttggtggcctttcaattaatggatcaacattaaattggggtgcctcaggtgaaagtgatatcgttgggtaccgcatttaccgagcttcgaacgggagcagctcctttacgaagcttggaagtataaaatcttctgatggtagctcattcaacatcccttctggtgcttatgcttattacgttacagcggttgatgttgctggtaacgaatcaggagcttccgctaaagtaacaagtggagattggtctaaaaaaccggaacctaagaaaaagcctgaatcattgccctcgtcaaacgaaagcaatgatcaaacttccgaaaacagtaataccgaggatgaagaagctaccgaaaatgaagaagatgaatcaagcaatccagaagattcatcttcaaacgaagatggcgcaaatactgaaaataatgatagtaccgaagaaaatgagaacagcaacacccccgataatagcagcaatagcaattcaagcggggcaaacagcgaaaataacgctaatagttctactaatagttccactaatacaaacaataattcggaataaaaaaacagcctgtagcaaactttgctacaggctgtttttattctttaatcttccatcgttgacaaatctccagtaggtaaatcaagttcccacgcctttaatacgcgacgcataattttaccacttcttgttttcggaagcttgtctctaaattcaatttctctaggtgccgcatgagcagctagcccttttttcacgaagtttcgaatctcctccattagctcatcagttggctcatgtccgtctctcagtgcaataaatgctttaatgatttcacctcgaacagggtctggtttaccaatcacacctgcttcagcaacagcactgtgttcgacaagcttactttcaacttcaaacgggccgactctttcacctgaagtcataatcacatcatccacacgcccctggaaccagaagtagccatcttcatctttataagctgaatcaccagaaacataccaatctccttttaagaaatagctttcatacttctcaggacgattccatatcgctcgcatcatcgatggccatccttttttaatcgcaaggttccccatccggttagctggaagttcgttcccttgatcatctacgatcgcagcgtgcacgcctggaatcggtttacccattgatcctggttttatttccatagaagggtaattgcttatgagctgtgcacccgtttctgtcatccaccagttatcatgaattcgaagattaagtacttgattcccccacttaataacttccggatttaacggttcccctacgcttaatacatgacgtaatgaggaaagatcatatttcttaacaatctcatcgccagctcccattagcatacgaaaagcagttggtgcactgtaccatacagttacttcatatttttcgattgttccataccaatcttctggactaaagcggccaccacgaataacgttcgacgtcccagcgagccatggagcaaaaataccataagacgtccctgttacccaaccagggtcagcagtacaccagtaaatatcatcttcttttaaatcaagtacccacttcgctgtttgatagtgttgtaccatcgcattatgaacatgaaggacacctttcggcttacctgtcgaacctgatgtgtaatgaagaatcataccatcttcacggtcaacccattctatttttaactttttttctgctgactcaaaatgcttataaaagtcgatatacggtccttcttcttttacgttttctcccacaagcacaacactttcgagatttggaagctcatcaactggtacgcgctcaagtagttcaggtgttgttacgagtacctttgcttcactatcctcaagtcgatctctcactgcgccttccataaaagcttcaaacagtggcccagcaatagcaccaagtttaagcgttcctaaaagaatgaagtatagctctggagatcttggcatgaaaataaagacccgatcccctttttcaacattcactttttttagaacgttacctgctttgttactcattgatttcatttcactatacgtatacttctcatcgcgtgttgggtcagaaaaataaagagctactttgtttttacgatcggactcagcgtgcctatcgattgcttcgtaggccatattgacattccctgtttcactccaagtaaatgttttctctacgcctttccaatcaaaatttccatatgtagcttcataatcctgtaaattatgattacccaatgtagcagaaagcggtttcaattccataagtaatctcctccttctccttcatgtctttccctgttagtataacataaattcctaattttttaacaaatgacaaaacttcaaaaaataacactgaaaccccttacatttattttgtttcatgtataataagaattgagacgcttattaaaaggtggtgactagatggaacatcataaaacgtataatgcaattgagtggaacacgccacatggaaaactaattatagaaggccctatcacccccgatcgcctggcatcctatcatttacataaggaccttgtcgcatttcgtccacctgagcagcagcataaagcacttgttgaaatagcaggacttcctgaaggccgaatcattgtagctagagaaagagaaacaatagtaggctacgttacatttctttatccggatccccttgaacgctggtcagaaggaaaaatggaagatttaattgaattaggtgcgattgaagtcatccctaaatatcgtaatgctaaagtaggcaaaagcctccttaaaacttcctttatggacgatgctatgaacgattacattgttattactaccgaatattattggcattgggatcttaaaggaactggattatctgtatgggattaccgtaaagtgatggagaaaatgatgaatgctggaggattggaatggtatgcaacggacgatcctgaaattagctctcatccagcgaattgtttaatggctcgaattgggacgagaattaatcaggactctattcaagcttttgatcgcctccgatttcataaccgcttcatgtattaagattgcaaaggagtgagtcaagttggtcatagaagaaattatgaatcgaaatgttttttcacttgaagagaaccaaaccattgcagatgcaattaaactgatgagagaaaaaaatattcgtcaccttccgatcgtgaatagcacgggagagctaactggtattgtttcggatcgagatattaaagatgctagtccatctattcttgactcaaatcctaacaaagaagtgttacaatcacatctttcctctattatgaagaaagatgtgattacagctcacccactagatttcgttgaagagatctctacaattttttacgaacagcgcattagttccattccaattgttgataatcgaaaagtaatcggtatggtaactgagacagacatgttacatacgctcatcctattgacgggtgcacatcagccgagttcacatattgaagttcaggtagctaacgtatctggccaacttgccgatatcacccaaatcattaaaaaacgtaatgtcaatatcatcagtgtgcttgtttatccatgcagtcacgatgaaaaatacaaaaatatcgtttttcgcattcagacaatgaatccaacttcggtcattaatgatattaaaaaggaaggttatgaggttctttggccgagcatgccgggtgttcaaaaatgacctgcgattctgtttttgtttactcctcagattatctaaactataaatttagtgatgatcaccctttcaaccatattcgtgttaaactcactcaggaccttcttactgaaatgaaagctctaaacgattctgatgtaattgctcctcgaatagcaacagatgatgaaattgctctaattcatgatccagcttacatcgacgcagtgaaaaaagcagggaaaggaagtttagcatcatccatcgcagcgaactatgggcttggtactgaagatacgcccatcttttcaaatatgcatgaagcgagcgctctcattgttggtggtacgctaacggcagttgatgccgttatgactggaaaatctgatcatgcgctcaatgtgggcggtggactgcatcacggatttagagggaaagcatctggtttttgtatttataatgatagctctattgcaattgaatatatgaagaagaaatacggtgcaaaagtgctttatgtcgatacggatgctcatcatggtgatggcgttcaatgggcattctatgacgatcctgaagtttgcaccctgtcgattcatgaaaccggtcgctatttatttcctggaacaggaaacattaatgaaaaaggacagggaaaaggttatggattttcatttaatgttccaattgatgcatttactgaggatgaatcattccaagaagtttatgaagcgtcttttcgtaaagtaatcgatttttttaaaccagatgtgattttaactcaaaatggagctgatgctcattactatgatccattaactcacctttctgtttcgatgaaaagctatgaattcattccaaagttagcccatcagcttgcacacgaatattgtaatggaaagtggattgcagttggtggcgggggatatgatatttggcgggtggtaccgagagcgtggtcgagaatttggcttgaaatgaaagggctatcaatatcaggaagattaccgcaagagtggttagatcgatggaatcccctttctccccttactctccctgaaaattggcatgatgagactaatttatatgagcctattccaagaaaacaagagattacagagaagaataaactcacttgtgagcgagcgctctatcaaattacgaatcaatagaaaaaacgagccacaggctcgtttttttattcttcgttatgaattgtagaattgcgatgttgcaaacggtgtggcaatacaacagtttgctcttctactgtttctttattcattaatttcgttagtagacgcatcgcaacagcaccgatatcgtacattggttgaactactgtagaaagggttggacgaaccatggtagcaagcctagtgttatcaaatccgactacttcaaaatctttcggtacgttatatccattatcttgcgctgcatgaataacgcctagagccatctcatctgtacctgcgaaaattgcagtaggtttctcgtctagctctaagaatccttccatcgcttcaatacctgaatcgtacgtatagtcaccaatggctacacagttttcatcgaccgtcattcctgcatcttcaagagctgtgcggtacccaagaaacttctcttcgccattaattgggtcttccaaaggcccactaacaagaccaatttttttatgccccttttcaataaagctagtgacaagctcatgagccgccttctgataattaatattaacggaagggatttcttgactcttttcaagcgttgcagctagcacaatcggtacaggtgagcgcttaaattcttctacatgctcttcggtaattttaccgcccatgaaaacaatcccatccacctgtttaccaagcatcgtattaagcaagtgaatttctttttctttattttgatctgaattgctcaaaataatattgtatttatacattgtcgcaatatcttcaataccacgagcaagctctgcaaagaaaatactagaaatatcagggataataacgcctacagtagtcgttttcttactagcaagtccccttgcgaccgcatttggacggtatcctagtctttcaattgcttctaatactttttttctggtggcaggctttacattaggattgccattaacaacccttgatacagttgccatcgatactcctgcttctttcgctacgtcataaatcgttgtattcacgatgatcctccttcatgctcttacggactttaatttacttaatgatacgatactatccgtttgactgcaaaccaaatccttatatcgactaacactaatccgttgttatgctccatgcaaaattgtctacatttggtatgtgggatatttcacaagtagatactgtattaaagatagcatatttaacgcttttttgcttcatataagcataaatttaacacacaaaatcataacagcatacaatttgccttcattattacataggataacactcttacgcacttttattcccaatgaatcccacttataaagatagactagctctcaattctttcgaaagaacgatgaaacaaaaaaaccttctacttaaatagtagaaggcgttactttagctggattgaataaaccgctagctttcaaatcttcaacaaattgttcgtactgtggaatatctaactgttgagcagcatctgaaagcgcaactgcaggatcaggatgaacttcaaccatgataccatcggcaccgatcgcaagacctgcttttgctgctgggaataatagatctttacgtccagttgaatgcgttacgtcaactagaactggtaagtgagtttcctgcttaagaatcggtacagctgtaatatctaacgtgtttcgtgttgctttttcatatgttcttatgcctctttcgcaaagcatcacttgcgtatttccgtttgaaacaatgtactctgcagcattaatgaattcctgaattgtcgcagataaacctctcttaagtagtactggcttatcaacagaacctgcagctttaagcaattcaaagttctgcatattacgtgctccaatttgaataacatcaacgtactttactgctgtttcaatatctgctggattaacgatttcactcacaacagcaagatcgtactcatcagcaacttgcttaagaatcttcaatccttcttcaccaagtccctggaaatcgtatggtgatgtacgtggtttgaaagcaccgccacgaagcattttaaatccttgcttcttaacagcttttgccacttctgcaacttgctcatagctctcaacagcacatggtcctgaaataagaacctgaccaccatctccaactttttcgcctctaatatcaattacggtgttatccggctggcgttttcttgaaactaacagcgctttacggtgatcgtcttcctgtagctcaaggcttgccttaaaaatttccttgaatatatgctgaagagtggaattatcaaacggcccaccatttttctccgtaagcttatcaagcatcttacgctctcgaacagggtcaaaacgattaatcccctgtgctttctttactctacctatctctttcgccacttcagcacgctcattaattaaatcaagcagctgtaggttaatctcgtctaatttctctctcaactcatcaatttggatattagccataatatctccactcctatctgtttaagtgattagggttattatatacgatgaaaaataaaatgtcactacttttcttttaattcttaaacgcttttaagcattaaaccatgtcagtgaaaaaataaacggcttcatgaagccgtttattttagaaattgctttgcagcatcggtcaaagaagtataagtaattctccaatgggagtcattccaaaccacttcgtctccattaaatacaagcgcttgaggtgattgatgcttcactccgtacgcatccgcaatttcggtcgataatgggcgtgattcttgcacattcaaatagtatacttcttccgtcacatcctcagagaacttttcaaattcttcaaatgcttgagcacttattggacaagtcgtactatttttaaatacaataaattgcgaatgatcctctttaacccgcttaaaatcatcagaggttgttagttttgtaattgccatcaaactctctcctttcaaatagctatagtatcattataaagaattcggtacaaaatgaaaaagaagaagcactaagcttcttctttttcattttgttattttcaattatggcttcgtagggttttccattgaagctggttcttcttccgaaaagtggtcattaagatcctgctggaagctctctacatctgcatctgcctgagtatgaagtgcttcgttttcttcagattcaagattacgatctttaatctttgaaacgatattatttgactgatcagaaacctgcttgtaaatcgttgaagatttctctttagcgcgattagcaaagtctgtactacgctctactgctgagtcacggaattgtgacgttttttcttttacagctccagcttgttggttaagatcgcttctaagctctttaccagatttaggcgctgaaagtagtgccgcagcagcccctacaattccaccgattagtgaaccaatgataaaatcttttgtgttaatgttgttgtcagacatttaaattacctcctatgattttgaatcaacatattgatcggttgctttctttttcacttgccatttttgccaaatttgcatagcagcatttccccactgaaccacttttgtaacctgctcagattgacgttctgcttcatcggtaactttaccggtaatattttttaaagaatgattcatctttccaagtgatgttccaacttctttcacttgcacaaagaccgtgtccagagcttcagatttaccctgaatatcctctgcaagtaaatttgtcttatgtagcagtgctgtggtttcggttgttaaaccattcatttgtttctcaagactatcaagtgtttttgctgtgttacttagcgtatctttcaaagattttaatgtttgtgctacgaaataaactaaaaccgcaaatgcaatcgcaataatagcaacgcttaagtaaagaataatctccatgtactggcacctcccttttctccatctgttcccttcatttgtctttagtaaacacaagtttgtcatttcacatatgaatgaaaaatgagtctactttactaccctacaccataataaattcgttacaagtctcattattccttttttatttttttttataacacaatctccttgatctaatatgaaaaatggtgtatttatgcaaaaaagaaaaggcataagagccttttcttttagatagatgctttttctgtttcataggctgcttgatacttttgaatatcgccagctcccatgaaaagaagaacgccactttcatggtcatttaattgctgaatggattcttctgaaatcatatgcgcatttggaattttctcaatcagctgatcaatcgataattgacccgcatcttctcgtgctgaaccgaagatatcgcataaataaacaacgtctgcttcttttaaaacatccgcaaactcatttaaaaacgtttttgttctcgtaaaagtatgaggctggaaaatggccactacttcacgattcgggtatttttgatgagcagattcaatcgtcgctttaatttcagttggatgatgagcgtaatcgtcaattagtacctggccatcgactaccttttcagtaaatctacgcttaacacctttgaaatttgctagctgagccgccacggcatccccagaaagattttcatagtgacagagagctactacggataaagcgtttaacacattgtgtttcccaaacatcggaatctggaacgtacgataataatcatcacgaacatgaacgtcaaaggtagtaccgttctcatctattttaatatttgtcgcttgaaaatcattctgatcatcgaagccatagaagacaactggcacttttgtttgaatctgctgaaggtaagaatcgtcaccatatgcaatgatacccttctttacaagcatagccatttcttgaaatgccgaaaaaacatcatctacatctgtaaaataatctggatggtcaaaatcaatattcgtcataattgcataatcaggttgatatgataagaagtgacgacggtattcacatgcttcaaaaacaaagtattggctatctttcacgccgctaccagtaccatctccgataagatacgatgttggttctgctgctccaaccacgtgagataacaaaccagtcgtcgatgtcttaccatgagaacctgttacagcaatactagtgaacttttgaataaagtcgccaaggaatttatggtaacgatagacaggaaggtccatttctcttgctcgcactaactcttcatgctgatcatcaaaagcattaccagcgataatcgtcatgttctctttaatgttttcttctccaaatggaagaatagtaatccctttttgctctaaagcctcctgtgtaaagaatcgcttctctacgtctgaaccctgtacactgtatccaatgtcgctaaggatttgtgcaagagcgctcatcccggatcctttaatgccaacaaagtgatatatagtcatttcagaacctccacactttcatttcttctccacttaacctttttttagtatatgatgttattacaagtatgcgctgcatttcttttcaatactacattatagcagaaatagagacaggtctacaatagaattcatgaaactaaattggtcctacgggcgcaaaaaagacaggactgtgttcctgtctcatattgcttattcaacacgctctaaacgtggattatgtcgatattttctgccagctttcgcttcgggttcatcatcaagaataacattatctcctgtaaacccaatatccactttaagcaaactgctacctacaccataaatatcaacaggaacattctgagattcgaacgttctgattctttcttcagtaaatcctccgctaacgacaattttgacatgattaaacccttcatgatcaagggcttctcttagtgcaaagattaattcagcattaacccctcttggatcaaatgttcctaaaacgtcagggtttctccagaaatactgatcaaccattgtacgggaagtatctacacgaacaccttttaatgtttcaccaaattcccttgccacttttaatgagtctgtgatgacatcattgttgtaatccactagtgcaattaattcatcttcaggatatttcgcatagtatgctttcgaagcttcaacaacatcacctttgaacagttgaataagggcatgcggcattgtccccattcctcttttaccccaccactcattcatcgcatgcgttgcctgagcagtcgaaccgccaatatgggatgcatatccatcaccagcttgttgcgtataatggtcatcacgatcgcccataaaaataactggtttttgtatccctgatgatcgcgctgcttttactacatgataaacattcgtcgctactgatgttcttctgcccagaataccatcaataattccttctaggaaaccaaagttttgataaggtcctttaattttcaatacagtttcaaatggagaaattttatctccatctttaagagaatcaatttcaagtgaatcaggatccttcgcaaatgttttaatcagggcaattgcttcatctgaaccacaaagaacggcatcatgcttttgaaaaaactgcatcgtcacaatattatctggtttaaactcttccacaatttcgcatgttttaagaaagtaaactgcggaaaaccagccctcacctacacgttcatcaaatttaaacgtgcggtttgtaagtctttttattttcccttgcattttaagttcaatttctttcataatggggctccttcaagtagtttcgtcattcgaatgtgagctctttatgttcaaccattcacttatctgactataatttaacattagcttaacactatttatcatatagaaccagactacataaaacaagtaaaaaagatatgcactagacgtgcatatcttttgagaatgcttcttcaaaatcagctttactcattaaaatacttcgtggcttacttcccatcgcttcagaaaccaatccgcgctcttccatcatttcaatgagtcttgctgcgcggttgaatccaattctaaatcgacgctgcagagcagaagatgaagcttgaccttgttcaagtgcccacatacatgcctcctcaaacaaatcatcctcctgatcatcatactgctgttttttcattaaatcttctttcttaattaaatagttaggcttccgttgttttcgtacgaaagaagtcactcgctcaatttcttcatctgatacaaagttcccctgcaaacggacaggttttgatgaaccgttctccagacaaagcatgtctccttttccaagtagcttctctgcaccgctcgtatcaaggatggttcttgaatcaatctgagatgatactgagaaagcaattcgagttggaatgtttgctttaattagcccggtaataacatcaactgatggcctttgggttgcaactagcaggtgaataccacacgcccttgctttttgagcaattcgacaaatggcatcttctacatcctgaggggataccatcattaaatcagctagttcatcgatcacgataacaatgtatggaagtttatgctgaggctcaccgtggttaatcgcacgctcgttgtagcgctttatgtcacgaacacctgcagctgcaaatttctcatatcgctcttccatttcatcgactgcccacttcagtgccgtggtcgcttctttcacgtcattaataactggagtaaccagatgtggaagaccattataaggtgcaagctcaaccatttttggatcaattagcatcattttcacatcgtttggattcgctttaagtaacaaactaactaatatagagttgatgcatacacttttacctgatcctgttgcgcccgcaataagaccgtgtggcattttctgtatgtctgttatttttgcttcaccagcaatatcaaaaccaagtgcagcatttaatagagaaccttccgtttgaaaagccccgcttcgcacaatctctcgaataaagaccggcttactcgtaggatttggaacttcaattccaatggcatttttccctggaataggcgcctccatccgtatgtctcgtgcagctagactaagtttaatatcatcgcttaaattcgtaattttgttcactttaacaccaggacttggctgaacttcaaaacgagtaaccgtcggtcccatcgtcgctccaacaacttttgcttgaacgttaaaattggcaagcgttgattctaatagctctcgctgttcttcaagccactgatcatcactaccttcattccttggaggaatatctagaagcgatattggaggaagtttataatcagcacctgttcctggctttttcgttacatgacgacgatcgtttgctagcatcatcacattataaggcacctgaggttttggacgactttcctcttgtcgatcttgtttaggagattgttcttgaacagacatagttggctttgcagtttcttgcttttgttccacttcttgttctgacatatcatattcactctgcgtcaacacttgctgctgttctgaaacattgtccttaggttctcgttcttcctcgaaggttggctccttcaggctttccatttcttcatcatttccctgagcatattcatgcgtaccagattggttgaaactagtagagtcatccacttctatgatttcattttcagatccaattagggtaggttcttcattgatctcttcattgatctcagcttcaattacttcatcttgctcatataatatttcgttttcctttgaagcgttttcgtgaatgtgggaactttcttgtacgtccttcattagaggttcatcgcggaataggctctcctcttccacctcatgatcatggtgttcatcactttgaaatccaaatttattcgccccaaaacctgtctgcttctcttcttctagtataacggtatcctgctgatcaacaggagatttctctacggatgctaacgcttcattcatttgaggagattcttgctcaccgtgctctttttctgagagagagaccgttctctcctcttcagttaaagaaaaaggcactggttcttggataagtttgtcgatcacatcacttttatcaagcgacgtatatcgcggattaggattcgacttcttcgctgcatcctccatcttttcagcaacggggcgtttgctaaatccataaatgggcgaaggaatttcggacggtttaaaattgacgcccgaaaatttcttattagctactggctccgctttatccgaaacgccatctcttactgttttccttgaattaccttcttttttggacggggctaacttctcattctttttttctggcctagtcctatttgaggtaccctgctcttttttctgataattcgactcttttctatcttctttttttgtttggttatttgactgatcaggaattaatggaaaacggaaatttccctctctcggatattgatgaacaattcttgcttcattctttcgattcgcactctccatccgcccgatggaatgttttcgatcagtgcgttcttttaaagatttcgtttcttttacctctacatctctccgttctgtctcctcttcctcttcaatatcaaatagtttactccatactttcttaaaccaattattatccaattacaatcaccttttctaattaagcccttttagatcgcgttattcttctattttatcggaaaatcccctatcattgtaaggctgtttctaaaatctttcgtaaaaaaaagcggttcttcgtctaaaacagtaaaaataagttcaatataccctatacccgatttatgcgaaagaaaaaacctactagaaaattttctagtaggctttgaattcagaaccaacttcataatcgtctggaaggataagaatccctttttctttcggagcatctggtaaatcaagctctttagcagaacaaatcataccggttgattcaattccacgtaaactcgcatctttaataatcatacctgatggcatcacagcgccaactttcgctacaacgaccttttggccctgatcaacatttggagcaccacaaacaatttgaaggttctcttctccaacattcacctgacaaatatttaatttatcagcatttgggtgtttttccatttcttctacataaccaactacaaatttaggagatggatcatagacgagttcatcatgaaaaccattctctttaatggcatgattgactgctgttacaagctctccactttcgtctacaacaccattgctagatagctcatgaatagaagaaaaatgaaaaatattatagcctattgtctcgtttgtttctttactatagattcgagctacattttcgttacgctcaacagccttatcttctctttctgtactgcctaaagtaacgattaaagtatctccaacgccttctttattataaaacatattcattatactgtactcctttttccaacagtgattattttttgggtttgtttttagccataataaaaattggttctaactttccatcttcatacatgaacggtagaccggttacgggaactagtccacttgaaaaaaagtgcatggttaactgggcaagagcatcgtatccgcgttcattctcgatatcggcaaatactaaaacatcttgatgaggaacggctacagccaattcacccttcgcctttttagccatttgttcgaggaatgaatcatttaagatccgacttgcatcgtagccatcgttcgtattcaagaagtaaaacgtattaccggcgactgtgtcttctttcacttcggtcgataagcctcttaaattgaacaacgatacttcatgcaacgcttcctttgtccaaccttctttctctagccattcttgatcgattagtcgataggagttcccaagatcaagcgcataataaattcgcgtttcagcagtatgctcttcaaacacaaacggaacaccattttctgtctcagatgtaaatgagccggagcgaataaccggaaagatttgattttctttacctgttagttgttgcttttctttcattaccttgagcgtttcatcgacgtgatggaccacttcatcaagaatcttctcgccacgttcctcatacttagcagcgagtcctttcaggccaaggctcataccttttcctgtcgaacggtcttctactcttagtttttcttctttttgattgtatgtaagctcacgttcttcttgctgaagacgtttttcgagcaattttttcatgtcttttggttccatattttcaccaccctatacgaagatgtcaccttatcataccatgaaacgaacgaattaaaaaacaaagctatgcgacgcatagctttgttccatggatcgtccatcaccttacacttgtaagaaattcttctatttcttctttactttttcgcatcttacttacaaagcgtcctgtttcctctccgtctttaaatgcaacaaagcttggaataccaaagatgtccatttcctgacatagctcaatatggtcatcacgatcaacgtaataaaaatccatctcgctatattcttcttctagctctggtagaaatggttcaatcacacgacaatctgggcaccaatctgctgaaaaaagcaataccgatctgccctctttaatcgcttctaaatattcttcatgtttttcaaatttcttcatgatgaacctcctatattaatctgtttgtatcttcatatctccaggacgaatcagtcctttttgcctcattacctcggatattaacagacttattattgctggtccaacaaaatgcaacataacaatcgcaagccaaatttctccacctgtccccatcacgttaagcgtcataatttgtccaacgaaaccacttgtacccattccagcaccagacggattatttaacaaagaaagccagccacttccaattggagcaagaatagcgccagcaaccgttggcggcagcagaatccacggatttcgaactatatttgcaacttgtagcattgaagtaccaattccctgggcaattaaacctcctaccccgttttctcgatagctacttacagcaaatccgaccatctgagcggcacacccaatcgtcgctgcaccggctgcaatgccttctaacccaagcatgatggcaattgcagcactcgaaataggcgtagtaagagcaagtcccataagcactgcaacaataatccccataataatcggtcgttgctcggttgcccacatgatcagagacccgaaatttgtaaggagtgattgaattcccggtccaatgagagtcgccgtcccataacctgcaaaaattgttattaatggagtcacgataatgtctaacttagttgacttcgaaacaagctttcctgcttcagaagccacaagggctgaaacgtaactaccagcagggccaccaagttcggatccagccgctcctgcaagaatagctgaaaacaatacgagtggaggtgctcctagaccataagcaaccgcaacgccaatggctggccccattaagctcattgcaagttctcccattgggattaaaaaggaaagcgcagagacttgctcaccaattgttttaagaattaaacctataattaacgacgaaaagaggccgagcgccatataactaagcgcggttataaaatacacatgcagagaaagcgtaatgcctttcttctgtaaaaaatctttcatctatttctcctttcaaacggattatcctgttttagtatacacatatttcttccactacttgatgaataggttaaaccagttaaacttcttccctaatctctttactgggaataattgaaaagaccatgctacaataatggcgtaaacatttttaaggaggcgttacggatggaattgacggtttatcttgctggacaaattcacgatgattggcgaaatgaactgaaagaaaatgccattaaaatggaattgcctattcaatttgttggaccaatggaaaatcatgatcgttccgacaacattggcgaagaaattaaaggcgaacagttaaataaaattctgaaggatgaagctgcttcagaaattaacaaccttcgaactcacgtcttacttcaaaaatcagacgttgttattgcgctttttggtgagaactataaacagtggaacagtgcgatggatgcagctacggcgatcactcttcagaaaccacttattctgattcgccctgactcccttcatcatccactaaaagaactttcaaacaaagcacaagttactgttgagaacactgatcaagctttaaaagcactatcttatattttcgaaacaaattaacgcatttgaaattggtattgacccaaaagtagagatacaagatggtcatacatgtccgttcttgagacggtgccgttggtgaaaattccaatggcgccttcttttttgcttacgtccgctcgacttgcatactcggaaataactggacctaattcatttccttcctccagcttttttttaatattatcaggaagcggaaaccttgccccccctgcaattatttctgtgccatttttatcaacaagagctccccaattgcaaacgtataatttctcttcaatgatctgaactccaccttcaagaccgatccctatttcaccctgacttgttgccaatgcggctctcgcccgttgttttgctccaagaagcgtttcttcgtctccccatggttgatcggcaacaccagaatcaacgtccacacctatgacttcgcctacaaaatgggcttttactgcatttatcttcaccgggttcgtagatccaaccactaaatgattcactcaacatccctccacctatttgttaaaaaatgctcataagaaaaggagcctcttcggccccttttacttacacgttgcttttaatgctatctaccgttgcctgatctgttgatttcactaattttatgattaattcttttgcagccgcataatcatctatgtggatcattgaagaagaggtatgaatatatcttgagcaaatacctactactgcggaaggaacaccattattggacaaatgaacgcgtcccgcatccgttcctccttgagaaatgaaatactgataaggaatttcattactttcagcagtatccaggataaaatctcttaaaccttggtgggtcaccattgagcgatcatagatccgtagaagtgctcccttaccaagctgaccaaattcattcttatctccagtcatatcattcgcgggacttgcatcaagtgcatagaaaatatccggatttatcatatttgctgcggtttgtgcacctcttaggcccacttcttcttgaaccgtagccccagaatacaactcattcggtacctcttcattttggagttctttcaatagttctatcgctaaacctaccccgtagcgattatcccaagcttttgccatgatttttttctcattagccattggggtgaaagggcaaacgggaacgatttgctggcctggcttaacgccaattcgttcggcatcttccttgttgtcagcaccaatatcgataagcatgtttttaattgccattggtttatttcgagtcgcatcatcaagtaaatgcggtgggattgatccaatcacaccaggaattggtccgttcttggtcatcacctggacacgctgagcaagaagaacttgactccaccaacctccaagggtttggaaacgcaacattccattttcggtgatggatgttaccataaatccaacttcatccatatgaccagcgaccataacacgtggcccatcgtttcgtttaaccccgaaaacacttccaagattatcttgaatgatttcatctgtatacttactaatttcactttttacgaattttctaacatcatgctcaaaacccggtgcaccttgtagttccgttaatgttttaaaaagcgtcaacgtttctttattcatatgtatccccttccatcgttcgtctcttcctattgtatcgaatctggttcctccttgctagtgtcatggatttccgatagaaacatttggtccaagtgagaaattcagatatactaaagatggaaaacaaattgcccacatgaagaagggagaatcgtaagcaatgagaacaaaggatttgttaattggagcattaattggtgcaggagccgcaacaattacagtgtccacaatcgcttcaaaaaaaacgtatatttcacctgagaaagctttaaaagcagttaaaggtgctgtaaaacccgtatatactgttaaagggtcatggattcatatgaaaacggattcagtggagaaattcaaccttccatataccgtttatgcgggaggcttaacctgcgaaaaagaaggtgatcttcagcagcttgactttatggtagatgcagaaacaggtactttagtggaattacaggctcagtaaaaaaatcgctgtttgcaagaatcataatagaaatccccgtgcacgaggcacggggattttgctgtcttatttgggtcaattaaaaagtagtattcgtgtcgtaaacgttattttgcaatttaaaacgaagtgttgaatacttatttttagtccataagtaggcaagaagtgctggaccaacaagcattatcgcacttagaaaaagaatgacgctcatgtgaaggtgttcaccagtaacatctgcgtgactatctttatattctttcgctttttcaatatccaatacttttgaatccgggatgattgcgttggcttctgtatcatagaaaaggacctgtgtatgatcttcaaagaaaatgttgtcacgaactgttgtaaactctacaagcatcattgagactttgctaaattccttatctgctgagctgtccacttcaagattttccgcgtctacaactttaagagaacctttgtcatagtcatagtgctcttccccaagataactagctacgcccttcttcacttcatcactaacatccgcttcagcatgtgctgctgtccccgcgaaaggaaatgcgattaaaaatacagcaagaagtgcaaaaattccttttttcatcattttttcctcctctatcaaacaaattatccaattcttatcatatcatattccaactattattctactaacattttgtagaaaagaacatccaataggaggaaatgacggacagatcatccatcctaggttagattacgtttacccttcccgattcatttcataacaaaaaaaagaaccggtatgcaccggtccttactgaattactggttttttatcgaattgagtactaatttcttttgagcgtgtagctgcattttcaaccgctgctacaaaagcttctccgccaccattatcatacaacgcttcaagaccagcttgagttgtaccgtttggtgaagttactttttttcttagtgcagaaggcgaatcttcagattgctctgccatcattccggcacctagtaccgtttgaacagccatttttcgagcggtttctgtttcaattccaccttcaattgcagctttctcaaggctttctatcacataataaatataagccggtccgcttcctgcaacgcctgtaaatacatccatttgctcttcttcgataacaactgtctccccaatagaacgtataagggcgcgagcaattgtaacctgctcatcacttacatgtttgcctgccgctaaagcagaaatagatttcccaatcatacttgatgtgtttggcataacgcggatgactggttgctctccatccagttgctcctcgatataggaggatggtacgccagctagaacagataggagaagttgatcattcgtgataaagttctcaatcccttctagtgcacgttcaacatctttaggtttcattgccaggattacaacatcagcctcacgaacggcgaattctatgctttgcgtcgccaatacgccgtggttttccattagctcctgacgacgttgttcattacttctgtttgtcataataatacgttcaggttcaatagtacctgactcaatcattcctgcagccattgcctctgccattgaacccgctccgataaacgttacggttttattttctagcatgattgcctcctttggatttccgaaaaatcatctacggtcatttatactaacactgcatccttagaccttcaaccttttagacacaagaaatgagcataagcgcaagatacctagtgaaaacgttatcattcgaatctcaatgtaaactgtatgaatgaaatggacatatatcggttctcacgctctctcatcccctctcatcgaaactatacttttaacaaaaagtgggaaattcagccactacatcaaattcacagctttgtaccgttctttaataatcaagaaaaaagagactcccattcggagcctctttcacttattatgcttgtacttgtggctttgatttttttagtataccaaccatcaaagctgtgataattgtaccaatgacgatagcaaggatatagagaagaatgtgtgttaacgagatattgtttacagaccagagaacaaatgctccgccgtgcggtgctggtaaagctatattaaacaacattgttaatgcgcctgctacagatgatccaacaataatggaaggaatcactcgtcccggatctgctgctgcaaatggaattgcgccttccgtgatgaaagaagcccccatcacataagctactttgcctgcttcacgctcagttttgttgaagcgatttttaaatagcgttgttgcaagagcaagcccaagtggtggcgtcataccgcccgccatgattgctgcatgatacgttagattacctgcatcaatcatcgcaataccgaatgtaaaggctgccttattaattggaccacccatatcaaccgccatcataccaccaagaattaagcctagtagaagtttgtttgtcgtacccattccgctcaaccaattttctagcccagtgtttaaagcccctacaggttcaatcacgacatacatcataatgattcctgtgataaagataccaaacaaaggatatagaagaaccggctttaacccctctagggactgtgggagtccagagaaaagctttttcaaaagaagaacagcgtaaccagcaaggaaacctgcaataagtccacctagaaaacctgcaccgttcgtagaagccattaagccaccaacaagacctggagcaagaccaggacgatcggcaatactcattgcgataaaccctgcaaggactggaatcataagagcaaaggcatttccaccgccaattgtgctaagtgctgctgcaaatgcattgtaacttggatcatctggatcggcagcattaatgccaaagataaatgaaagggctatcagaataccgccaccaactacgagcggaagcatattcgaaacaccgttcatcaagtgcttgtagaaagctgattgctttccttttctttcgtttttcttctcactgatttgatcttcgtatgatccagatgctttatagactggcgcatcgccatttgctgcctgctttaataagtctgcaggcttccgaattgcctccgcaacaggaacttcaattactttcttccctttgaaccgatccatttctacttttgtatctgctgcaacaataatacctggtgccttttcaatctcttcatcagttagacgatttttcacgccccctgatccatttgtttcaaccttgacactatagcccatttcagatgctttcgctttcagtgcatccgcagccatataagtgtgtgcaattccagtagggcatgctgtaacagctaatatttttccagtaacttcagttgtttcttctacttcatcttcatcagcattttcttcttctttctgatcaaatgcttgcaaaacctcttcttccgttcttgcttcaagaagtcctttacggaattcgttatccattaaaaatgaagatagtcttgatagtgcttctaaatgcgtttgattcgctccttcagtagcagcaatcataaagaacaagtgcgccggctgaccgtcaagagactgataatcgatacccgcattagaacgtccaaacacaattgcaggcgactttacggcagctgttttggcatgaggaatggctattccttctccaatcccagtcgtactctctttctcacgcgcatgaatcgcttttttaaacgcgttaaggtcctgcaatttgcctgctttctctagtttttcagacagctcattaataacacgatctttcgaatccgcttcaaggttcagaatcattgtctcttttgttaataattctgtgattctcatattccccgacctcccatatcatcataaggcttaaccgtaatttgttttcttaactcttgaacttcttctgctgtacagaaaccagttgaaaatgcgctcgcgcttcctgctgcgatccccgattggaatgcttctttcaagttttcagtttcgatgtatttactaagaaaaccagctactactgaatcccctgctccaactgaattctgtactttaccgattgggacattaccaaacagaacatcttcagctgtaatcaatacagctccatcccctgccaatgaaacaatcacgttctttgcgcccatttcttgaactttcttaccgtatttgaccgcctccgctactgaagtaatgtcaacatcaaataaatcgcctagttcatggtggttcggttttactaaaaacggttttgctcttactacttcctttaacgcttttcctttagtatcaacaatcgcctgtacgccatctgggagtgcctggaggattcgagaatagatcgcttgatcaacactcgaaggaacgctccctgccataacaacaacttcccctgcaacagtttgtgaaagttgagtaaataattgctcaatatcactttctgttattactggagataaaccattaatttctgtttcttctccattttttaacttaatgttaattcgcgtatcaccatttacatgaataaagttagaatgaagagcttcctctttcagcgattgttcaatgaactgacccgtaaatccgccaacaaaccctaatgctgtggattcatgtccaaggcgttttagaactttcgtcacattaacaccttttccccctgcgattttcatctcttcgtctaccgtattaacgagtccagttttaaggttctccagtcgtacaatatagtcgactgatggatttaacgtaattgtatagatcatatcttcaccacttctactgttgtatgtttgctcacctgatcataatttgtttcaggatgctcatttgtaataatcgtacacgcttcaatatctgcgactttactaaaaactgcttcaccaattttcgaataatcagctagaatataggcatcgcgtgaaagtttaatcgctgctcgtttaatgatggcttcatccggatctgccgttgtatagcctaacgattcatgaataccattgatcccgataaaacacttatcgaaacgatatgtttcaatgctttcaagtgccttagctcctatcatcgcacctgttcttgatttaaactttccaccaataacataagttgttataccttctgctagaaggctttcaatgacctggtagccatttgtcacaacaatgacttgtttatgttgtaagaacggagccatcttctgagtggttgtccctgcatcaagaaaaatgcagtcaccgtctttaaccaattcagctgcataagatgcaattctctctttttctgacatgttctgcgtggatttttcaccaagtgatggttcagttccctttgaacgaaaaagtgatgctcccccatgaattcgttttaactgattttcttcttcgagttgcacaagatcacgacgaatggtggaaacagatgccccggttgcttcacttaactcatgaacagttgctgtttccttttctttaagaacttgtaaaatgatgaaatgacgttcagcatttaacaaatcatcacctactttctactcacagtataatgaaagcactttcataagtcaatcattttcgttcaattttattcaaaaacattcaaaagtgttcaaatgcaaccaaataacttagcgcttcaacagctcatttatagtttttccattcatctagactcaaaaaagaagactgcccgttcggcagtcttccttaaaatcagctattccgttttacttcatgcgttatttcaaaagaatcgttccatttaagagcacggtaatgagcatcgtgataaaaaataaaccaggcgtcttgagataaagcatcagaaatccacttttctttcgcataaatggaggtcattggataatcatcatatgcaagaacccaaagagggtttttatgagcgtgagttggcatgaggtctgccatgtggatgagatactcgtccccttctttcagcgtgataatcgcatgaccatcactatgcccaccagtatgatgcaaatttaaaccaggaagcacttcataggtttctttaaatgtttggacctgatgttgaatcacttcccagttctctttccaatatgtattttttgaacgaatgttaggttctctcatttcgttccattctacttctgaggcataaataacggcatttggaaaagtggacttatagccatttccatcccgttcagttaagccacttgcatgatcaaaatgcagatgagtcataaggattatgtcaatatcctccactgataacgatagctcttcaagagaatcatggatctcagactcttcctcaacaccatagttccttctttgcttctcggtcaacttgcctttcccaatccctgattcaattaaaatcttcttcccttgccattgaagcaacagcggatccgttcgaagctcgatttggtttatctcatttacagggtatttcttgctccagagcggttttggtacaactccaaacatcgcgccaccatccatatgagtaaccccacctctaagccacgtaattgatagtgtacctacttgtaactgttccattacaaaacccccttctacgattatgtctatcttctcactaaaagaaatcgctttcaatgacaatcaaaaaaagagtcgcgctaagcgactcaaattctgaattttgcttcacaccgataaatccggcttccttttgatgaaaacttttcttcatactccgtcataacattatcttccataccactttgatgcaaatcaaggcttacatgatttaacgtcatgccgtatgcagagaaactgtgaagggaatattcaaataagccctgattatctgtcttaaaatgaacttcgcctttctggctcatcacaacacgatacaaatccagaaacgttttataggtaagtcttcttttttcatggcgattttttggccaaggatctgaaaaattcaaataaatgcggctaacttcattttcttcaaaaagcgattgaagatcctgtgcgttttcattcagcaagcggacattcggtacatcttctacgattaacttttctaaagctgacaccataacacttgacgataattctaacccaatgtaattcacatcagggttctgtttcgccatgccaataataaattgccctttccccgttccaacttctagatgaatggggttattattttgaaagacgtctttccagctcccttttctttcggaaggggtggtaggtacgaattgtgggtgatctgcaaacatttcttctgcccagggtttattgcgttgacgcatatgttcacttccttatagtctaattaccgttttcacacaatcgacattttaccatgaaatcataagaatagaaaggtggaggaaagggtatgaaatagtagtcaaattgtaaaaaataacgtggtgaaacttccatcatatcagttatgatatgaagagagaggagggtgaagaattggaacactttcttatcatgtgggcaccatggattgtaatcattgtttccattgttgcgcttttcggctggggtgcaaaaggtgatacaaaataatgaagcatatgtaaaacacggagaaatccgtgttttttcgtatagcgataagcataattcctccttacatgcacacgctacttagtagtacaaataaggaggaaaattcatgccactctcacatcgagatcagctttttattctggctgacattcttaagaaccatcatatcgattgcacaggaacatcttcagaatgtgagcaagttcagcgtttggcaacagctttacagcaaaacgaaggtgttgcgccagagattaagcaggtacttggtcaaattcaacaatatagcgctactggagcaacagaatccaatttattaaaccatatagaaacccaccagcctcatcttagccagtgggttgatactattgatcggtatcaataagtcgatagtggtttaaattttccagatcttttttccagaattcaacttctccgtttaatcctttgagatcgtaccaatagatggacaagagcgtctgcgctaccacataccagtacatgcggtggcgcaggctttctgtattttccaatccataatgagtgagccattcttcccactcctcttttggaaggtaccagtatagcagcattccgatatctaacgcaggatctgccacaactgctccgtcccaatcaatcaaatatagattcccttcctcactaaacatccaattattatgattgacatcacaatgacatacaaccttttccacgttctcaagatcatttttattagcagccaggtaagaaagggctcgaatcacttcaacgtctctgcgatgatgattctcaaacttttgtaataaatcttgataaatgacgtctggtgaaagaggttttttcccgagacgattaagcatccttcgaagttctgaagaacgatgaattttataaagcatttgtgccactcgcggctgcttcatttcatgggacttcagttccctccccggcaaccacttttgggctgtaataacgtctccattctcaagtcgcttggtccagagaagtttcggtacaattccttccgccgacaaaacagccagaaaaggcgaggagttccgttttaggaataatttctcgtctccatattgagctaagtatgcttcgcctgtcgctccgccagcgggcgtaacctgccagccttcgcctaaaatgttatccaacaatttcaccttcgatttccgttagtttgtagattctggaagttttgcgtttttagcggttttttctccggacctagctaaaaaccgtctacgaataaaaaattataacacacgttgacgaaatcttcatgtgttaatcatttgttattaaaataattgtgttaaatggcgctactgagagcaatttatctgttgtttttctaatcggttcaacgcttgctacttctccatcggcaagaatccatttctcaccatcaccgatatcgataatatcgtcatggaagccgccgttatgaatgacgacaatggattcagacgagtgctgttgatgaatgcgataagcaagaattggacctggagaatcgataaaggaaatgcgattcatctcatgtcgttcagccattcgaaacgcctcaaaatgttttctaattgaaattaaccctcgaatatacttgacgtttgcttgaacagctctcattctttgccaatcaaagcgattaattttatcaggagatttatagctatcttctactccattttttgtgcggaaaaattcctgtcccgcatgaatgaatgggatcccctgcgaaagaatggtgatcgccgtcgcgagacgatgcatacgctgtttgacatcctcgcttactcctggatggctccgattcaggcgatcccaaagtgtatggttatcatgacattctacataattaatggactgagatgctgtaatgaatttatcctcaacactccccattatacacttctttacctcttctttaactgaaaagtttccatttgcaaagccagtggagcgtgtatcaaataacttccctttaacagaatcacggaaatggtcgttaaaatagccgattctaggggtttctcgagcattgccactcattgcttttcgatggtcaggtagaatggtgttcatatgccagccttcaccaaacacaagaatcgttggatctatgcaatcaagagcatagcgtacttcgttcatggtttctttatcatgaattcccattaagtcgaagcgaaagccatcaatgccatattcttttgcccagtaaacaaccgaatcgacaattaatttcctcatcattcttctttcagaagctgtatcgtttcctacacccgttccattcgaaggttttccaccatgatcaaaccgaaaatagtaaccaggtacaaccttttctaatggagaagcatgaagttgatagacgtgattaaacacgacgtccataatgacccttaaacctttttcatgaagcttctgaatcatttccttcacttctcgaatacgcgtatacggttcatgagagtttagtgaatagctaccttctggaacaaaataatgaattggatcatatccccaattataggatggagggactttcatttcatcgacactgccgaaatcctgaataggaagaagttcaacgtgtgtaaccccgagccatttaatatagttaatccctgctggaatgccatctttatcaggcggttcttctgtaaaagccttatacttccctctatttttcaatccactttttgcttgaacactaaagtctctaacgtgtaattcgtatatgatcgcgtcagaaggcttcgcaaaagaaggtttactgaaaggattccacccctccggattcgtatgggaaggattgatcaccattccaaatttgcagtttgaagtagctgctcttgcataaggatcaatggtttctcgacattcaccattaacattcacgctgtaagtatagagcgccccttctgaaacatcagctgatgatccttcaaacacaccgcgctcttgcttcaacattggcaattcttttattttttggaacgtgtcattatagatgttaacaataacatctgttgctgttggtgcccaaactcggaataccgtcccattttcagttaatagggctcctaattcaccatcataataatagcggtcatcaaacatatctgttcttacaacttttcctgtaaaaacaagactggtctcaccacttgagtgaatgaggtagtaattattcccgggcatgtactcacgatcgacctgtaatgaaattaatctcttcttacccatttttgagttttcttttacttcaatcggaatgtctaaatggccatcagtaagggtgtaggcatccttaacatctaacgagatattagccattaccgtaatggtatgaaagtcatcccaatatgctgtaaaagcctggctcacttttttgtatgcagaataatctcgtatcatatgaatcccatcctttgcggagatgcttacaacctttttccattacctatcttattttcaaaaattcattttgacatttgtttcataaaaaaattcaagaaatccattttaataagagcggtccaaggatcgaaacgcacagggcgcataaacttaaacctattgaacttattgcagcttctcgctcgccatattcgagtgcctttgctgtacctatcgcatgcgatgcaccaccgaaagccataccgattccaagaaagttcgatatgcccagaagctggaataaccaaggaccagttactgctccacctattcctgcaatcattacgaatataacggcaaatgctggttctccaccagtcatgctagctacttccatcgctactggagtcgttacgtttttagaaataattgtcgacacaatcatttcgttgtatccactcacgaccgctaaccaatatcccgacaatatccctagaagacttgctgttaaaaccgttgcaaaaatttcaactttaaacttatttaataatttcctctgcttatatagtggaaaagcaagtgcgacgatagcaggacctagcaacgcgtcaatccattgacctccactaaaataggtgtcatacgaaacatcaaatgacgttaaaaccactacaagaaccaccgtacacgttaatacaggaatcataaaagggtacggtaataactgatagagtcggcggaacacaacgtataacaataatgtgataaatagccaaaaaaacatttgcagtagcatcatctatcccactcctttcgattagcaagaaactggccaagtagccccgtcgcccccattacgatccacgtactgacgaggacgattggaactaaccagagactcttcccgctaaagaagtcgagatgttgcatgataccgactgtgactggtacgaataataacggtaaatgatttaataatgctgatgccccctgagaaatccatcgaatcggaatccattttagataaagcccgattagaagaattagcatccctacgacactccctggaacaggaagtgttaatgttgtttgaagatagccccccacaagataaaacccaaacaaaagaccaatttgtaataacatgataaggtatttattaatgcgtaaactcataagccgcaacacctttataccttggggtttcatcgggtgctactcgatataacttcacactcgatacttcctgactttcacgtttaagtgttggccagttaggttttatttctttagtagggtcataccatttctttgcaagtgtcacgtgtggggagtattccctttctttaagtgaaaatcctgcaaattgacacatttggattacttcttgatggagcttttccaattggttcgttcttatcacatctgcataaagcacacgtggtcgactttcggaaccaaaataatgtaaaccttccacttctaatttaaaaggttgcatgacctttgctaccctttgtaaaccttcatgtaaatctgacagctgcctttcatccgctccgcctaaaaaagccaccgtaatatgaaaatcttcaggataaacgatatgcttaaaaaatcctaaatgagtcttcatttgaatctcttgaagtgtctttctaagatgtggttggatggggagggcaataaagtaatgagtattcaacatgtccactccttctatcctttttctattctatcaaacaatctgaataatcttttatttttttactcataagcttgattttattacgaaagatttatcttttgttataatggggaacagtattagaaaatatcgtttaatgggagtgatcatctcctcactttctatactgaccaataaattagaaaatgacccttaacttgtatgaaaaggatgtgcttacatgatctatgaaaatatggccgatcttattggagatacgccactactcaaattaaatcgagtcccgaatccaaatggcgcaaaaatatatgcaaagctagaatactttaacccaagtcggagcgtaaaggatcgcgcagcgtataatatgattgttaaagcagaagaagatggcttacttaaagcaggctccacaattattgagccaacttcgggcaataccggcattggacttgccatgaacgccgctgcaaaagggtatcctgctattattgtcatgcctgataacgcaacacaagaacgcattaaacttcttaaagcatacggtgcgaaagttgttctcacgccatcttctgagaaaatgcctggtgcaattaacaaagcaaaagaaattgccgaaaccattaaagatagctttattccaatgcaattcgaaaatgctgcaaatccagatgcccatcgcacttcaacagcgcttgaaattgtagaagcaatgaagcaactcggcgtcactcctgctgcctttatttcaacagccggaacgggcggaactgtaaccgggacaggtgaagttttaaaagaacatttccccgatcttactgtgcacgtggttgaacctgagggatctcccgttttatctggcggtaaacctggaaaacacaagctcgtagggacaagcccaggattcatacctgatatcctgaacacctcagtctatgatgaaattatcaaaattactgatgagcaagcttatgaagtgacgcgtaaattagctagggaagaaggattacttgtgggtccatcttcaggggctgccgtctttgcggccatgcaagttgctgagcgtttatcacccaaccaagttgttgttacaatgacatgtgattctggcgaacgttatttatcaagtgatttattcagttctctatagaatttccaaaagacagcacatttgaattgtaactagtcagcgccatgccgctaccggcatggcgctcattctattattttgcgagttcataaatcgcttcagcatatatcgctgccgcttttaataaatcctcgatgtccacatattcatctttttgatgtgctaattgaggctttccttcaaaaagggctccaaatgccactcctgcttttagtgagcgggcatacgttcctccacctattgatagaagctttgcttctttgcctgtttgcttttcataaacgtgttgaagcttctgaataagctcatgatcctgtggcacatgatgcggtgtcatatgatcaatcactttcatctccactgacattggagcggttaccttttcaaacgtttgtttcacattatcaaactgacacgttactgggtatcgaagattaatgccaattcgtccctgttggctcgcttgatagtcgaaagtacctgcattcatcgtcagtgatcctgtaatgctatctttgaaagagacgccaaggcgctccccagtaaaatcatcctgtaaccatttggtgataaagttaatgtaggcagatccgttttgatcaagagacagtccttccaaaaattccgctaaacgaaacgccgcatttacaccttcatgaggggcagagccatgaacggatacaccttgtatttccagcgttaattgcttatccagcgtcgctttccctttaaggtttttatcatttaaaaatagctcgaattcctttttgacgtcaagtaattggtcttcactactctgacattttgctattgcatgatctggaaccatattcaaacgctgtccagaatgaaaagaataaagaaggaaagcttcctttttttcttcattcacaggaaaaatccattcaaagtctgcaatccctttttcagcgtgaataatcgggaaaaccgcatcaggtgcaaagcccattgttggcatttcttcatggttaaaataggtatcgacacatcgccatgagctttcttcatctgtaccaacaatcattcgaactctttttgaaagcgctggataaagttccttgacgatattcattgcccagtaagccgcaatcgtcggccccttgtcatcaatcgctcctcttgcatacatctttccttctcgaacatccggagtaaagggaggggttgtccaatcattccccgctggaacaacatcaacgtggcacaaaataccgattatatcttcaccctggccaaactctaaatgtcctgcaacctgttccacattttttgtttgatagccatcacgcttccctatattaagcatataatcaagcgcctttttcacttcagaaccgaagggagcatcctctgtacgattctcttcatctaaaatactctctattctcaatagaccttctaagtcattaattaacgcttcttttcgactaagcacttcttccttccaattcacatcattcaattttacttcaccccttttattctttcataaacttcgtgatcacaaatgacaaagagttttgcattctccggaatcgattcatccagtcgtcgattaatatccatccgatctccatcggctatgagcgtagctccttgttgcagtaggctctgaaaagcatcccgatatgtatcccactcttgctgcacaccgatttcatataaattatctccatggcccctacttaacagctgcgagtacacacctgatattccctttgtaaaagcggaccgtacagccattcgggatacagcttcatgtgaaagaacgaactcatcaacctgaacatgtgtaaaattctttatatgctcctccttcattacttctaccgttgtatgaatatcggttgaaagtcgttcaattgaactagcaatgatgagtgactttccatctgcgagaagagcatcatgtatcgtatcatcggaaaagataagaaccgctttcgcattcataatatcagctttgttaagtgttgcttcttctgcagcatcaccttgtatatagtgaatattctcttcgattaatggagctttttctaatttgtcaataatgacaatctcgcactgatcagaatccataatttccgagaccgcgtaagcagctttttgcgaccacccaataatgacgatatgattgtaaccttgatagggcattttgccttcctcctttcgctttttaatctctgaaaacccatcaacaaactttccaataacaacaccaattaagccaataccgacaatataaagaaacatcgcatacattcttccggcaatcgtgatcgggaagtaatctccataccctactgtcgttaccgttgtcatcacccaccagagagaatcaaatagagatggaaacgtctctggttcaatgagccgcatgattactgtactagcgactactagaatgaaagccacagctagcataaatcgattgtttaatttaatggcattttttagaaagatccgaaaaagcacgtaaatctccctcctctcatcgtaatcgtactttaagaatagcaaaggaatgttcgttaaggaagattaagccaaacgaaatgaaattttttgccgaaataacagaattattgtaaaataaactttaaagagggggtgtaagttggcccaaaagagggaaatggcagtaggagtggaattaaattataatgccaatcaatcgcttatcttatgaaagtggtacgacctattcgtcaatacaccaagttggggaacccaacacatccagaaatcacttccagtcttaatcggagcaaatagccaaactttcatgaaaaatcgaaggaagatgtagaaattaagtatatcttaacgtttccttcatatggttttaatagttacgttttatgctagggataaggcattgattacatgttagggagtggttctttgagtattacttcaactgatcgtatgatgacccgtatcaagtccatctatttatttattagcaagcatggtactgtcagcacaaatgagttagttgaagagtttgggattacccagcgaacagttcaaagagatttaaatgtactggcctacaatgaattagtcaaaagcccaaaccgaggattctggacaacaacaagcaagagagttaaagttggataatgtaaataatatgctacaccgggcttctcgtcgatacactgtgacgaaagcctttatttagtttaaaaaagccccgctttgataaagcagggcttttctaatgttacgctttttttattctatgttgatcgtctgtaggtacaataattttatcgtgctgatacttcactgtttcatccacttttaagaatggatgatcactggaaagaaaattggataaaaagccttctgaaagctcaaatcccttgatcctaccacttttgtcaattacaatttctttcaccttgccaagttcttctccgctttctgttaaaacttgagctttatttaacgatttataagaacattgatcagctaaaacagtcgcttgaatttcatcctgactttcacgaagcgaatagacatcattttgccaggataattgactaaatgaaacaatcattgtttcatttgcatctcgttctttacgatcatcgtctgtgactggataattatcaggtgtaaattgtcctcctgaagcttgaatagagtgaagcatttcatctgcgtgatgatcaggaatggcatctttctcgttggatatctcttttttctcaacctcaacatatgttgcttgccgaagcgtctgatcaaagtaaacttgtttcacaatcaattcagcagatgattcatttttaaacttatgaccttgaatttcttttccaaccttaatcattaaaaaatcctctccttcacaactaactacttatgctattccccaagtcagtcgtaaggaaacaacccattacttctgtagaatggttacctcttcctcagttaactctctgtattccccaggttccaagtcacgatcaagatgaatatctcccatctgaatgcgcttcaaataaacgactttcttgcctaccgcttcaaacatacgctttacttgatgaaatttcccttcatgaattgtaagctcaatttcggattcttcagcagcacttaaaatcgttaactctccaggctttgtttcatatccatcatcaagagtgacgcctttttcaaaagcacgaacatcttcttctgatacaacaccgctaattttggcataataagttttcggaacatggtgttttggtgacgttaaatgatgagctagtttaccatcattcgtgatgattaataatccttcggtatctttatctaatcgccctactggaaatggttcgaaaacttgatcctcaggaatgagtatgtcaatgacagtttcttcttcatcttccgttgctgaaatgaccccagccggtttgttcatcataaggtaaatgaattcccgatattctacggtttcttcataaactgttacgtgattttcttcaggatcgatatgttgcttcgcatccttaatcacctcttcatcaacacgaaccacgcctgttttcaaaagtttttttacttctttcctcgtgccgtagcccatattcgctaataatttatctaaacgcatttcaacctctccttttccatattttttccactatttatttgtttttttagcatactttttggttagtaagggtatgtaaacgataaatgccaaaatgcacgtttggagtgaatcgtatgactgtgaaagttggacttttagcaacagcacgcaaaaaaagtaataaatctgcacctgtgacggaattttaccaaagtcctttatttcaaaaaacgttagaatacgcatctcagcattatgaccgcatgtatttctataatgccaaagatggacttttattaccagaagacatcatggacccctatgacgtctcaattaaaacattctcccatcatcaacgagaagaatgggctcaaaaagttattgagcaattctctcaacatgagacttctacggatattctcgtgtgtttacacggtggctccgtttatcgaaaacaccttgagcctcagcttaaccgattcaactatgtgtatgaagtgccattaaaaggacttgggatcggagagcaactcagttggtatcagaaaaactcagtataacacgggacacatgcccagtaacactgcccagcctttacatacactatcaagtacctataaaaggaggcgttgtgtatgtatgattatgatcggcagcaagggcagcagtttcaaatgtaccctggctttccaggttatccaggacagccaggatatcccggccaaccaggatatcctggaaatatcgaacaacagctcagacagattgagcgccagctacgacgacaggatcggagaattacaagaattgagagacagatcgggatacgtgatgaggactacggctattagccttatcgattattccactcataaaaaatgaaggcctcaaggggccttcattttttaacgtctttttagaaatgagaatcgttcacctaaaattaatcccgctagattggaacgatacgatagccatagaaatacaattcctcccaccgtaacgccaattagtaaattgatgatcgaatacaacatgcttccgccttcacttgtcgaaaggtataaatcaggcataaccgattccaatggaagaatggctaatttggaagcagctgccatgattacgacgaaaattccaataaggagtaaccttcttgagaggaatccaaactcgtaatctgtatatttcttaattacagcgattgtaataataaccgacgttagtaaaccaatatttgtcgcaagaatagatcctttcccctcaaacattgtgacaaagggataagttagtccagctttaaggacaagaccagcgagtaaactatagacggcaaacttctgtttattaattccctgtaaaatcgcagctgttacagaaaagagggcaaataatatagccgtaggcgcataccacattaataaccagctaccaagatcttgatttaccgtcggataaagaactctaaaaatcggttcagataaaacggctaaccctattgcagccggagtcgtcaagaataataaaatttggaacgtttgcgttagctgattttgcaatgatccttcacgattagctgtaaatgatttcgtaatagctggtataatcgtcattgaaagagcagtagcaagtgatactgggatcataattaacttatgagcaaggcccgtgataatcgcaaacacttcttcatatgcaggtttatcgtaaccaatactcttcaatgctggattaatgagtaacgtatcaatttgcaaatataaaggaatcgccaaaccgactacaacaaacggaagagcatacgtaatgatttctttatacatatcttttaaggatacttcatgatctaccgtactttcagcaaggtgtcgatctagcgttggctttcgctttctgtaataccagaaaacaacaagcaatccgccaaccgccccaacaaatgcaccaaaagtggcgtaggtagcggccgtcgcttcatccccatccataaatttaatgataataacactggaaacaaggataaatacaatacggaaaatttgttcaacgacttgtgaaacagctgttggtcccatcgattgtagcccctggaaaaacccgcgcgttaagctcatgattggcacaattaatagcgccatactcacgaccctaataaccaatgtaacatcggcaattgtattcccttctttcccctcatcaattacaatacgcgcaattggttcggctaaaaggaaaagggctaaaaatgctacaaatccagtaagcgccattaaaagaagtcccgacttaaaaagtcttcttcccgttcggtaatctccaagcgtgtgatatttcgaaacaaacttcgagacagcaagcggaatccccaccgtggacaggctaagcattatcgtatatggagtataagcatattgataaagggctacaccctgcgtaccaacaagagctgtaaaaggaaacatataaatcataccaattattctagaaaaaagggtagctgctgataacagcatcgtccctctaatcacatttgaatcagacatttctccatctcctacttctaaccattcaactagatccattcgtcatctatcaacaattttcaacagttctataaatacacttctccattttaagctatttagctagtaacaacaaatataaatttttgtgaaactttattaaggtgagtgaattatggtatgtttgagtgtagcaaaatgagagaggtgtaagtatgaactatgatgtcattgtgattggcggaggtccgtccggactcatggcgtctgtatcagcggctgaacatggagcaaaagtgcttctcgttgataaagggaataagcttggacgaaagctagcgatttctggaggcggtcgttgtaacgtaacaaaccgacttccacttgatgaactaatcaaattcattccaggaaacggaaaattcttatacagcgcatttaacatttttgataatgaagacattatcacattctttgaagaccttggtattaagttaaaagaagaagatcatggcagaatgttccccgtcactgatgatgcaaagtctgttgtgaatgcactactagataaagtacgacacttaaatgtgacaatacaagtcaataccccagttgagaaagttctttatgaagatggggccgtttcaggtgtaagacttaaaactaaagaagacattcactcatccaacgtggttattgcagttggagggaaatctgtccctcatacgggttcaaccggcgatggttatgcatgggcggaagaaggtggtcatacgattacagatctataccccactgaagtcccccttacttctaatgaagcttttattacaaataaggaactgcagggcttatcgcttagagatgttgcgctttctgttcttaacccaaagggcaaggtgattaaaacacatcgatgggacatgatttttacacatattggactttctggccctgccgttcttcgttgcagtcaatacgttgtgaaagcaatgaaaaaattcaatgcgcagtacattcccctgcaaattgatgccgtacccgatcaaaacgaagaagaattgtttcgtgagcatatgaagctcgcaaaagaagagcctaaaaaagcgattaaaaacatctggaaaagcaaagtaccagagcgatacatgctcttcttatttactaaagcagacatttcacctgacacgacgtatgctcacttatcgaaggagaaagtgcgtgaatacgtacgtttattaaagcaattccaagtggcgatcgatggtacgcttccaattgataaagctttcgtaacgggtgggggagtatctctcaaagaaatacatccgaaagaaatggcttcaaaattcaccacaggtctttacttctgtggagaagtgctcgatatccacggttataccggcggctacaacatcacttccgcctttgtaacagggtatacagcaggaaaaagcgctgctgaaagaaataaaacttctgctatttaagttgatcataattcgaatcaccaaccaaaagagagggatcgtcctatggacgatccctctctttcttttatcgtttgtttcggtttcttccgctatttcgatttcgattgttcgaagaaacagtcttacgagaagaatgactggatctacttctttgatcatttcttctttcttcattacgctcttcaccgtctggcagtgcaccttcaacggtttttctagcaagtttcttaccgatacctttttcaatcatttgaataaatgattgatccttggcagctatgaacgtatacgatgcaccatctccaccagcacgccccgttcgaccaatccggtggatataactttctgtatcttgaggaatgtcgtagttaaaaacgtgcgttacaccttcaatatcaagccctcgcgctgccacatctgtggcaacaagaagctgaattttcgcatcacggaatcgtttgattacactttctcgtttcgactgagataaatcaccatgaagctcatcggataaatatccttttgctttcaaatcaccatttaatttactaacccttcgcttcgtacgacagaaaataattccgaggaacggacgaacttcgtcaattgtttcagtaagggagccaaattttcgtcggtctgttgtttcaatcacaaattgttcaatttcctcaaccgttttccctttctctttccctctaattttctcaggggagcgcataaaccgcttggcaagttgtttaatatcactcgacatcgtagctgagaacaaggcggttagacggctttcaggcgtttcatttataatatcttctacttctctaagaaaacctatatgaagcatttgatcggcttcatctaacacaagataagaagtatgagataaatcaatagtttctcttcgaacatgatctaacaggcgtccaggcgttgcgacaacaatgtgtacttgcttattaagatgcttgatctgtctttctacatcctgaccaccataaacagctagaacattgacgtcatctcgctcttcaactaacttcatcaattctgaagtaatctggatggcaagctcacgagttggagtcacaatgagagcctgtacttctggtgcttctgtgtctattttctcaagaattggcagcaagaaagcgaatgtttttcccgtacccgtctgcgcctgggcaatgacgtcttttccctgtaacattacgggaatcgtttctctttgaatgtctgttggggtatcgatgccctgagcttcaagttgcttaatgagacgagagtccagtcccaatgtagtaaattcgttcaaattagtcacctcatgtttagtatatcaataatttgtatcttctttcagacctgcttttattctctcgctccgaacataacgaagtcaaaagaaattccattatgaaatgaaaccttaaaaaaaagctatctcattaacgactgctaaagtgcggtcgagtgagacagctttaactaatttatgcttgataactccccattacttttgaaacataattttgtgtttcttggaacggaggtattccaccgtaccgatcaacatttcccggtccggcattataagcggctaatgcaagctcagtgtttccattgtatttattaatcatttgtttaatgtactttacgccgccttcaatgttttgtccagggtcaaaaggatcttttactcctaatgaagcggcagtggcaggcattaattgcattaaccccatagccccagctccactcacgctatctgacttatagcctgattcttgtttaataatggaatgaatcagcttaggatcgacgtcatatttcaccgataattcttcaatatagccatcgatttcaagcgatgaagacgaataagaagggttagacgagattggaatttgggatggcgcagataattccaccgggattgaagtaagtgttgattccggaatggtttgcacaggattctgattagagagagcttgttcaagcatatcagtaaaggaaaaagtggtcgtctgcttcgctgtgtttcctatctgcaattgttgaagtgcctgtaagtccatcatagcacgtattaaatctgccttcatttcaacaccccggtctagtcttttccatcattataccagattgaaggcagtaatagatttctttaagcaatctatttggaacatggggaaaaaagtgctatgatttattaaacacatcaacttacttggattaacacttcaggaaaacgtcttttagagaccaactccaaaagacgttttcattacgaaacggtcatgtaataaataggttgcttgcgctgtttcatcaggatcttcactgcgagccttgctgcttttcgatcctcggcaagaacgataatctctttatcacacacttcattttctttcgtctgtcttcctaaataagaaagcggaatattctttgctttttcataaggcgtacggtgcgaaagaatataatctctcacatcaatgagacagtatttatcatcatcaaaccgttctatatgaatcggcttcatataagaataaggataaaccactctccataatcctaaagtcaaggcagccattactgcaccagccattccccatatcgccattcaaactctctcctttttagcagggttattttagtttaccctcccatttcatcataccgccaaccatatttcttacttcataaccagcttcttgcatatattcgcaagcacgctcactacgccgtccagagcgacaaatcataatatgctcttcttctttgtttatttcatcaagtcgttcaggaagagtaccaagacgaatgtgcttcgcttcagggatcataccttcctctacttcctcgtcctcacgtacatcaattaacgaaacgttttttccatcattgattagcttttcaacctcttcaggtgttactgtcttaatttcattactcataaaaaacatacccctttcgtacagttctcatatgatttttcaattatattcactttaacaaattcaatcgtacatgatttgtttgttcaatacaagaaatctctcttcacttcatcttactaatattctcaaataaaggaaaaggttatgcaaaatgttgttcaatcattttcatcaaaatttccatagttaaaaccctctccatcaattgaagagggttagttgttaattagctacgatattcactaacttacctggaacagcaataactttgcgaagtgttttgccatcaagctgacctttaatcttctcatgctctaacgcaatttcctgcatttcatcacgagtggcttctgtaggaatagaaattttagcacgaagtttgccgttaatttgaacaacaatctcaacttcgtctactgtaagcttgctttcatcaaacattggccagttcgcatacgcaagtgattcgctatgtccaagcgcactccatagttcttccgcaaggtgcggcgcaataggtgaaagtaacttcacaaacccttccattaaagtaaccgaaaccgtttcctgcttatacgcttcatttacaaataccatcatttgagaaaccgctgtgttaaagcgcagtccttccatgtcttcagttactttcttaaccgtttcatgataaactcgctccatctcttctcctgaattttcttcagaaatcgatgactttgttaggtcaccttcgccaaacaagcgccatacacgatcaaggaaacgacgagctccatcaagaccattgtgagaccatgcaatcgacccttcaaatggccccataaacatttcatatagacgaagcgtgtctgcaccgtggctttcaacaatttcatctggatttactacgtttccttttgatttactcattttctcgttgttttcaccaagaatcattccctgattgcgaaggcgttggaatggttctttcgttggcactacaccgatatcatacaaaactttatgccagaaacgagcataaagcaagtgaagaaccgcatgctctgcgccaccgatatacatatccacaggtagccattcatcaagcttcttaggatccgctagcatctcatcgttatcaggatcgatataacgaagatagtaccagcagcttccagcccattgtggcatcgtgtttgtttcacgacggcccttcatacctgttttaggatcgacaacgttcaaccaatcttcgatattcgcaagaggggattcgccggttccagacggcttaatttccgttgtttctggtagaacgaccggtaactcttccttcggtaccgcactcatcgaaccatcttcccaatgaataattggaattggttcaccccagtaacgctgacggctaaataaccaatcgcgaaggcgatatgttgtttttttcgttcctttacctttttcttctaaccattcaatgcttttcgtaatggcttcttctttctcaaggtcgtttaagaaatcggagttcacatgcttcccatcttctgtatatgcttctttcgccacatctcctccagccacaacttcttttattggaaggttaaaggcagtcgcaaactcataatcacgctcatcgtgagcgggaacagccatgatcgcgccagttccgtaactcataagaacataatccgctacccaaattggaagcttttcattattaattgggttgattgcatatgcaccagtaaattcaccagtcttctcctttgaaagctctgtgcgctcaagatcactctttgtttgaacttttgaacggtagctctcaactttggaaatttgttcactcgtcgaaattttatcaactagaggatgctcaggtgctagcaccatatacgttgcgccaaacagtgtatctgggcgtgtcgtaaagacatcaatcgactcatcataaccatcaattgtaaaggtcacttcagcaccttcggacttcccaatccagtttcgctgcatttctttaatgctgtcagaccagtcaaggtcttctagatcttcaagcaagcgatccgcatattccgtaatttttaggacccattgcttcattggtttacgcacaacaggatgaccgccgcgctcactcttaccgtcaattacttcctcattagcaagaacagttcctagggcttcacaccagttcacagctacttcgtctacgtaggcaagacctttttcataaagctttgtaaaaatccactgcgtccatttgtaatagcgtggatccgttgtgttaatttctcgatcccaatcgtatgaaaaaccaagctctttaatttggcgacggaacgtatcgatgttcttttgtgtaaaatcacgggggttatttccagtatcaagtgcatattgctctgctggtagtccaaatgcatcccatccaattggatgaaggacattgtatccttgcattcttttcatacgagataaaatatctgttgccgtatagccttcagggtgtccaacgtgcagacccgccccagatggataagggaacatatcaagtatataaactttctcaccttgtgcgtcattctctgttttaaatgttttgtttgtttcccagaagtgctgccacttcttttcaattgatttgtgatcaaatgccattgttactctctccttccagtccttacagaaaaaataaaaaacctcccatccccgttgtttatcaacagggacgagaggttgagaatctactattcacaatcacccgcggtaccacccggcttagtgctgaaaacagcactcacttaaggcctttaacgcaggcatacgggtcaccttactccattcaggttccgattcaaaggtgagttcgcaaaggttctatgttaactttcaccagccgttaactctctagcaatagaatccctggtactattccttatcattatctttaacttcacaaattacgtatataatttgtattgtatgaagacttgtgagaaatgtcaagaacattatcagaatagccgcttttttcgtgatctatacatctccagatacaatatgtatttcattaagtatagaaaagataaaaagaaacgtacccagaatgggcacgttatcctttgcgatgctttttctgactcgccgaatcgtcttttgagtgcggcttatctttttcttccctctgttcttcttttaaatcttctaatggaatggcatccacattcatttctgaagtatcctcatccaattgattcttttctttatcaggtaattgttcagggttattggtttcaccttgtttatgtgccttttccttctttgccatatgatcacctcatttattgtttactagtttgtaccacactccatatattcccaaacatttttggaagttagttggagaaaaagatcgaacatggtaaagtcataattagttaaaacatcgctttctagacgtctgcgttcaacatcagttgttcaagtcaggcagcattcaaatgaatcaaaaaaaatttttagtgatagaaaggaatatacatcatgacacttcaacgtatcttaccttttacaagaacgctactggactcagtcttagcagaaggcggcgttgctattgacggtacttgtggaaatggacacgacactctctttctagccgaatcggttggtaagtcaggtaaagtgtatggatttgatatccaaacagaagcaatagaagcgaccgaaaaaagactgaaagaagctaaacaatatactcaggtcgctctattccaggagacccacgcttccattaataacaaaatcgagaaggaacatatagggaaagtttctgccgcaatctttaatcttggctaccttccaggaggagataaaacaattgtcactaatcctgaagaaacgattcgatctgtaacagatatcttacgtttgcttcattcaggaggacttctcattctagttgtatatccggggcatccagaaggaaaaattgaaagtgaaaaggtcacaaatttcgcaactgatcttaatcagtcacattatcaggttctaaaatatcagtttattaaccaaatcaatgatcccccctatattcttgcgatcagcaaaaaataaggactgtgcttctgcacagtccttattttttatagaattcccattgattcaatatgatctcttgtttttttattccctaatttgtgtatcaggctatatatctctttcatatggttatcatagtcatcattgtttttatcttcatgataactcattgcagggacatgagaacggtataaggaaagtcgactatccttatctgttagatcaaaaagctcactaagcttataaatatcttcctcatctgcatcaatttcaaaatgatagcttgatgctccttgatcttccaaaatttcccctgaactaacctctacgtaataacgcttcttcatcttaagagcccctttcaaaatcctataggcttcttttctcacgaatgagcgttttttatacgtgttttactgagaagctttgtgaagtcttctataaacccatccattaaagtaaaagaacatgctcgattttccaccaattcgaatgattttacgagccaatgatcgaacatctttctgatccattactttgcgatcggcaaggtatatcccaattaatcccctattaattaaacggtggaaagaagaatggggaagtccttctacgcttttatctgcttccttaataaagtgtgcaacacgcttggcaagctcatcattgtctttataataaaaacaaaaattcaaatctccgccagctcgatcctcttcctgatcaataaagtaatccagcataatatgaagtccctgtacccacggaaagtacccatctttaatcatcgctgttccaccttgtgggatttcttcacctagtgaatacgagacaagacaaaatattcctaacgttgatcctgcacaagcagaaaattcattccaagtcatttctggcatttgcttcttatgctggtcaaaccaactcttcaatcttggcacgcgttcttcctctttcacatgtttatgtacctgaagatcacaatagtaatgacagagttcaagtaaggcaggctgcacttctgattgatttggcagttcgcgaattaccttctgacacgtctgaacaagttcaactaaataaccgccatcatctttttcttcccgataccggtaataatgattagacgcttgaacatcaggcgaaagggcctcaatcattgcctcatgtagagcactgaagtcttttggatcaagagaagtacttcggtcacataggttatccaggtagtcgctaattgtctgataagcagcgataaatgaaatggaatgatcaatctgctttccagcaagtaacccatagatccctccaccttcacaatgaaaggtttttgagtcaatgctgtctagcgcctgttttctaagttcaggatttgggatttgttcagcccgtctcctccaatattctaattcatgatgaaccctcggcaagacgcgtcgatagatactatacatcagcgtccagggttgactcggtactttcaagtgaccccactcctgtattaattatttatcttgttttctttgcggtctagtaattcaagttttaattcaacaaacgatttggctgtttgaaatacatcttcacgatctggttcgttgaacacctcatgataaaacccatcccattctttataggctttctctttcaagggaatgcggttaaaccatgaaataacggcttgtttatcaacaatacgatcatccccaccttgtacaacaagcaagggtaaattatgaaatgttcttgcaccttcgtttgcgattttcatcgccttgagaagttcacgataccatcttaccgatactttttgaaccattagtggatcttcttgatcgcgtttgtgaaattccggattcctagtcccgatattcggctctagcttggaatttaaccttaacgaaggaacgattggatttaatactttagagagaatatcaacgcctttatttggaggatttactagaccaatacaaggagacgataaaatcactccagtcagagacggtcgcttttccataatcgttcgtatcgaagcaaggcctcccatactatgtcctaataaaaacactggtagcttaaattcgtgagctctcctgatccatttgtcgattgtttcgatatattggtcaaacgaatcaatatgccctcgtcttctcgtactctcaccttgccctggtaaatcaccaagcacaacatggtaacctgcttcaatccactttgaaacgagccaatcatatctacgatgatgttcgttcgctccatgaactaatacaataactccttttggatattgcgtttcttttatgcgcatgaaaaatcagcccccttatgtaggtccgttctttttgatacactacttttgaaaaggatttcatctatactaaatgaaggttgggattgcaatgctgtatgcgtatcatgacaaaaagcctcagattcatgaaacagtctatattgcggattatactaccattacaggggatgtgacaatcgaagaacatagtagcgtctggtttaacacgacgatacgtggagatgttgctccaacagaaattggtaaaaaagtgaatatacaagataattgtgttctccatcagagtccaaataagaaactcattcttgaagatggtgtgacaatcggccatcaggttatccttcatagtagtattattcgtaaggacgctcttgttggaatgggttcaatcattcttgatggagctgagattggagaaggttcttttataggtgccggaagtcttgtcccacccggaaagaaaatcccacctcattcccttgcattcgggaggccagctaaagtggttagaacattaacagaggatgatctgcaagatatgaaccgcattcgaagagaatacgttgaaaaagcagcttattataaagagcaaaaaccgctctagaaaacacgcatatttgtcgttcgtttgaggaaggttaccaatacaatcctaaatggatcgaggtggcttccgtgtacaaaatgacaatggtcttgatcgtgctcgtcgtcatcaccttgctaataggggcttttatgacgtacaggcttggacaaaatcaaaaaggcgaatatgataatcaagggaacgcccgggtcaaatcttctttctttagtaatccgatttttcttgtttatattatcgcaacagcattagccattggctatgtaatctattttacgttaatttgatgaaaaagatcaggaaaataattcctggtcttttttgtttggtcttaacaattccttaagatttctttaatagtggcattaaaattctgctatatgcttgaggtaacacataggttgaagggggattctttttgagtaaagtggttggatggctttatgagcgggagtgtaccgtatttcgatttgtgaatttaacgtgtcattcaaagtatctcacatctctttttggttttattactcatgcgggtggtgcgagagcaacgattttaagcacacttttgttactggctttgttacctgctcctataaaaatatgggggttacaagccgcctttgctcttgctgcaagtcatatacctgttcatttaattaaaaaacattatccaaggcaccggccatacctggcgatgccagaaaccaagatgctcgtctaccctcttaaagaccattcttttccttctgggcatacgacagctatattttctgttcttacaccatttgtctttcatcttccttcactagctcttccccttattgctcttgggagtctagttgccttatcgcggatctacttaggtcatcattatccttctgatgttctcgttggtgtcttactcggaggtggatcaggcattctttcaacactcatattaggctagaaggggaggatcatccatgaagcttgcactctttactgacacctattatccacaggtcaatggggtttctcgcacactcggtaagttaaccacatatatggaccgtcagcatgtcgattatatgcttttcgcacctgactgtcaggctgatgaagacctgttcacaagtaatgttcatcggtttacaagtatgaagtttttcctataccccgaatgtcgcattgcccttcctaaattaagtcttatccgcaatcagcttcaggagttcaacccggacctccttcatgttgcaacaccgtttaatatcggaatgtgcgggttgcactacggaaaaaagaacaatgtgcccatggttgcttcctatcatacgaattttgatgactatctaaaacattattaccttgaatggttttcccctgtcatgtggaaatatttaacgtggtttcaccagccattctctagcacctttgttccgtcaaacgaaacacgtcaccgtctaaatgaaaaaggttttgagaacctaaaactttggagaagaggcgttaactgtgaacacttttctccacttaaaaaaaatcagtcactacgagaacgatacaattttcaggaaaagtatattcttttatttgttagtcgactagctccagaaaaaaaccttgaaacgttacaaaaaatcatgtggaaactacctgatgaattaaaacgacaaacaagatggttggtagtaggagacggaccagccatgcctcatttcaaggaaaatgtacctataaatgtgacattcaccggatacaaagaaggagaagaattagcagagctatacgcaacttcggatcttttcatattcccatccgctactgaaacatttggaaatgtcgcattggagtctctcgcctcaggaactcctgttgtagctgcaaatgctggaggcttaactgacgttgtgtcgggagaacgaaacggacttttctgctcccctaataaggaggaggaatacattagcgcaatcagacgactcttatcagatcatactgaacggagaatgatggggtatgagggccgacgctatgcactttcacaatcttgggaggccatttttggtcgattattagaggactacgaaaaaacaattggagttaagaagattgctcaatacgcttagaaaggagaaaaataatgaagcttgctgtatttggcaccaatgaaattggtttaaccgcatccgctatcttcgcttcacatggttatcatgtcgtttgtaccgatgaggatcgaaatcaaattgttgcactcaattcaggcgaagttcctgtgtatgaagaaggattaacagaaatgatgacagaagcgaaaaaggctggtcaattaagcttcactgttaatcgattaacagccgcttctgaagcagacattcttctattcactgaaccgattccagttgacaagaataaaaatcctgatcttacttgtttctttcgtttcataagaaaaattgctcttacaattaaaaaacataaaacctttattattaaaagtaatgttcccccaggaacagcatcaaaagtagaagacattctcatagaacagggtgtgtctgatcgctccttcgatgttgtcagtaatccagattttattcgaaaaggctcagcagtaaaggattttatgtatccttctcaaatcattatcggcacttcttcgcttcgagcttgtcgtgcgatggaaatgttctatgagcctattacatcgtctcttcaatatatggaccatactagtgcagaattaatgaggtacgcttatcatacgtatcaatcattacaagtctcgtgtctcacgatgatcgctggggttgcagaaaaatacgggggtgacgtcgaattaattcaaggcgcattaccgaagacaccaaaatttagtgagcactctcttcatcccggttcttcttttctaggtactgacacgttagacgaacttgcttcatttcgttcaatgatcaaagcatcttcttctgcaaatcaaatgtttaaggcactagatgaaattgatcaatatcagcctgaactattgattcagaaactgaaagatttcctaggaactctccagggagccaaaattgctattttcacttcatctacagtaaaaccgatcccagcacttccaccttatgagttagtcattaagagattgaaagaggaaggtgctatagttcaaaagtttgatactgaaaaaacgaaaggcaaacaagaaaacgagatgaacacgatttacgaatcagtgcaagattgcgatgctcttttattgatgagtgaattagtgtctattaaacaactaaactggggtaaaatcattaaaggactcaatcttccactagtcgtagacggtcacaacttattccccctggatgaaatgcgaatcattgctaacacctatgatttaatttactgttcaattggtcgaccaaacatctataaaggattaggttccatttcagtacaatcaattcagtaaagacggtttgtataactgtcccttaacgattcggcaacgttttcttccccgatcttcgcatgatctgaaagcattctagtagccggtgcgagcccttctatgtttggccaacgctccggttcccaaagatgggatcgttttaatgcttttccacagtgaatgaaacattcttttacttcaacgccaattccaaacaatggcgttttccccttatactcaaatcgtgcaagtaggcttttatctttcacaatcgtcgcaaccccattaatgcgcaacgtttcatctcgacccggaatcatgaaaagcaaaccaaccattgggttttctaatatgttcatcatcgagtccattcgtttgtttcctggtctttctggtattaatagatgatagtcatctaacgcttgaatgaagcctggcttatctcctcttggagaaacatcactgcccgtacttgaatgggttgctatcgtgataaaaggtgtaaagcgaataaaatctctacaatgttcatcaagaaaagaaataaccttatgtgcagcaagcttactcggagctccggccatctcttcaagttcttgcaccgttgtaatttcttcaccgaaaattcccttcattccttttctccccctacattttcttccattttatcacaccctatttacacataaagactttatattcactaaataaagacaaaaaaaagaagccaatggcctcttttttttgtctttattaaattcctgcaccctgtttaagggattctgaacgatccgtttgttcccaaggaagttcaatgtccgtacgtccaaaatgaccgtatgcagccgtttgcttataaataggacggcgaagatcaagcatcttaataatgcctgcaggacgaaggtcaaagttctctcttactagctcaacaagtcgttcctctgacacttttccagtcccaaatgtatcaatcgcaatcgatacaggctgagcaacaccaatcgcgtaggcaagctgaacttcacaacgatctgcaagatctgcagccacaaggttcttagctacataacgagcagcatatgcagcagaacggtctactttcgtagcatccttaccagagaatgcaccaccaccgtgacgagcataaccgccataagtatcaacaatgatttttcttcctgttaaacctgcatcaccttgaggaccaccaatcacaaaacgtccagttgggttaatgaagtattttgtttcatcatcaatcaattcagcaggaacaactggcttcacaacatgttccttaatgttacgctgaatttgttcaagtgaaatttcagggtgatgctgtgttgaaacaacgatcgtatcaacgcgaaccggctttccagattcatcatattcaaccgtaacctgagtctttccgtcaggacgaagataaggaagaatttcttcttttcttacttcactcaatcgacgcgctagcttatgcgcaagagagattggtagcggcattaattcagccgtttcattacatgcgtaaccaaacataaggccctgatcacctgcaccaattgaatcaatttcactttctgacattgtgccttcacgcgcttcaagagcaacgtttacacctgctgctatatcggcagactgctcatcaatagatgaaagcaccgcacatgtttcagcatcaaatccgtattttgcacgtgtataaccgattgtttgaatcgtttcacgaacgacttttggaatatccacatagtgcgaagttgtaatttcaccggaaactaatacaagcccagttgttactgtagtttcacaggcaacgcgcgcatttgggtcatgcgcaagaatatcatccagaatggcatcggaaatctgatctgaaattttatcaggatgcccttctgttactgactcagaagtaaacaaacgacgattactcactcaagtacctccttaaggattggatcctatctagttatagtgtaatggatacggtactcatttccctattatcctgtgccgaaacgagagaacgaattcaaaatcttatcgtcttacctttttttatagtgtcatcaacctcaacgacattaaaaaagccctttccttctatttagagggaaaaggagctggtatctcatgcctttcgcctcttatcttccaagactattgtcttgcaggttagcaccttaatcctgttgtataggagttggttgctgagcttcatcgggcctgtccctccgcctgctcgggataagagtatccattctcgacatataataacgtagataaaaggaagtgtcaataacgaaaagcggaagcgcccgtttagcctcgacaagcgctggagccccataaaaagaacacggtctttgtgttcattttatggggtgaagcgatcgagaggctgggcgctgcagctagacacgaaaagcggagtgggcctgcttaaatccggaggatgttggagcccatgagattgagacgctttttgtctcattcgatttggcgaaacagccggaggatttggcccgcgcagctagacacgaaaagcggagacgagcggttagaaaccgagatattggaactcctgaatcggaaccctgactcgaaagaactggattattcattcattactatcacaataaaaaaagcattcttatattaaagaaggtacccgtcaaactaaccaaatcgttattcgctcttttttcactcttcaagcaaaaaatacatagattagtatagaataatcacgcaaatgtgttatactatttttgagttaaacgagtcagtcaacgaaatctttaataaaggatgggtttaacgtatgaaaacagcttccttctcctcaccgttattggatgctatcttaaataagaacaatccacatgtaaatttatcagtttctgaactggttgaacattccttatttaaaaacgaagggacactctcttcaacgggcgctcttcgagttgaaaccggaaaatataccggtcgttctcccggggacaagtttattgtaaacgaagactctgtaaagaacaaagtaaattgggaaacaaatcaaccgatttccgaaaaaagttttgaaaacctttacacgaaagtactgaactatcttggtgagaaaaaggatctttatgtatttaaaggatttgctggtgctgaccagtcatcaagactacccatccaggttattaacgaatacgcctggcataacctttttacccaccaactttttatacgtccaaatgaatcagagcttcaagatcatgaagcaggattcactgttatttctgctcctggttttcaagcagaccctgacgttgacggcacaaattccgaaacattcattattatttccttcgaaaagcgcaccgttttaattggcggtacagaatatgcgggcgaaatcaaaaagtcaattttcaccgtaatgaactacttattacctgagagtaatattctttccatgcactgctctgcaaacgttggtaaagaaggcgatgttgctctatttttcggtttatctggaacaggtaaaacgacgctttctgctgacgctcaccgttcgcttataggtgatgatgaacatggctggtccatgaacggcgtctttaacattgaaggcggttgctacgctaaatgcatcaacttatcaagagaaaaagaacctgaaatatgggatgcaatccgttttggaacagttcttgagaacgtcattatggataccgattcacgtaagcctgattacgataacacgagtctaactgaaaatactcgagctgcttatccaatcgatgccattcctaatatcgctattcctagcgtagccggtcatcctaatacgattattttcttaaccgctgatgcctttggagtccttccccccatcagtaagcttacgaaagaacaagcgatgttccattttctttctggctatacaagtaaactagccggaaccgaaagaggcgtaacttcacctgaagctactttctctacttgcttcggcgccccgttcttaccattacctgctcaccgctatgccgaaatgcttggtgagaaaatcatggaacacgatgttcaagttttccttgtgaacacaggttggtctggtggcggatatggtgttggaaagcgaatgaagctatcctacacaagagctatgattcaagctgctttgaacggagagcttgatcgtattgaaacaataacagatcccatttttggattgcatatcccttctcactgtcctggcgtacctgcagatgtgctgcaaccaaaacaaacatgggaaaacaaagaaaactatgacgtaaaagcaaaagaacttgctactcaatttgttaagaattttgataaattttcaaacgtagctgaagagatcaaaaaagctgggcctaacgtttaaaacctttcaaaaagcacctagaatggtgctttttgttttgtagaaccgcttcttttagacaaatatcctcgaaacgaacaaactctaaaaagctcttaccgctaaccaactaaaaggaaacctccccatagcatcatccttttttatctgccaaacacaaaatgttacgaaattcataggctatagtatcttaaacatgagcctatctcatgtgacaactgtgggggctaaataatgataaaaagttggatatttaaaagcagtatttttataggtgtatttcttcttattctttcagcatgtggtacgaataatggaaatgaccaggtgcgcgtagctgaggtaacacgttctattttctatgcaccacaatatgtggctctctctgaaggaatatttgaaaagcatggaattgatgtcgagttaaccaccacttggggtggcgacaaaacaatgaccactttgctttcaaatggagcagatatcgccttagtcggttctgagacatcaatttacgtttatgcgcaaggcacagatgatcccgtcattaattttgctcagctcacacaaacagatggaacgtttcttgtatcaagagaaaaagtcgatcattttacatgggaagatttgaaaggaaacacttttcttgggcagcgtaaaggcgggatgccacaaatggcaggggaatatgttctgaaacaaaaaggcattgatccacaaaatgatttaaaccttatccaaaatattgattttgcaaatatctcaagtgcgtttgcatcgggtactggagattatgttcaacttttcgaaccgaccgcgagtgtttttgaagaacaaggtgtcggctatatcgtggcctcgttcggtaaagaatcaggaaagattccatacacaagctatatggcaaaagacagttatttaactaaaaatgcggatgtagcagaacgatttacagcagcactatatgaagcacaattatgggtagatacccactcttctgaagaaatagctaaatcaattgagccattttttcaggacactgatctggagctgattacaacggtagttgatcgttataagagccaacattcattcgctacaaatcccactcttgatcaggaagaatggaataacctacaaaatattatggatgaagctggcgaacttccaaaacgtgttgattatagcaaactagtggataacagctatgcagaagaagcacaacaataggaggaaatatgatgtctttccttcaactgaatgccatctcacatgtttatttaacggagagtgcagcaaaggaagccctatctgatctttcgttttccattgcggaaggtgaattcgtatcgctgctcggtcccagtggttgtggaaaatccacattgttatcaattatctcagggctgttacagccaactgaaggaagcgtctctcttcagaacaaggtgattcaatcaccgggtgagcgaatgggctatatgcttcaacaagactacttgttcccctggaagaccattgaagacaattgttatatcgggttaaagctcttaaacaaattaactccggagaaaaaagaaatcacacttgcattacttgacagtatggggctttcggacgttcgtcacgcctatcctgatcagctttctgggggtatgagacagcgtgttgcgctcgttcgaacgcttgccactgatccagatcttcttttattagatgaacctttctcagctcttgattatcaaacaaaactaaagcttgaagaccttgtcttccaaacgttaaaagcacatcagaaaacagctatactcgttacgcatgatatcggagaagcgatagcgatgtcagaccgaatcattcttttatcaccgcgaccaggtaaaatcgcaaagatctttcaagttccatcccaacttcaaacattgctgccttttgaagctagaaatgacccagattttcccgcaaacttccaaatgatatggaaggagcttgattctcttgaacaatctccaacttgataaacagcatcagcagtatgtaaagaagttgaaaagagaaaagtatgagatagtaacctggcaaatctttattcttttagcatttctctcactatgggagcttgcagggcgacttacctggattgatcctttattatttagttacccaactaagatcggttcgctctttctcacaaaactttatgacggttctttgttgctgcatacaagcgtaaccctgcttgaaaccgttgcaggttttatgatcggtacattacttggcacagctttcgctgcggtcctttggtggtcccggaaagcgtcaaaaatttccgatccttatctggtcgtattaaattcaatgcccaaagtagcacttggcccgattatcatcgtggcactcggaccaggctacctttcaatcattacaatgggagcatctatttcaatcatcatcacaacacttgtgatctatcacgcttttcatacggtggagccaaattatattaaagtgattcgttcctttggcggaaataagaagcagatctttcgtgaggttatcctccccgcttcttttccagctatcatctcgacacttaaagtaaatgtagggttgtcttgggtaggggtcattgttggagaatttcttgtttcgaaacaaggactcggttacatgatcatctatggttttcaagtgtttaatttcacactcgttttactaagcttatttatgattgcgattctttcgtccattatgtatcttggcgttgaatggcttgagcggaaattaatcaaacattagctccttttttagggggctttttttgttgcaagtgggcaaactagttagccagaggttacaaacgtgatctatccctacacgtcttaccgctggcaaaatgattgctatagacccacccaaatgccatctgctagcatatagaagaacatatttctaatttaaaagacaggtgaagaaaatgaatgctctgaaaggcgtatggcttagcattgcagcatacctactactttcaatcataaaattaggtgctggataccttttaggttccgaggctctgttggcagatggttggaacaatgcatcggacattgtagcatcagttgccgtcttaattggaatgaggatttctctcaaaccaccagatcttaatcatccatatggacattctcgagcagaaacggtctcttccctatttgcctctttcgtgatgtttgcaattggaattcaggtcctcttccatacagcgaccgttttaataaacggaaccgtttcatctccaccattaacatccgcatgggtcgctcttctcggtatgcttgttatgggaagtgtctacctttttaattccagactcgctaaaaaaacaggcagtcatggactaatggctgcagcaaaagacaacttatcagacgcacttgtaagtcttggagcctttgttggaattatcggcgctcaatttaacatgcactggttggatcctttaacaggctttatcgtaggccttatcatctgtaagaccgcttacgatatttttaaggattcttctcttatgcttactgatgggtttgataaagagaaactaaatgatatcgaagcaacgattcaagagattgaaggcgttgaaacgcttgtagatattaaagcgaggatggctggaaataagatcattgttgatgctgtagtagaagtagctccttatttaaacattaaagaaggtcatagtattacagatgaaattgaagcacagctcgagaaagagcacgatattcggaatgcaaccattcatgtggagccaggaaaagaaaccatctaactaataacaaaaagtccagttcaacgagctggactttttgttttagctactatcgttaaatccttcactacaaataattaaggtgttttaaactatacgtaaggacttgatccttcatcataaaactataatgttcatttaagtgaaggtctttcggaagtgattttagcttgacgggacctttcgtttccatataatcatcttttttcacgagatgatcgatgtcagcatagtagacgtttttaatgatcgtaccaccttttccttctacccgatactgccctacgtacttaagacgcttcacaacgcctcctgtttcttcgtagacttcacgaacagcagcttcttccgcattttcaccctcttccaccttgccaccaggaaactcaatgcctctccttgaatgttccgttaacaaccattgattttcgaggcgacaaataacccaaacatgcttcggatctgaggagtacgggtggtcctggaaagaaaatgttacctgattatgatagtaatctgtaaacataaattcgctcatttgataacctcgtcctttagtttcttactttattgtaaaagagtagcctgtccttgtccaatccccctatataaaaagtgaaaacaagattctccatttctaaaatcaataataaaacgcacggcatttaaccgtgcgttcatcttatttaatctcaaagttcttaatgatccagtgattattttcataaataaaatcaatatcaattgtataagtaccataaagatccgattggtttgactgcgttagcttgtattcaaattcacttatttgctctaactcatacggcttatctgtattcacccatggaaagagttcagtaggaacaaggtaaagaccgccttctcgttcctcaaagtagacatcagcgatttgagaagaaagctcttttgacgctaccttctgtaagtgctgctcaacttcctctattgactgaaactgtttcactttataattagcatcggtttcttgaacaatacggtcaataaggtctgttgatagttgttcgacattgggtttttctactgccattgtctttgcttcagctttgttttcaatggaagacatcaccatttgtgaatgctcttccgcaacttttgatatttccgcaccgcagcctgaagtgaatgtaagggcacctaccaacatggctatacttatgtattttttcaagttactcatccttttaattattgtagtatttcatcgttactaatcactttcctcatgaagtcaagtgtcaaacaaactagtcgataattaagtcttttttactatgatttcgagaagaaagatgcaaattcaataaaatcgattacaataataatacgaataaagataacgaaatgtttcgattcttttagaatgcatttcagataggagaatccattgacagagctatggaagaaaaggttcgataattatttacgccatcgctttagctatttaagttatatttttcaaggcggattcctcatagcattacttcttgcaggcggcttcggggctgtctactatcgacggttactcaatacgattccagaaaattttccaacactgattgtgacgatcttgataattagtgctgtaatcagttcactcaaagtaaagttctttctcctgccagctgaccgggtttttctactagcatatgaaggacgaatggagaagtatatccgatatagcgccttttattcgtacgttcgctctcttcctataatcatactcactggtttactgacgactccgattttcattcgattaggctttgaagagaacgatcttatagtcggatgcattacgctattcactcttaatttcctatctttctatgttattatccgttcctacatagtaaagataaaatggttacgcctttatctattggttatgaatagtgcggttttttactcaacgataaaaggagctgtttggatcggcgtactcctttcgattgcgctcatctctcttccttttctcttgcgtaagaaaaaaatgctacagtgggaaagattgatcgaacttgaagcttcacaaaaaaaccgctttgaacaatttgctaacctgttcgttgacgttccttcattacaaaatcaagtacggacacgaagatactttggatgggttctttcattgattcatgttaacgatccacatctttatctttcagttcgaacttttttccgtaaaggctcatacgtttggatgtacatcaggttgcttgtgttaggagcattcgttctttcctatttgtctagtgaaatcgccacttatctattcgtccctctttgtctttgggtaacttatcaacaacttattgcaataataaaagaacagtaccgagatacatttctcatcattcttcaagacaacctgacatctcattcaatcgttaaaatgattttcggtttgttgatcctgcagtccttcatctatagttttattcaatttcctggattacatgaagctttcatagttcttttggaagggttactgttttcttatgtactaacgatgaaaaaagagacgagcgataaaaagaggaactgacttaaattagtcagttcctctttctcattaacaataaggattgtagttcgctccgccaacgtatcctggtccgtgaccatagccaccgccaaatgcgccagctcctacaataattaataagataaacaagacaacaattaacgcaaatcctttaccatatcctccgctcatctttatccccctcattaaaattcattcactacattattactttatgtcgctgagatcatttaggaagggcaggagcggagttcttatagaaaaacaatcttattctttataaatcgtcattgcagaacggtttatcaaacaaggcattaggtattaataaacaaaaaaaagaggcatatgcccctaatttctggtgttatggttaagtgcagataaaacacccatttgatcgatttgcgcttttgtcttatctgttcctaatcgataaatcatttcataaagctcataaatcgcttcatctgtccagtcacgatggctgtctacttcatcttcattaaaatggtttaatgaaaagaaatcattttgctgcacatatttctgtgagcgcaacttttcaatcgtgcgctccatttccattttttcttctttcgtggctctaatttcaaatgcgttcatttgagtaccaacatttgtctcatgaagctcgccttttggtgttacaaaatacgtctcacgtaccattgcttctcacctccatgaagatttaaacaggactaacttctgaatggctatatcctttatactcatgttgagctgcatcaattgttttttcaacagtgtcaagtcgtgagtgaaaagatccaacgtcacgtccctgcttcttcgcttcctcgacgcgctcatcataattgttttccttcgtagcttctgcttcaacatgaaattgtttcttatcatgatccacaataacttgaataaatttctccatttctctttcctcctctttatcctatcgtgtttgtcactttacccgtttcagatgaagattaatcttttcattaaaaacgaatacgctcaaatttgtgttaaaatgaggggatgaatccataagaactcaggtgatgatcatgaattttacaacaacaccgcatcaagcagtgactgaattggacctttctgctcctttaacaccccattcgtctattagaccattggaagatgaggtagaacaggctttttttcatgcattagtagaaaaaggcatttgccttaatgaaccccaaacaaaagcagtcaaacatacagaaggccctcttttaacaattgcaggggctggtagtgggaaaacatccgttttaacaacacgaacagcgtttctaattacggttaaggagaaagacccttctagtattttacttatcactttcactagaaaagcttctgaagaaatgcgacagcgtattagtcgcttaccaggcgtctctccacaagactcagggagattaacagcaggaacctttcattcgatatttctgaaattattaagaagtctcggctataatcaaaaaatattgaatagtgatcgtcacaaacaaattattatgaaaaacattttaaaaaagatgaaaagtccagaagcttctttaccggaaattatgctttcatccatttcgtcttgtaaagtaaagatgatggaaccgagcgatgttcccgatcataaagaaacggaagaactgaaaaaggcttatacagaatatgaagagtggaaaacagctaatcactatatggactttgatgacattcttgtatttatgtatcgagaatttaatcaaaacccagctcttcttcaaaaaatgcaaaatcggtttcagtatattttagttgatgaatttcaagatacgaacccaattcaatacgagttgattaaacaaattgctgcaccgcaaaacaatctatttgtcgttggggatgatgatcaggtaatctattcctttaacggagcaaatagttcgattattttagaatttgatcgcacttatccagatgcggcagttgttacactcgacacaaattatcgatcagcccctcccatcgtaggtctaggtaatcatgtgattaaacataacacctatcgaagggcgaagacgatgaatgcaacaaacaaagatggaaagcaacctttctatcttagacctgcaacaacagaagatgaagcaggatatgttcttcgtcatatccgcgagcaaaaaagagaatggaaagatatcgccattctgacaagaacttatacgaatgcacgagcccttttcgaacaattgattgagcaggacatcccttttaatgcacaaggaatgaaacaggtcttttatgaacaatccataatcaagggcatgatggaacatcttcgtcttgcgtatgaacatcaaaaccttgacgctacggccgctatacttccctctttatttattaatcaagaagctggtatgcgtcatatcgagatggaaaattttgtggaccctgttgattttcctttagttcatctaaaatcatggaaaacgcttcgtgatttccaaaagaagtcgattgatcgacgtattcgtctgattcaggaagcaaagcgtcaccaaccacaaaaggcaatccaattattgcgtgatgattatatgaaacaccttgatagtgcgaacgatgaagccttaacggttcacaaaactacccttaaagaaatgatggacgagctagaattctcaagctcacgctttgaaacaattcctgaatttctagcttatgttgatcgcatcatccaacggtttaatgaacacaaacaaaaggcaagcgcaacgaacggactatccctgttgtctattcatcaagcaaaaggcctggagttccctgtcgtttacgtgattggcgcttcagaaacaatattgccacacgtctctgcacttaactccatgaaagataaagaagcttctcagaaggagctatatatgaaaaacccaactgctgaccttgaagaggaacgtcgactttgttacgttgcgattacacgggcaaaagaagagctttatatttgttcacctgaaaaacaccttggaaaacaaactcctgtctctcgttttttaacagatgcttttaagaagaaaataaagcaagaaggaagatcagtgaaagcctgggtttgtagcagtgaattctgcaaaggttggatgaaggttgaagagaataagcagcctgatcaaaagtcatgtcctctctgcgaaaagccgatggtaatatcacaaaagtccgttaaataagtcggaatgatgtcaccgtgttaagcattgttgcgctttgattacaaattatttaagagacgtttaacttacagttttcgcccttcaaacatgctatagtagaaaaaaacgcgcaacaggagggctccgatgagcagcattcgttacgaaaccatctttcagaaacagcttggaaacggtacgattatcggaataatggattaccttgaaggcaagctgatcagactgaatttaaatgacaaggagccggagtaccttaacccggagttaaaggaattctttcaacaagagcgtatgaaagtgaaccttcatcaataatatcgatcataaatcaaacagcctccccagaattttatgggaaggctgtttttttgtatagaaatgaagatgtatgacatcttaataacaaagcaaaagtttcagctctttcactatgcttactagtcttttttacctattattcatcaaaaaaggtttgatataaaaagtgaaaggggtataacaatagtagcaaagaacattgctatattgaaggaggaagtcataatgttaaaacaagttctagttattgtcggtattgttgtagtcgttgcatttgttgtcagtgctttattttagaagacaacataattaaagctatggatgaactaaattgactttatcaaggaggaatagcaatggtacgcacaattcttatgatcattggtgcagtcgctgttatcgcagccatcatttcatttatttaatatacattttatgattcataaagcaattgaaattttactattacttataattaaaagaagtcgagacctttagaggctcgacttctttttaaattatctattaatcattctttttcatgttttttttggcttcatcaactttggactttggaatgtatataaagagcgcttttttattattattcatataaatctccttcagagttgatttatttttaccctcattcattctactcgataatgacgtctataagcaatgatcccttccaaaagaagtgaaaacactgcgttagtactaaatgttctgacaatagcgatgtcactcatcgaaacttgtgattaaaaactgtcaagaaatcgagataacttcgacttctattcttggacgaggattgatatactgtttgtaaattgtgtgattctgatcaattaaaatgggtcacaatagcttatttaaaggagtgaactccatttgttgaaacaaccattaaaactattcagaggggtcggctatgcggaaggaatttcgtttctattgctactaggaattgcgatgcctcttaaatacttgatggacatcccgatggccgtcacgattgttggagccttacacggcggattattcgttctttatcttgccgttatcctttacgtcaccattgtcaaacgctggtctttcattaaggcgacgcttgccgttgtctcatccgtcatcccattcggcccgtttatctttgatgcacgtcttgtgaaagattcagaagcgtaaatgaaaggcaggacctttaacaggttctgccttttcgtatgagctcaataaacttctttcacgatcgtcacccgagctagttcttttcggtttaactcgtatccaataccattactttctggcacgttaatgtatccttcctctacgatcacttcaggaagaatgatatcccgctcccaatatcgcgcagaagccgagatatctccagggatgacaaagttagataagctagaaagggctatattatgcgctcttccaatcccagattcaagcataccaccgcaccagacggggacaccgcgctcatcgcataaatcatgtatcttcttactagcagttaacccacctacgcgaccaggcttaatatttatcacctgacagctgtttaaatcaagcgctcggcgcgcatcatcgaaagaagaaatactttcatccaaacaaatcggtgtctttaatttcctttgtagcgtagcatgatcaacgatatcatctgcagctaacggttgttcaatcatcaggagattgaaggcatccaacgctttcagttgatcgatatctcgaagcgtataggcggaattagcatctgccattaaagataagtttggatagcgttctcttattgcttttagaatggatatatcttgagacggctttatctttaccttaatccgctcatatccttccaaaattctgttacttatttcttctagcattgtctcctgatcagaagcaccaaccgcaacgcctgctttaattttctttaaagttcctcctaatgctttcgataaactaatgccttcttttttggcgtataaatcccatatcgccccttctatcgcatacttcgccattgggtttcttctaattcctgacaacatgcaatcaacctcagacgggtgtgcaatgaaacgtttttttactaagggtatcatgatatctcttaacatatgccaggatgtttgaagcgtttcttcagtgtaccacggggttgtaaatgccaccccttctccaaaaccaacattacccacagcatcgttcacctctacgataatcaagtctcgatcagacaccgtttcaaggctattaccaaaaggcgttataaggttcattttaatatgatggagcgttaccgactcgatgatcattctgtttcactcgctaacaaatttcgctggagtttattggctccattccttggaagaccctcaacaaaggtaattgacttgggcaatttatatcgagccagtcgatctgagagataatcgagtaactgctgatcggttaacattgggttcttacttaccacgaaagccgcgggtacttcaccccaatgcgcatcttggacacctgtcacgccagcatcttcaacatccatatgttcaagaatggcggcttcaatttctgccggatacacattttcgcctccagaaagaatcaggtcttttcgtcgatctaatacaaagagaaaaccatcttcatcaacaaaaccgatgtcacccgtatgtagccatccatcttcaaatgcctcactagtcgctccttcacgtttccagtatcctttagtcaccgtgggtcctttcacaagaatttcgccatgctctcgtggtgaaaggtctttatgattatggctaatctttacttccgaaggaaaaagagctttcccagcggacccctgtttatcaagcatatactcaggtgaaagcgtcacgatttgcgatgccgtttccgtcattccaaatgtttggaagacaggaatttgcttttcttcacaaatcgttaggagcggatatggagctggacctccgccaagcagcatgcagcgcaacgtagccggatactgatcggctccaaggtcatcaagcattttttttagcatagcgcttactaccgatacaattgtaatgtcttctttttgaatcgattgattaacgacatgcggatcgaatcgtttttgtataaccatcgtaatcccatagatgacactgcgtaataaaattgaaagaccactcatatgaaataacggtacggcacataaccagcgatcttgcatttctaaacctatattaaggctcgagctaatcgcactccaccagtggtttccatacgttaacatcacgccttttggtttacccgtcgtaccagaagtgtacataatcgtatgaagctggtttaactcaattgaggtttgtagcccctccaaacgatatgcttctggacgaatatcctcccaaataaatagttcgatatttagtaaactttcacgagctttattcgcaagagatcggtccgttattacgtaagaaagctcagcatcattcaattggaaagctaactcaggacctgttaatcgatggtttagcggtacaataacaaccccaatatacatgagcgcatgcaaacagactgcggactctattccgttctccataaaaaaaccaacatgctttcctttaacaatgccctttgtttttagagcattcgccatttcaactgcttgctcttgcagtcgcttataagttaactgcttattcttttcaatcagcgccactcggtccggcgtcatgaaagcgcgtttgtgtaaccaatttggcatcgtgtccatctttaacatcctttctttatcctgaaaaaacagcttgatggatatccatcaagctgttctcgtgcaatcgatttatggaaaacgtgggaactgtttaaagtccggtttgcgcttctctttaaacgaatcgcgtccttctttcgcttcttcagttgtgtaataaagaagcgttgcatctccacccatttgttgaagtcctgcaagaccatctgtatcagcattaagtgaagctttaaggaaacgtaaagcagttggtgacttctcaagcatttcctgcgcccactgaacggtttcagcttcaagctgttcaagagggacaaccgtgttaacaagacccatatcaagtgcttcttgggcgttatattgacggcaaaggtaccagatctcacgggctttcttatgccctacgatacgagcaaggtatccagcgccgtatccagcatcaaagctccctactttaggacctgtttgtccaaaaatcgcattatcagcagcaattgtaagatcacatacaacgtgtagaacatgccctccaccaatcgcatatccagaaaccatcgcgataaccggtttagggattacacgaataagacgttgaagatctaatacatttagacgaggaatttcatcatcgcctacgtatccaccatgccctcgaacactttgatctccgccagaacaaaatgctttgtctccagcacctgcaagaacaataaccccaatattagaatcgtctctcgcaaatgaaaaagctgtaattaattcattaaccgttcttggtgtaaatgcattgcgcacctctggacggttaattgtaatcttagcaatcccatcatacgtttcataaagaatatcttcaaattcacgttcagtcttccattgaatcattaagaaattctcctttcctatgtaccaaaatttacagattagaatctgcatgcttttttagaaaagctactaccattttaacaaagatttcaggttgttctacatgaattgtatgccctgcgtcataaatttgcacaaaatcagcttgagggagtaaactttccatcttctttccaatagaaacgaacttttgatcatgctcccctactaaaagaagaacaggaattgctacactgtctaacacttcccaataggacggctgggcgcctgtgcccattccaaaaagactgttcgccagtcctctttcagtattgctcaaacgctgctttcttatttcctctttcttgcgtaaaggaagttttttctgagtagaaaacaaaggaacgttttcccaaaaatctacaaaagatgccatgccgcccttttcaatccgtctagcaagccgatgatcattttgtattcgcttatctctttcctctttcgtaataagtcctggtgagctactctcaaggatgagtgttttaacacaatcaggatattgtacagtaaacgataaggcaaaacgaccacccattgaatagccaagcaaatggatgtgatcaatgtgaagaatctgtaagagcttttttagataacttcccattgcctccatcgtatagagcgcaggatcatctggttttccacttgcaccatgcccaattaaatctatggcgatcactttatagtgcgttgatagttttttcattaacggagaccaacttgcgcttgaccctgtaaagccgtgcaataaaagaagaggttccccctcaccttctattttaacgtgaaacggttgtccttcaattgtgtaaatcatgattttagaaccttcgctgttttgtgtgaaatctttgagaataacttccgatggagcataagattttcatcacgattggtcgggacttcaataatgctaagtcctttatgcttcttgcttttctcaaaagctaagctaaactcttcccaattccctatgcgatcaaaacttcccccgtagagcgctgcggtatgctcgtaatctaatccaagcggtgtcccaaacagttgctcgaaatgtttctcctcctgacgctgcggtaaaaaggagaaaatcccacccccatcattgttcacaacaacgatggttaaattaatttcatataactttgctagaaggagaccgttcatatcatgataaaaagagagatcaccgataaccaaaacgccagaagaataatcggtactagcacccagagcagttgaaataatcccatcaattccgttcgccccgcgatttcccataatggttggtcgaggtccttcaggtagaaagaagttctccaaatcgcgaatcggcatactattgcctacaaacaaaagatcgtccttatccattaatcgacctaattctctaaacacatatccttcaaaaagtccctctacctccaattcctcacgaagcaggttaagagtgacctcgtttaactctttccacgcttctagccatttgttctcacaatgttcaagctgctgtgaagcagggagaaggctcttcacaaactctactggtgaaacatttggcatgtcagagcttgaaagagttggatctctccacccattctcatctactacgatatggagaggactttccactttattaacaaaaagcgtataagcttttgatactggcattgctccaaaacgaataatcacatcaggataaagagaggaatctacttcacctcttagaaaagcatcatatccttcaattagattggaagaattcacatgtcgacacatggacagagaatcagcaagaacagggtaccctagtgcttctgcaagagcatacaacggctcggctaattcttcattttcctgtggacctacaacgataattcccttcttataagccaacttgtctacataacgttttactgctttatcgtctaaaacgcgtgcataatcagtagattgtacccatggctcgtgatcatctctgccgtcagaaaaaagacctgaatatgaaagatcaggtgttaaaggatctctaaatggaaaattaagatgaacaggtccagccggtacactcgaagaaacagctacggctcttgaagcggctgtcctgatgtatcgcgtcagagatgaggatgggagtgccatttccttaaaccactttgcatagtctccatatagcttgatttggtcaatcgcctgtggcgcgccattgtcacgaagctcatgaggacgatcggccgttaatacaatcaacggaacattggattgagcagcttcaattactgcaggatagtaattcgctcctgctgtgcctgaagaacaaagaagtgcgaccggttcatgatgcgatttggacatgccaagcgcaaaaaaaccagcagatcgctcatcgatatgcatccagacttttaataaagggtgctcggccatcatcatagcaagcggggtagaccgcgatcctggactaacgacagcatgttttacgcctgatcgcacaagctcatctacaaaggaaccaacgtagcttgataatatttcttgatcagtcatattttttacccccaagcgccgttaacatcggtttaaatttcattttggtttcttcgtattcactatcgggatctgaatctcctacaatcccgcatcctgcatagagcgttgcttgatcaccatttaataaacctgagcgaatcgcaacggcaaattcaccattcccctggtaatcaacccaaccaacaggcccagcataccagccgcgatcgagattttcgattcgcttaatctctttaaccgcctctatttgaggataccctccgagtgccggggtggggtgtagccgttcaaccatccttagaagacttgttcttttgccagccctcgctacaacaggtgtaaacaagtgttgaatatgcggtgtttttaaaatttctggcgtagatggaacctgaacaaattcacactcttcttccatagcggttcgaatcatctgaacgactaaatcgtgttcaattcgatttttttgatcataaagcagttcttgtccaagagcctcatcttgttcttccgataccccccgttgaatcgagccagcaagacacgttgaataaacctgttgcccctcccttttcactaaccgttcaggtgaggcgccaagaaaacatttttccccgtattcgaacgcaaatacatagctatcgctctgctgttcttttaaatttgatagcgttcgtgtagaagagaaagattgtgtagattttagcttgatttctctagcaagaactactttatccagctgccctcctcgtatattttcggctgcacttctgacagtttctttccattgatcagggttaatttcttctatagaaaaagcttcaacattcgatgaatatacggtcgttattttatttaaaaggttggcatgttgctttagaagtccttccgaaagtttctccggatcatcttcttcactcacgacggcattaattgttaaccacgcctgatcaagagcggaagttagcataatttccggaagtaccatacccccttcaggaaatgaaccccattcaccgctttctggcgcagaaggatcaaaagaaaatccaccgagcagcacaggtccgacacctggacgagatggtgccccctctataatggcatcttcaagaaaacgctgccactcttcttctattgtacgaaatcgatcgcgattggcttggaattggttcatccgtccaagccctacaatcgtcgtatcattctctggatcagaccaaaatgttcgatcatgtttataagtaaacgaacctgctgcataaaaggagaggggatcgacagcagctactgatagcacctgactaacaagtacagacgttccccgcttttctgccttactaacaccttgatgaagcaggctaaataattcttgatgttgtaatgtagacaccgtcttctccccccaactttctgtccatgcaaaagcagaccgagttagcctcggccacagttacttaaaggatacacctgtgtagctaagactgtcaacgaagctgtttcaccgtttttatcgccttcttatgtatagattccctatctcctcaaaaaaaatcattttaatgctccgcagatgcccttagcaaaataattgatgagcatacactgataaatgtagacgacggtaaaccgttgtttatacacttaattcataagggagtgtcttacatgtccagacactattatcatggtgtttgtcgtcagcatattggacaatgtgttgaaatcaaatgtcatgacggtcaattgcatagaggtcatatagaagatgttgatgatgagttcgtctacattcgccctttaaatcgcaattgtgatggaccacaacatcccgaaggaccaggaatgtttttcttcggcgcttttgcaggcggctttcttggaggactattaggcgtaggtttaggaagtatcgcgttttttaggccatatccgtactattactaatcacacaaatgcgatcactaaaaggtgatcgtttttgttttcactactcttttctctcttcttgtaagaaatcaggcgaatgtgaggcgaaagcatgttattcgccttttttctattgacagagacttcttgatattgacaaaaggattgacaccctttatccgtttttttaaactataatggttacaaggggatttttaagaagtttattatttaagggagagacactattctatggaagagcgtatgaacaacagcaacgataagctgaacaaagtgacgccttcaaaaccaacctggcaggtgtggtggcgactattaagaccccacacgttaacagcttccttcgtcccggtttttctgggcacaatgcttgcccttcaaagtcatacattacattttggattgtttatggcgatgatgatcgcttctatccttattcaatcagcaacaaatatgtttaatgaatactatgatttcaaaaggggtcttgatcacgctggtagcgtaggaattggtggcgccatcgtaagagatggagttagtgcaaaaacagtattgaatcttgcttttattttctttggagttgcaattctgttaggtgtttacatctgtatcctgacgacatggtggatcgcggtgatcggtacaatctgtatggctgcagggtatttctatactggtggcccatatccaattgcctatacaccatttggggaaattgccgctggcgtctttatgggactcattcttgtcttactttcatttttcattcagacgggagttattacatttgaaagtattctcgtttcgatccccatttccattctagttggcggtatccttatggcaaacaatattcgcgatctagaaggcgacaaagaaaaagggcgaaaaacactcgcaatccttcttggacacgataaagcagtggccctattagagtggatgtttatcgtttcttacctttgggtggtcgcacttatcattacaattgattcatcattgtggttgctgttaattattctaagcatccctaaagcattcaaagccattcgcttgtttgaagggaaaacgcaggcagctcaaatgatgccagctatgcaagcaacggctcaaatgcatacgcagtttgggctgctaatggccattggtttattgctcgcgtattttatttaatctagagtcagagacgaatatagtctctgacttttttacgtcgctttagagaaggaagcactttagcgggaagcacttctttttaatctatttagcagaattaattagattttcgcggaattatctcttaagatcgcagaattaattggtttttcgcggaaatattgagaatttcgcggaaatatagcaagaaccagacataaaaggaaaaaaagcgagcttcttccccgctaattttccctttttatagccaattgctcgtgtatactataaataagtacatagaaaaaagcggaagcgtccgattaacctcaacaaaatcttgaacctaaaaaaattgtcccgtgttcattttattgatgaaggaattataagtttgggcgcgacagctgaattggaggaatgagatggaattcgcaaatacaatgctagaggcactcggaatcaaagccattacactaacacctgaaaaagtcgttcttgaaatgccagttggaccgagcactcatcagccactcggatatcttcacggaggtgcatccgttgcacttgcagagtcagccgcaagcatcggtggcacgcttaaccttaactcagaaaacgaagccacattcggaatggaaatcaacgccaatcacctacgtagcaaaaaagacggcgttgtccgagccatcgctgagcctatccacatcggacgtagaacaatggtctgggaaatcaacatcgtcgacgaacaagaagaactaatctgcatatcccgctgcaccctagccgttaaaaggtattaagaaaagcggagacgagcgttcagaaacggacatattggaacccttgaattagaacacgccctttgtgttctggtgaaaaagtgaagtgaccaagtgtctgccactcacagttaaacaccactactctcactaaaccatagaacctaaaaagaatcccgtcactattgacgggatttctgttctatttttcgttcaccaatttctcgataatcttcatgatacgtgtctgaaatcgcataatgacattcatcgcacaccatccttcttctttcccacgggaagagcaattctttctcacagtaaatacatccgtgattcaattagatcaccccccttttagattatgacgaatcagtatgtctaagacctaaaagccaggaaaggagaacctaacttgacatataaactagtgccttatcttttaatattactctttttatctgcctgttctttcagcacttccaataacgaaattcctgaaaatacaattccagcaacagtggatcgggtcgtagatggtgacactctaaaagtaaccctagaagagcgagaagaaacaatcagacttctacttgtcgatacacctgaaacgaagcatcctagtaaacctgtccaaccatttggacctgaagcatcagattttgcaaagaaccaacttgaaggaaagaaggttggaatcgaaatcgatgtttcagaacgtgataagtacggcagacttcttgcatacgtatggatcggtgatcaaatgttcaacgaaatgcttcttgaagaagggctagcgagggtcgcatacatttatcaaccaaacgtaaaatatgttgatcactttcagaaaatacagcgacaagctcaagaagaagggaaaggcatttggagcatagaagactatgttcaggatgaagggtttgacgaagaaccagaaacaaatgattctcccactgaagaaaaatcctcttccgacgggtgccaaataaaaggaaatataaattcaaaaggcgaaaaaatttatcatgttcctgagggatcctactacgaaatgaccaaagcagaagaaatgttttgtacgaaaaacgaagcagaggaagctggtttccgtccatcttccaggtaataggctgcatcacgctttctctctctttaaacaaacacacataatttgttaccttctgtaccatcataggctagaggaggtagcgaaacgatgaaaataattttaagatctatgcttagcattctccaatctcacacagatagtgagcctaaatcaccgttacatgtcggtgaagtgatgaactgttggacagcttttgcgatttttaaagaagctcaagttttttatcgaatggcattaaatacaaccgaggatgaacaattaaagaaaaaaacacaggagatttttgatgcgtctgttaaagatcaaaataaattaaaacattttttaataaaagaaggcgttcctctcccaccaacatctcaagtaaagcctgattcatcctcagaaacgattccaatgggggtaaagctaacggatgatgaaattgcaaacgggatttcactgaagctggcctctgtgaatgtcctctgtgcaacgaccgtttctcagtccattcgaaccgatgttgggttaatgtttcttgagtttcaaacgcacatccttctgtttgctgcggattttaaaacgttaatggaaaagagaggatggctgaaatctccaccaccttatctaccccctggcgcgccaactcaaaagccgtagctgacaaagctacggcttttgtttaatcttattctacacggcttgctcaatctttttcccttgttgaagctgatacatttgaaagtaccttccttttttttgcatcaattgatcatgatcgcctcgctcaacgatttctccctgatgaagaacgagaatttgatctgcctctcttatcgttgagagtctgtgtgcaatgataaatgttgtacgcccctttttcaaaatatcgagagcgttttgaataatcatttccgtctcagtatcaacatttgaagtcgcttcatcaagtataaggacagcaggatcaaacgctaacgctcttgcaaatgagataagctgcctttgcccagaagaaagcgtgcttcctttttctataactggctcatcaaaaccgtttggaagggaacgaagcagctgatctgctccaacatcgtttaaagatttttctactttttctcttgaaatagacgggtcgtcaagactaacatttgatgcaatcgtgcctgtgaatagaaatggatcctggagtacaattgccatatgctgtctcagttcttgctttttaatatcctgaatgtttttcccatctatggatattgttcctttttgattatcataaaatcgaaataataaattcataatggagctttttcctgagcccgtgtgtccaacgagcgcaatggtttgcccttttttcgcttcaaaagaaagattctttaacacatattcatcttctttataagcaaaggaaacatgatcgaaagaaacattcccttcatatcgcgggtaaattccatctgctacatcttccccttcttcatcaagaagctcaaaaacgcggtctgcggcaaccaatgcctgctctagattcgcaagttgattgaccatgtttgtgacgggttgaaacaatcgatttaaatagtcgacgaaagcatagagaacgccaagacttactacggcacctgatgtaagagaagctcctccaaaataccaaatcaatgctacaaatgagatattccttaaaatgttaaccaggttatgagacattaaagaatttaaatgtaaaagcttgttttgatacgtaaagtggctatcatttaattcttcaaattcttgttctgtcatttgctggcgtttaaaagctctaatgattgacattccttgaatggattcgttaatcatagcattaatgtcactcactcttgtccggatcactttattaaattttgaagcgtatttgcgataaataataatccaaacaaacagaagtggaacaatggttaatgtaataaacgcaagctttacatccagtaagaacaaggcaacaaagatacctgtcatataaaagatacttgtgaaaaaagttgcgagtacggttacatatagctcgcgtatcgcctctgtatcattcgtaattcttgccactacttttccagctggcaaattatcaaagtagttgatgtgcaaacgctgaatttgcgcatagacatctgttctcatcttctgaatgattcggttagctgaagtttgcaaaagaagtccctgcccatattcaaaaaatgaagcgaagacgagaagtccgaagtataatgcaatgagccagatcatcggttcaatctgaggttgataaaaggcaagcagctcttcgttacttatttctgatgcttcataggactgttgttttccatccttttcgattgtgagcgtattttcgttaattgatctttcaccgtcgaaagcgatcggttcgtcaatgaagtaataatcacgcccgatttgaagaattcttgccttttctccttttgcttcattattttcaaaatgatcgcttcgcttataccatccaccatcatattgaacagcatcttccccctgatctgattcataccatggatactcaattccaagaatatgaacgtcgatcatccttttagcaatgaaaggaccagatagttccgctgtcacagcaactgttaaaagaagaagtgcaattaaaatatttttcttaaatccaagtgcatactttactaaacgctttcctacatgtcggttcatttacagcacctccttcagtgaatcttcaagttgctgtctgtcatattgctctcggtaccatcctttttgagtaagaagctcctcatgtgtaccttcttcaatgacttttccatcttctagaacaagaatacgatcagcatgctttacacctgaaagccgatgtgtggcaataagcgtcgttttaccagcacgttcacttcttatatttgcaagaatttgtgcctctgtttttccatccactgctgacatcgcatcatcaagaataagaatttccggatcaatcatgagagctctagcaatcgaaacccgctgtttttgcccgccagatagtgctacccccttttctcctacaagtgtttcaagcccttgaggaagaaggtggacatcttttttaaaatcagataaatggaggacatggtcgacatcttggtcagttccatctttcttaccaaaaagcaggttttctcttactgatcgagagaatagcatttgatcttgcggaacatatccaatccagctttgaagcgttccaagcgaaaactcttcgatcggtacatcagaaatttttattttcccttcccccactgggtattctctcaacaattgctttagcaaagtggtctttccgctaccagttcgcccaacgataccgagcgtttgaccttttttaagcgtaaatgaaacatcatttaaatttgtaactgaagaagttggatacgtaaactgaacatgttcaaagcaaatcgtaccaggagaatcgtgatgtttcggagcatgatgttccttaacatcttcttcgtgagataacgtatctaatacccgatttaatgaggcacttccgcgctgcatgacattaattagctcaccaaccgcaatcatcggccaaatcagcataccgagatacacgttaaatgacacgagttcgcctagtgtaagtactttgtgaaatacaagataagcaccatatcctaaaccaattaaataactcatccctacaagaactttaatcgttggttcaaaaagcacatctatctttgctacttcaatgttcttactataaacatcttctgttaagtttttaaatttttgctgatctgccctctcctgtacataagcccgcgtaacgcgcaccccagcgatcgattcaagtacttgatcattcatatgaccgaaagaatcctgcgcagcggtaaagcgcttatgaataacctttccataacggttcatggcaagagccattaacggaagaggcagaatagccgcaagtgtcagtttccagctaatcaaaacacccatcgtaaccaatataagaaacataaagatcgttgaatctaccaaagttaaaataccgaatcccgctgtaagcgacacggcttttaagtcatttgttgctcttgccatcaagtccccagtccggtttttctcgtaaaacgacggggtcattttcagaagatgtttcatgaatctggaccgaagcattctctcaactagaaatgccccgccaaatagttgatacatccatacatatgtgacgaggtagacgacaatcaataacgcgccataaaaaaataaataatttcgtaagctatcccacgttaaacttcctacattgatttcatcaatcgccattccaattaacttcggtggaattacctctagaatcccacctaaaatcaacaaaccaattgcaatagtgtagcgcttccaatgctgcttaaaaaaccagcttaacttgtgtaaaatcgagaacattcttttcccccccaatcttttccctaccattgtttcattaatcaaaagcaaccatcacttccaccaccctcaataggttaactccttatcaccatacttagaaattcaaaaagacatagccgtatgcggctatgtctcatcaattcattggacataaaaaagggcacacgtctaagacgcgtgccgattcctttttgtgacaaagggattacttccctggcaaagtgcgtctatgagtacatgaaattggttggattgtacctgttaaaacatgtctcatcacacacactctcctttaccgttatttttactttgtcatcttagcataattgtcacaattttgtcaatattattatttgcttaatggatttacactttcttcaccagttaattctgcaatcatttcaactaacaaatcaatttcttcctgtatgtcttttagacttaccgtttcaactggcgcatgcatatagcgaagcggcaaagatacgagcgagatcggcactccgtatcctgttaagcggagcttatcagcatcggttcctgtcattcttggtgttaattcatactgaagtttaagatcaagcttttttgcagctttttcgagcagctgattgattttaatattaattggagcacctttcgcaagaacagggccgtccccgagattaacctccgtgtgttttcttgcatcaatcccaggataatcagaagaaaatgtcacatcacaggcaatggccatcgttggctggattcctgcaccagcaaagtatgctccacccatatttgtttcttcgttcactgtactaactgcatatacacctactttaggatttcgcttagcgagttttcgtagaacttctgcgacaataaacgagcccgtgcgattatctagacctctaccactaattctgtcattcaataagtgctcaacttctcgtttatagacagctagatcccctatttgaacatacttttcgatctcttcttttgaagttgcaccacagtctatgtaaagatcttcgaaattgaattcttttgctccaccatgatgttcagcattcacgccaaatacccctgttaattttccatgcgtaccaagaatcgttactttcatgccgatagcaggtttatgactaataccacctaacttttccacacgaatgaagccgtcttgatcaattttctttaccataaatccaatttcatcacagtggccagcaagaagaactttaaattctgcattaggattaagaacgccaatggcatttcctgcattgtctgttttcatttcgtcagcaaattccttcacatagtccatccatttatgctgaatctccatttcagctcctgatggtgaagcagttgataacaattcaaataaaaattcctgattcatacgaagcacctccgaatagttgattagttcctttttcattgtatcttacagctagtcttcattctagttttggatgcaatggattcagttcaacacaaaaaaagcaccccggatttagacggggcacctcactatttcgattctttcaataaaatttcttccacttcttctttcgttggcagggcagtcatagcgccttttgttgcagctgctaaagcgccagaaacgctagcaaattgcgtcattcgctcgagctcttcacgcgatagttcagtaagagagccaacatattcgttaaaaccatgaagaatgcctgatacaaatgcatcgcccgcacctgtcgtatcaaccgcttttactttcatagcaggaactctgagtgaatagttaggagtaaaaacaagactaccttctccacccatcgtaatgaaaataactggaatacgataatgagctaattttttaattccagcttgcaccgtttcttcaccagtaatgaaggtcagttcttcttcagaaagttttagaatgtctgcctcagatagcatggaaacaatcgtttctcttgctcgatcctcactctcccatagaccaagtcgtaagttcggatcataggaaatgagcaatccattttcttttgccttttcaacagctttcttagtagctgttctagaaggttcactaatcatggaaatcgatccgaagtggagaatccgatgacgctcaaataactgttcgcttatttcttcttcacttaagaaacgatctgcacttggatttatgtaaaagtcaaagctacgttcaccattttcagcattcgtcacaaatacaacgcctgtgcgggcagattcagttagaatcatcgttgaaacatctacaccataattctttaacgtttcttgaagaaaacgtccaagcacatcatcgcctacttttccaagaaaagtggaatttacgcctagacgcgcaagcccaactgctacatttgctggagctccaccagggcttttttgatacgttaaattgtccttgtcaagaggtataaaatcaattaatgcttcccctaaactaatgacacctttactcatatctacttcctcctaagtctatcaattgtagagctgcaccaagggtacagcttttccgtaatcataccatggcaaggtaaaacactaaagaagaaaacgtcattaccccatgatcttcttgatgattttcagcccgtttttggctgatgggtatcggaaggcgaaatcaaacttcgtggtttgtttcacaatgctcttctcatgtgagaaagcttcaaagcttgctttcccatggtaactccccgtaccactagacccaacgccaccaaaaggtaaataaggagagacgatatgcataaatgtgtcgttcatacaccctccaccaaatgaaatggatgatgttatttcttcttgtttttgttcggattcagagaaaaagtaaagtgcgagcggttttggacggcgacgtacttcgtcaataaccgtttcaagttctgtaaattcaagcacaggtaaaataggaccaaaaatctcttcttgcataactggatcttcccatgaaacgttgtccataatcgttggagcaataacccgatcacttgctttatgctgtccaccaattaatacgtctccatcggctaaaaaactttttaaccggtcaaagtgacgatcacttacaatatgaccgtatatttcatctgatattggatcttctccgtagaattcaatcagcacattgttcatttgttcgatcaattccattttcacgtcactatggacatacaaatagtcaggtgcgatacaagtttgaccagcgttcatgaatttcccccacatgattcgttttgcagcaagagctaaattggcgtctttgtaaacaatcgccggactcttccctcccaattcaagcgtaacagggataagttgctttgcagccgcctccatcacaatctttcctacagcaacacttcctgtgaaaaagatgtgatcaaacggttgtttcaaaagttctttactcgtttcaacgccaccttcaataaccacaatgtacttttcaggaaaaacttctcgaatcattttactaataagagttgagacagtaggtgttaattctgatggttttaaaacggcacagtttcccgatgcgattgctccaataagtggagctaactgaagttgaaatggatagttccacggcgctatgattaacgttaccccgaacggctcacggtgaatgacgcttttagagccaaagtgagtaacgggtgactttactttctccggtgtcatccactcttttaaatgcttaagtgtgaacttaatttcttctagaaggaaaccaatttcagttgtataagcttcccactctgatttatgcaaatcatctttaagcgcttgtaagatctcaggttcatactctttaattacgtctcttaacgtttcaagctgtttttttctaaacgaataggattttgtttcccctgtataaaaatattctttttgcaggcttactttatcagaaatatgctccatcttatactctcctcttaacgactttattgttctttagtttaaacatttaaacataatatgtcaattttaaaactcttatataggtttatttctcccttattgaggggaaaacctgcataaaagcaattcctgtaatcaacactatacaaggatgcagttaagaaggaggcaatttactatcgaaacacttggtcatcatattatcgccgaaatgtggaattgtaacaaagaaaaactaaacgatttagtctatatagaagaaacattcgctagtgcggctcttgaagctggagcagaaataagagatgtcgtttttcatccatttgaacctcaaggtataagtggggcggttattatcgctgaatcccatctaaccatccacagtttccctgaacacggctatgcttctgttgatgtctatacatgcggagataaaattgatccttccgaagcagcgaatgcgatcgcaaggtcattagaagcaaaaaccattcacacagtgaaaatcccacgtggcgcaggagaaattaccgtaaaagaaatcgaaaaaagtggtgtggaatcacaataattgactgtagagaggcggttccatacgcctctctattatcgtttttaatgttgaatttataactttttataatgagaaagcgcaagtagtggccatatcacttcataactatgatatcttatataaaaccctcctggtaaccccgcccctgttggatacgtgcgttcttccatatcaaatgattttttgagaaggtaatccacacctctatttaatgattcacctgtttctttacaaacggataaagcatcaacggcccatgctgtttgtgatggcgtgctaaagtgtaaagggacgaatttctgttgaatatcactttgacacgactctccccatcccccatcatctctctgtattttcttaagaaactgtatcccttttcgaacaggagtaaaatcagatggatagccagctgcctttaaagccgttagcgctgcccatgtaccataaatgtaacaaatcccccatctccctctccaacaaccatcgctctcttgattccgaatcaaccagtttgttccctttctaatggaaggatgattacggtttagttcagcatagttacataaaaactcaacggttctaccagttaaatccgccgatgaatcatcaggaaaagatgaccttgccccgtcaatgggtaattcttttaatagaaaagcctgacgatccggttcgaaagctggccaacctccatcatgattttgcatggctagaagccaactgactccgtcatgccaacgacttgactcatttttcatatccttcaacgctcttaacgcaacggttgtatcgtctacatctggatgagttgtattcccctcagaaaacccccatccagcaggggcaataccctctcttgtaatcgcccaatccccatactttgtctgctgatgtctaactaaataatggttagccgctctagttgatcgtactgcatgcactataccagcttcttgtaacgtataggacagaagggcagtatcccagattgttgaaggtgaattttgaagatgggaattagaatcacagagcattcctttcagtccattaaaggcacgtaaaatagaaggagcgtgtttttcatatccaagagccaacatcgcatagatcataaaaatagtagccgttgcatagttcagtaatgtcccatctgcttctattctttgaagcatatattgttccgctctctttcttgctttatatagctggtttgatggaaattgacttatagcagtccatgcttgtttaatatcttctttcatggatcgatcttccataattaaatgagtgagatctggcgtccattttgttttaatagaataacgaaggtcctggcacagaaggattggcgcgaaatgcgctcttgcataagaacttaaatcatagaaagaaactggtgatgccttcgggataagtagaaaaagcatcggaatgtggaataagtgaggccaatttagatgaccgtttaaagcgagaaaaatggacgtcatcgaatcaaccttttcgatcccaccccattttttaatatagtgctctgcttttttcatctcgctatgtttacaagtcatcgttcctgaatacagaagactatggtaagccagaacggtagcggaaagattccctcgatcatcttcatataatttccagtatccttctttagattgtttaaatagaagtcgtttcacaagagcatcaagcagcgatttctccggaagcttaagcatgcgtatcaatacaatcatcatcgcatcagttaataaactattctcaaaacaaaagtgaaaggcaccagtcccatgttgatgccttaatgcctcacttattaggtcatctattttttcatccactttcttttctaccatggcgctccctccttaagtaggctaccgtattgtattcaccctacctttcggagattctcactaataactattgtaaattttttgaaacttgtgtaaaattcaaacgtatgtaaggaacaaggaggaatagaatgaaaaaaatagggttccccattctcactggttttatcattttacttttagtttatcttcatcagctctccattcttcaagagaaaccggcaacggattggagcaggtcagtcaatcttgacgtggctgcagaagatagcgagatgtttgttcaacgtgagggagatagcggcactctcttttttagcggtgatcccgttcgaaaagtggtcgtgaacgaacagttggatacaacgacagaagaactcagctactccattccagacggctattcgttttatgttgatgatcagcaagcgatttacaagaagaatgatgaattaatttacgaaacagatggaaaagaaacagccattttaaaggaaattgaaggaatgaacgtatcagaaaatggcgtaattgcttggtcacggcacaccgcatacaccatttcaccagaaggaaaagttaagtcagaaaccgaactacctcaatacataaaaagcggtactttaacggaaaaaggtttggcatttctttatgttcaaacggatgatgtgaaccagtttctaacacttgatgccggtaaagacccggttgttctatatgagactccacttacatcaggagaaatttacagtaaccttcaaatgatcgaactcgataacaaacttacgttcacctataccattagtgcaacgagacagggtacacgagttgtgaatacgtactttggagaaagtgttgctggtaaagaagcagacgttcagcttttgaaaatccaaaatgcggaaactgatgacagctttgagaagccaaactacttttcattaatcgaaaaagacggtgcggcacaccttttgtttagcgcgaatggagaaatttcaccaaaacgttccgtcattagtatctatgaagcgtcacaacaagatggggagtggattgcctctcgccggagtacgacagaagagttatccatccgccccattgcaattaccgatcagtctttagtctggatggatcaagagaaaaatgaactcgtcttacacggcgcatcaacggatcctaccgttgtgaaaagcagtagctccatatcgagcgatgatttaacttatgctctttactatacgttcacagcaatagtcggtatgtttgcgatgttagccttctcatttggttttctcatccttcctgccgtcgcattaatgtacttctatttcgccaatacaacagcaattgaacaagacaaaaaatgggttgaatggacgatcattcttttatgtgtcgcttctcaaattattttccttccatctattcttgatggaccatttcaatatctcgctccatcttacctaaccttttcaggagctgcatacgtttggccactaattatctttgttgtatcttatatgattagccgcgttgctcaagatcaagaatggaccatcatgcagcgaacctcctatcagcttggattaaatctcggcatgttgatctttctattaggaccttatattctctaacgaatgaaaaagcatgtcctctggccagaggacatgcttttttactttgcttgttctgaagctttatgatttacagctagtaccgccttgtgtaaaagttgactaaattcagctttttctagaacttcaagtcctgcagctgtagcgccacctggcgttgtgacttgatctcgaagatctcctgccttccgcccatctttaagcatcgaagctgaaccaaagatcatttgcatgacgagctttctcgctacttccgatgataaaccataggattgcgccgtcttttctaacgcctcagcgagttggtaaacaaaagcaggtgcgctccccgtaaccgctgttaggtcatgaatctgttcttctgataactcttccgattcgccaattgcatctagaatcgtttgaagtacgactcgatgttcttcccttacatcttttccgcaagtaaaaagtgacattgactcgccaatatcggctgccgtgtttggcataatccatgctgttggaagcccaggtaaagatgcttctaagacagaaggtccaataccagccgctaccgtaataacaaattgtcccgatactttagtagaaagttccttaagcacatcaggatgagctgatggaggcatcgctagaatcacaacatcatgattcgaaagcacatcttgccacacatcggtctctacgttatacgtttctttcaaatgagctaatctcgtttgatcagactgatttgaaatcgtaattttaccaattgtatccgattgtttaagtccagaaaaaatagcctcggccattcgtcctgccccaataaacaagatattcggtttattcaacataacccctcctcaatttccttctttactatatcaaaaggtacctaaatagaaaaacgccggctaatcgccggcgtttaccagaacttatatccaggagaacctggtggagcgtgttcaatcatatgaatcactggtacggtatatgccacaaggataagcacagttgcgataccaagccacaaccgccaattttctaaaatgactggtgttttctcggccgcctctgccacctctccgatcggaaagtcttctttgccttttggagcgaaaaaagctagagctgtcataatatacattaagagtaaaatagcaataaagagaatggaaccaccaacggccattgttacttcataaggaatccatcctagtgcatcaggatgatcctggtatgtcgtataagctgttcttctcggtgcaccaagcaaaccaactgtatgcatagctcctgacataaagaacatgccaatcgcccataggatcgtttgtagatttgcaatttgatgcattcttcctgttagtacgcgaccggtaagatgtgggataagccaataggctattccaaaaaacgtaagcgcaacactcgaagcaacagtaagatggaaatgccctgtaacccacagcgtattatgaacaatctggttcatttggttactagcattaatgattcctcctgcacctgcaggaatgaaaatgagcataccaaccatcggtgcaaagaatcttgcatccttccatggtaacgcacgaaaccaaccaaataatccttttgctccttttttccgtcctgctatttcaaaagtagcaaacaatgaaaaggcagtcatcagagaaggaacgataaccatgaacgttaatacgacctgcaaatacttccaaaacggagaaattcctgattcaagtaactgatgatggaagccaacaggtatagaaaacagtaagaagagcacgaaagataaacgagctaaagagtcactgaaaatctttcctccaataatttctggaataatgacataccagcacacataagcaggtaaaagccagaaatacacaagtgggtgaccaaaataccagaaaagcgtacgacttagtagaatgttaatttcatcaacccatccaaatgaccatggaatgaattgaaagataacggaaacggcaacaccaatcgtagcgacaaaccacaagaccattgtcataacagccataaagctaaacaaaggagaaatgttcttatgagttacctttttccagatgtaatattgatgacacatcgcgccgcctgctaaccaggtaccaacaataaataacgtaaggccaatatagaaccacggcgaagcttttaaaggtgcgtaaaaggtataaagaactgtcccttcatttaaaagaaccatcactgttgtaagcgccgttccaaccgtcattacaatgtaaccaagccatcccatccgataaggttggtcatagaatttacccattgttctgctcatgccggcatagaaaaaaccaataataaaataagttgtaaatacaagtgcaagtaaaatgccgtgagccgtcaacagctggtaatagcctattcctgcaggaagttgaatcgtcccacttcttacaagtgtttgtaaaagtcctgcaatcccccctaaaagaacggctgcaaaagcgatatacagatgagccatactaagccttgcatcacttcgatcgactactaattcattcatcattttatcacctccagtggcacacccatcgcctggtgaccaaccccacaatattcattacataaaatgagaaactgtccctcttcatcaaacgtatgtgtaatggtattgatatgacctggtgtaatcatcatattcacattcgttttcggaatttgaaatccgtgtaccacatctttacttgttactttgaaatggacagttgccccttcaggtatttttatttcatcgttcgattgaaatgtgaacgcttgagcaactagcaccaattcatattcattctcaccgattttttttaagcctggatcatcgaaaggtgccgttaaatcgacttgagttggatcaagaatctcgctatcacttggcggtgtatgacccatcgcgaaagcgttcacaccaattaccaataaaaaaacaatcagtgatccacttccaatcatgagccatagcctttctaatttgtgcatgtgcatgctatttccccctctctatagacgaatcatatatagccagtagacgctaaaccaggacaggacaataaaccccccaagcaacatgacagcaatcatcgttcctttcaggtttggtccttcctttgtcgtaacgacttttcgcaccgttttctttttctcctcaagaacccccattgttcctcctcctttgtatgctcggtatagatttagtttaggagaataaaaaggtttattctgtgactttactcacaaaacagtgggaggttttggtttggacaataaaatttgaatttggacaatatagtttgtttttagccaataaactaagattttggacaaaataatgtttttttggccaataaaaacagcaaaaaaagagttcaggacaactgctcctgaactttttataaccgacatatgtttttaggacagccttcacaatgacaaatcgcttttagctgttcaagatcttcaatcatgatagtgccattttcataggcaatgatgttatccttctttaactgatttaacattcgattgaccgtttcgcgcgtggcgccaattaaatcagcaatttccgtgttcgtgaactttgtggtcattcgaatggtatttccttcttcaataccataagtgtttgcgattcgaatcaatgttgaggcaagagctccgtgcttcccaaaaaacattaaatcacgaagtttcgtttgcgtaaaacgctgcatataccccatccatttcataaattcaactgcaagatcaccgttttgccagaggattgtttcaaggtctttttgttggatgacgccaagactgcaatccgtcattgcttctgcactaaagctattaagaacgtggctgtcatctccaatttccccaaaaagatcgcctgcctggaagtggtagagaacaaggtccttcccctcatctgaacttttcgtaagtttcactgctccactttttaaataataaagatgattgcagtcgtttccttcccagtagatcttttcaccacatttcacctgctgttcatacattaactcttctaatttcacaaaattttgattagaaaaagactgtgtgttgtaactccctttattcatcatcgtaactggacatgtaaccttcatcgatttccctcctagaacccttctgttgctttcattataagagttcacttctaattcaggtgtgataaacatcacatctcgcccattttattaaaaaagatgtgacattccttacagtctacttttcaaataccggttacatttaaactaacaaacgaattggaaggtgaagaacatgctaacaggagttattttagccgggggaccaaatgattatatctacggtcgccacagatcccttctaccacatcatagcgaaccacttattcagtttcagattaaagaaatgcgtaaaatcgttgatgaaatgattgtcgtaacaaatacacctagagacttactgcccttcgtaccagcagacacacgcatcattacagatttttttcaaaacaaaggtcctctaggtggtttacatgccgggctttcacttgctagaacggatgtcatatgggtaatcgaatcagataatcttgccccgtctactcgcgtcgcaagtagattgataaagaacttattgaaatttgatgtcgatggtgctcttcctgtctttaatggggttctaaaaccatttgaaggagtttataggacaagcacaaaaacatgcctaacgggtttgcttcaagcgggaaataccaccacttccacttttctaaaaagcattaatacttcttcagtagtcattcaacccgatatgctctccctcaaatagacatggcaaatttgccatgtctatttgaatagttcctctctctttttcaatgaaccccctgtacaccaaactactggtccttttttaattcacatgcttttcttatgaaaaggtggtacgatagcgatgataacgctttaagataacttacatatggatataggtgaaaacaatgaaaagaatatcactattactcatcgtccttttgatttctgttggaggtcccgtcttttggctatccagtcaaaaggaagatccaaagaacgcctcagacctccttgcttatcgaaacgtaacacagcattctaatgatagtacacttgaaacttctactttaacacttgcagcaattggagatatcttaatccacgatcgcgtctacgaaaaagcagttgaagcggggaagtataattttaatccgatgcttcaaaacgtacaaaatcaattacaagacgcagacataaccattgccaatcaagaaacggtaataggtggaacctcaattggcctttcttcctatccttcttttaacagtccaactgaagttggtgatgccttaaaaatgtccggagtcgatatcgtctcaatggcgaacaatcatacattagaccgaggagaaaaggccatccaaaatgcgattcagcattggaaaaaaatcggtatactttatacaggaagctacttatccaaagaagataggaatcaaattcgaacgatcgaacataatggcatttcgttagcttttctttcttatacttatggaacgaacggtatacgtcctcccgctaataagccgcacctcgttaactacattgataaaaacgttatgaaacaagatatacaaaatgccaaaaaacaagcagatggtgtcgttgtaagcgtacattttggaactgaatatgaacgctacccaaataatacacaattggagctaagttcatttctagccgaggcaggagctgaccttattttgggccatcaccctcacgtgcttcaaccacttgaatggattgaaacaaaagacaatcgagacgtactcgttgcttattcacttggtaacttttggtcaggccagaagggtgattacaaagatatcggtggcattttgaaagtggagtttgccaaagagcaatttagaggagaaacgacgttttctgtcatctctccctccttcataccaacgtttgttgatcggaactatcacgttcacccgcttatagaagccaagcctgagcgactagagggaataaacgatcatatgagaaaatggatcccaagcctaaaagtccctaaactctaaaaaaacagaactactctcgttagaatgacgacctaacgagagtagttctgttgttggtttttttacgaaagcgtgtacccaccatctacgatgagattgtgcccattaatataacttgaatcctcgctagataaaaagtatacggctttggcaatttcaagcgagcccaatagctcttcgctacttcgctctaagctttcaccgcgctcttttgagcgtccaagcccaagaacactagctccttttcctgcaaaatagcgcgatgtttcctgcccaattcctgatgttgcaccagtaacaatcacaactttatctatatgaaccatcccttctttctttcttacattaagcgtaatagaagaaggggcacggtcctaatttgaatcggtttttaatgtgtattgtaaaaaatagtcagaagctgaaaacttctgactatttaggagtttcactactatctgctataccatttataaatccgtccaaatcacacaactgattcacagacggagaaagggccaatttctctaatatccccgcataatactcctggtttgaatcatcgattaatgtcgctaacgcggatcggatcacttctgcttctcggtgagtaatgttcacatgcattcctcctctaattgtttttcttattttctccttcaatcatcataatcatgtggttttttgccagaataacaatgaggtgaagaaaatgaataagggtatgaacctagcactttcagcaattgtccttgcacaaggactaaaaatactgacacacaaagcaacatcaggcaagtgggattggcgacccctccttcaaacaggaggaatgcctagttctcattctgcaggtgtgtcagcactagctacttacacagctttaaaaacaggaaaagactcgattgagacttctcttgcggttgtttttggagtcattgtcatgtacgatgctcaaggaattagacgacacacaggtgagatcgctcggcttgttaatgaccttgatgaagattttgagctcttatcaggacattaccccgatctgtttcatccaaggcgcgatgtagaactgaatgaattacttggtcatcagcccgcagaggtaggcgggggtgccttactcggcatagcacttggatttttcggatacttttcaaaaaaataacagtattgcatttgacatatctaatctagcgtgtataatgtgtagttggggtatcaataaacccgatattaacaactagctcctttaaaataaggagaactaaaattcataactggaaaggtatgaacagcatgattctaattggcttgtatcaagttaatggccatactacaattgctgttgatcctcctcactcacactggcgcggcttcggagccgtaaggatggaagagaggtagggctttcgttgtttgagagatcaacagatctctatggtatgtttaccgcggcaatgaaggagttactgttaataaataacgatcgttatatataatgaaagagcgcatcaaatcgatgcgctctttgtcaattttatggagaaattttctcatttttttgtgcgatgatatccgctatgacaccaccagtataaagaatagatgaaataatgccacttatgccaaatgctccaatcccaatcagccaacgcattggataaggctcttcaatcgtggcgtaattcgggaagttttctccaagcgtaatgccaataaagagcgcggcgatgattcctgtaagtaatgtatacactgccattcttctaagtaagtatccattcatacccgatccctccctcttgcttgcttattccctctcatgatccaataaaacataaagagacgtaagaaaagaaggcaaacgaaaaagagatggttagcgttatgagaaaatgacgactatgttaaaataaagataacttgatgaaatagcatagagtggctaaaacgaatatttatcctgtcttgcaggtttaacgtatatgataataaaggagtaacaatatgacaatgtttaatcaacacccatttctttcggaaaactggcaagctgccggttttacaaatttctcagatgtccaagaacaggcaattcctcgtatcttgaacggcgaggatttacttgttgaagcacccactggtaccggaaagacgctagcttaccttttacctattatgcagaagcttgatccgaccaagaaaaacacacaggcgatcgtacttgcgccaactcgggaacttgccatgcaagttttcgaagtcgctcaaaagtttttaaaaggtagtgaaatgacagctgcttcgatgatcgggggagctgcgattaaacgccaattagacaagctcaaaaaacacccgcaactaattgttgggacgccgaaccgagttgctgaattgattgatatgaaaaaacttaagatgaatgaagttattagcatcgtagccgatgaagccgatcaggtgctacacccttctacaatggaagatgtttcttacatctgtcaatctgcccttagagactgccagcttcttttcttctcagctactcttagtgataaagtactcatgcaagcgaaaaagctttctgataatccatcagtattaagcattaaagcaactgctgaagcgaagaaagccattgatcacagctattacgtaaccaaccgtcgcgaaaaaccagaactacttcgaaagcttgcacgtaaagatggtgttaaagctctagcttttgttaacaatagcaattatctttcccgtttaaaggacattcttgcaactaaaaagatttcattcgatgtattggatagttccactaacaagactgaaagaaaaaatgttctaaatcgttttcgaaacgatcaaattcaacttttgttaacgactgaccttgctgcaagaggtttggatattgataacattacccatgtattccactacgatttatctgaggacgcaagaacttatcttcatcgttcaggaagaacaggacgaatggggaaagaaggatccgttgtcactctactacttcctggtgaagagaaataccttgagaaaatcacccaaaaactagatcttgaattaacaagaaagaatgcgccagctcctaaatctcggaagcgtaaataacgctttactacgtaatctaaaaaagctgctcttcatcacttattgatgaagagcagctttttgaatacaaagtttctcaatctccattaaacatatcaaagagtccttttgccatactaccttcccctttactaccacctggcgtttgtggcattgcagcaaacacgcgacttgctaagcgactaaacggaagcgattgaacccaaaccgttcctgtgcctctaagggttgcaaaaaacaacccctctcttatactaccttattaattgtccaccctcaagaaactatgtattatatagttttatcttctaatatcatttggacacattttattgattttaacagtttgaaatgaatagccttaactactgtaaatgatatttcgaatgattcttataaattattttggacactttctgactcttaaattgtatttgacaattatttattgctgcttatggcattaggtttagtaaatgaaagaagagcctaaactacacaagaaatgaataaaaacttgcatattttggctctttgattatattccataatgaattagctatgttaaaggtcattgttgataattgaactgaaaaaaggggaacccgtaacagcgggggttcccttaggtattcaacaatcgctccgagattgcggaacaaagcaatttcaatctcagtttgatattttatttaaccaagttaataaatcgtttatcatttctgaagtaaattcatggttaacatttttatgaacattgaaatccacatttcttcttttttcaacatcttttaagtaacgatagtaatcttgttgtccctctattggtataatttcatcactttctccgtgaataagaagaattggcgatccacaattcactctctctatagggtcatattccattagtgtgtttttcagttctacagagatgtcttctctattatctctagctctaaaaagtttttctgacaatataaatgaacctgacccatttatatttgctaatccgcacaactttggttcacgagcgaaaattccatttgctataaatccgcccatagaactgcctataaggaatacatcttttttatttatttctaatgcagaaataaaatcattaaattcatcaatacttttaaatatagtatcccaaaaataatctcgcattgttttttggtcaaagtgtttttctaatggctgtcttgtatcatgaaaaatgatttcaggaactatgatcctaaaaccctcttttgataattcctctgccagttccttgtacccctcagctgttcctccccagccgtgatatatgattaatactttttcacattcatttactttattaaattcaaagcaataatacctgaacttatctataatcttcctctgcacaaccattctcccttaaagttttttatgtaataacaaaactgtaattaccacacagctggtccacaatcctgtacaagttctcaataccaattatttcaaattagttcaaataactcaatcctttatttaacattaagaagagcctatcttattacagataagctccgagtttgtttaataatttttatccaaaagtagtagtaaatagctgcttcctaaaagaagaaatgcaatttgagttacagcgtaaactgttaactcaactggattcagcttcctttcccgtttgattttcttaaaatgaaaataataataaattgcacatatgagcaacacaactcctgatacttgaaatataatctctaatataccaatcacaaatatcacctctagtagatttcccgattgttgtttgaacagaaactaccttcttaaaaatcctgctctactcgtcaataccaattatttcaaaatacttctaataaatccatatttcatttcacaataaggagcctatcttattaaagataagctccgatgataacggaataaactgtacactacaagaattctaagatgttctcttttattggaacatagaacgaaattaataaggttttctgttgatagtatattcctaatcaatcgaacgaattaaacgaatgctttaaagcgagtttgattgtaataatgtactattctccaaagaataaataaaacaccagaaatcgcgaagaaaatataataaaaaggttcatatttcaaaaagtcataatttgcatattcccactcaacataccaagtattgtctccagcgacaccttgtctcatcaaaccagactctccaataccttcatgcccctgaaggaataactttttgctggtattatctcctacttcttcagtatttttaacaacggcaaaataactaatattattaaagatttctgagttccgttccaccatatcttttagcgctcttttatcatcagcatttaattcacctttgttttcataggtttttactacgtgagacatcaaatcagaagtttctctgtatgtattatctttcatagttaaactaattgaaacgactaaaccaatcaacaaaatgacaatagcagaacgcattaaccattttgcaaacttattttgatactgaaaaatggttagtaatcctttggtaatttgcttttcatctccaaatctctctaacgcaattgaaatcgcttcttgctctgattttccttctaactttaattcctcaacagcttccactatatgtgaacgcatttcttgttttaactctttagcttctttgccacttacattcgcatagatcgaattaacaaattcatcaatttgcttcatttttcttctcctccttctaaaaatgaatcaataatactttttacaaaatgccattctttacgtttttcttggtaacctgctttacccagagttgtaagtttataatattttcttcttccacctggaccttgttcatcaccccagtacgaagagatccatttatttttttctaatcgttttaatgaaagatagagtgttccctcttttaattcaaactgctcttcgctttttaacctaacttgtttcgctagctcatagccatacatatctctaatacatagcaacgataggatcagggtatctatatgccctttcaaaacttctttgttaatttccatctgttcacctcctatactaatttagaatagattacctaataatgcaaggtattatattaataaattattgaaaaggaggtaattcctaaatgtggaattacctccgattaatgaagatcaatctgatatgtttaagctactataattattctagaattgctccgagattgtggaagagttggtttgaaaatgaatttaggaatttgcgtctaatttatttatctaatattgagtcgaagctgctatctactcttttaagataaggctttatataacttcgatattcatcagttaaaccctcaggcaaattgtttaggttgaaatactctacttctatagactcagaattatcgatctcaaagtttccgttcacttctttagtaagataaacagctgttacggaatataactcatcaccattggaaactttcacgtaatattcttgaccagagaaaacatctaacaattcaaggtcaccaactttaagtcctgtttcttcttttacttctctcctagctgtatcttgaaggctttcaccaagctccattaatccaccaggcaaaccccaacctccatcagtccggtgttgaagcaataactctcccttttcattaataattaagaccactgcgcctgttaatataagtggcttatgaccaactaaacgtcttatatcttttacataatccattctagaacacctttcaagttagaattagataagcaagtctaatagacttagttctccattttaaagaagaaactaatcctcttattgaatgattgctccgagataattgaattagcttatcccgagtagtctaataactcttgcaatattttctgcagagaagattttaaatcattattcttgagatcatataatgttcctgtgccctttttatattccccaaagtaataccaaagttccaatgtctcggcatagaactcttcattaagttttggaccatcataatcgatgactatttgagaacggtattctttctccaaacatctttcataagttagtttctctaattcatcgccatcaatgtccctggcgacccataatttaaggttcttctttcctctttcatcaaaacatttcacataatctctttgcaaatccgtacataatttaattgccaactgctctaattcaatgatgttcttttttaattcttcacttatatcactttgagggacttctacataactattttcgatattagattctttttctgtatttctaattcttcgaaacaagtttctcaccctatttcaaacaaaatatacaactgttattcaattaaactgcttagacatttaataccaattatttcaaatcattcagaacaactcaaccttttatttcatattaaaaaagtctatcctattacagaaacgctccgatttaactgaatatcagctagcaggtgctagctgatattttaaagaattatgcagataattcctcatttaattatttcaccatctttattactaacataaattttatatgagtcaattttagacacggattcaagttcttcagacttcagtattccatcaactgtttcctctatgtcatttttcaaagtctcagcatcttcatcagaactctctatggatgtttggatcgttactgattcttgataattagtttgaatatcacccacgatcacgttaccttttaatccttccattacctccattgtaattagagatatttccctatttatactctctgggtcaacaacttgtttattatcaggcaaaactgctttttcttcagcgttggaattaaatataaaatacgcacaaatagctatacagacaattacaccaagaccaatgatactttttttcaaaattgaacacctcctattagagggtatgtccagttataaactctatgttaatttttgttattctacaatcctgcctaaaaattatatatagcgcttacttttattagacagacgctccaatcttctggagcaaggattgaaatccttgccattaattcatttttttcaagtttaaaactcgtgagcctcgtatctataacaatcagttatataaggcatatatgaatctggcactaattctctacaatagtcttccataatgaccttacgactcccgtcttctaaaatagtattatgctctcctctcttgtttcggctactgtcgtaaagatagtaaattagttctccattaaattgaaattcagtaataatagcctcattatttgaagaaaattgaacaaatcgaatgaagtctggttttttttgtttaacattttccataaatttattgattttacttcgctgagtagcggttatatttgttggggttatatcaccattatttatagcatcttctttcgtatatgtactagaggtcttattcgttttcttttccccaaagttgttaatttgagactcaaatgtactactacgtttttcataggaatcttctgataaagataaagtccctttttcttcaaagttggaattaaaaacaaaatatgcaccaatagatatacaaaaaattataacaagaccaatgattttcttcttcaaattggacacctcctattagagaatatgtccaattattaactctatgttaatttttgttattccacaatcctgcccgttagttgaacaagctttgaatagtttgttgaataaaaacatctcaatatacattaaaagcgtctgatttaagatgtcaacaacaatgatgatcccttgggacggggctgcacttaattgtttactgacttaactgtaacaacatttccatgtttttgtcgcaatctcctaagttctaattctatttcatttatttttttaacatgctgggcacgttccaagcctaataattcatttttttcagaaagatgattaacctcagtttgtaactgttggttgtgaactttcaagttgttaaattctatttggtcaataatagccttatctagaaaaccctcaagatctgcgatccgttcctttgccttttcttgtttgttttttgaaagaagatcttgcttttcaatatcttctatacgtttttgaatatataaaagaagcgtattctttttttgaccataaaccgtacttttggaaatacctgtagcctcacatattccacgaatactgaagttaatagaatttatttcttttagcgctttatagaggcgttcttcgttttggagaaagtattgttcgagcgtagtaatctgctcttgtgttttttcgttataactatttaattcattaaaatgaaattttgttaaatgttccttcgtagaagctataatgttttctcgttccatttttgcacttccttttcaatatcacttaaactccctgtgatttctgatagcttggggaatttgttatgaactccttcatttccaatttcatctaattcatctttaagcaacattaactcaggattcaactttcgttcgatatactttttaataccttttaattctctttcatattcgttacgatacttttggtttttcttgtacaatttttcattgtatttaatgatactagacttttcctgaaatctttttatcgagtagggtaaatcatctaacgaatgaatttgaacaccaagataataagcatcgttaatacttgatatatattcatttcgttcgcaaagtttgttaaatgacttcgcacatatacctaattccatatcagaaatcgggttaccagttattgtgagtttatctatgattttatttatatcagtgaagatattaagtttgtttttatttaaaaacctattgatcttgtcgtaaatttcttgatattgattagattgaagttcttctcttatatatttgtcagatgcttcatttacatcggttattagcgatgaaccgtccttcgatgctcttttctctaacgtttcgacagagtttatatttaatttctccgtctcttcaattcgaatataatgtttagtcatatcttcagataaatgattcatatgttgccgaatgaagtctaaatcatatccctgattgtaaaggttagtagtaagtacgacccgatattgatgaaaagtaatataatatatatctatatccatttcatcatctggaacaaaccataacgatttgaaattcctctttcttgtaacagcgaattgccttatttcatggtcagtaattttatcgagctgcaattcatttttatgtcgataaaagaattctactaaccgaacacgtaagagtgattttgaaacatttgttcctttttcgctagtgaataagtatttggacttccttctatctttgtatatctcactaagagttctataagcaagtagggcgttttttgtaataaaacttctggtccatttgaaaccatatctttcattcgtagttttgtaagtcagaaagttgagaaagtgaaagacttcctgttcacccttaacacataaatcatccaacttacctacttccaaaattctaaattccccaatacgcattcctgtttctgctaatattacaatcatacaagcagccgcacgttgagtggtccgtaaatccttattgcgtaaatcccgaatagcgagcgaaactactttgtcgtgaatatccttaggaacaaatttatgctttcctttttctctttcagctttcacttttcttttattaatttcattaagatatttatagcaggcagaaaaattcacacctgatactctaagctctatttccgatagaaactgtttaatagcctgttttttttggtataggtcacgttcggatggaactccagctaaaaattctttaagaaaaggagtatcaattaggtttggatagaacatttgatgtttagacaaataattaatgaaatgaaaaatgattctatattttggttttacagtagtgaaacgattatgattattaaataaatctcttaaaaccatgtatttagcataatttttaaatgttgcatttaattgggtgaaattgtaatcgtacgcccaatcctctcctgaaaatcttttgaattcgtcaaatacccacacattatccgcaaattttatattaggagttatagaaaagtccacaaaagttttgggttttatatcgacaagttctgctcgcacgttttcataagtaggcaaaacctttatggaatcaaacgtctgcaacatcttgtttacctccaatcctttttattagctcaacataataagctgtatataatttaagctcaacatctatctcccttcgttcttggttatttaatgtactctctttttgctttttaagccttgttatacggttcttaaataaaggtattctgttaccggtagtggcaaaatgagtgcagataaggcatttgtattcttcatcgtcttctacacaaccttttagtttacatccaccaagtccatcttctacaggatttaactgttcaatatctttttcttctaagatgttgccataaacgtcaactcccgatatagttacccccgcaaacatttcagcatattcttgagcttctgttgttttacgataatactttctagcagtttgaacaccattaccagccatttcagcgattacagaagttggtatgttatcttttattccttcaatatataaattatctataaaagttgcccgaagatcataaggacggtatctgccctcaagttgttcttctagctccctttgaatctttgaaaaagtattaacaaactggtagacaaactgtattattctatcttttttccaatgatcttcttttacaaagatgtattttgcaatatcttcactagctttgttatgcgcatcttcagtaaggcgtatagcctcttcaataaggtttattttttcaattggtagagttaacttaaccttttggttgccagttacttttgaatgatatttaattacgtaagtttgtttagatttttctttaatacagtctctttctaaagctaatatttcccctaagcgaatttttgttgttgcggacaaattaaagattatataacaaagttctcccataacactttgggatctttgttcttgaaatttttttgaaaataaatcaatatcgcgtttagtcatagggttgccgccattataatctttaggcttttgagtaagtgagtcaattaacagttttgggatttgatatttgtctttaaagaattttaaatagcttttacaactcttaatataattatttcttgtagaagtttttttaatacttatacagtattcccattgttccaacaattccgcatctacaagattgccatttatgatattgatttgattatagctatagataaaattaagaaattcaatgatcatatatatacggtttgcagctgtgctcactgaggaactagaatttttccaaacaaaacgttttaaatcttcaccgaaagaattatctttaatttctgtaaaatcaattccatacggtttatttttttttatacttgcgtacccatcagtaggtatcagttgccatctattttcaagtggtacatcttcaaaaggattatgaaccaataaactatatcctctttcataatatgaactaaaaaaattgctacctaatacgttttcattgtagaatgtaccatcaaagatattgtgttggatgttttgttcttttatatgcttacaaagataaatataaaaatggattaggaaaacagtaaacttggaacgtggatgatcggatatattcgcgatatttgcctttctataaaaacgatactgttttttaaagacttcaaaagtaaaatcagtaatggattgcggctcattttccatagccaacaaactgtactgaaatagatataaaaattgtcttaactcattaatttttcttgaattctcactttggtaatatcctaaaagtaaatgttttatctcagtgtttgagatgtttagattaagtgttaagtaattcccctttttctctgtcttaataaagtacaattgttctagtgagctataaagggggaagttagttccaactctatctctccaatactcactcatttgagagggatgtttacggtcttccgagataataaaacctatatgttccttgagttctgaaatacctttaatattcgtatgttcaattgagtaatgaaataattcacacaatatttctcttgctataaatcgcacacgattttcaccatctagattacgaatgcacttcatactcaaacaatactgtgaccaacatatgttttctattgtatagtcctcaaagatgctaaaaaaatattttttcatgaaagtgtaaaaggctgtacgaagttgctttgtaaaatgtttttgagaacaatattcctcataaaaatttaaacacaaggacttaaattctttgtcttttagacgaaattctatttcctgtttaaatgtcattattacatcatcatttaatttgtatgtttttactgcctttttagctattgtcatagctttaaacctctcttagttaattcatcctgctttatagcgaaatcaacctgatcatcttcagtagggttaaaatacttattcacacttctcgtatttgtatgacgcaaaacgtgtgctaactcaagctcacgatatccttcatgtaacactttatacatagcaaaaccgtgacggaaacggtggctcaaattgtcctttttagttcctttatcaatttctataccaacttctttaaaaatcttctttacaatcttattccatgaaccacctgctattggcgtatagtttttactaataaaaatgtatgcatttctatcaatatcttcccttttactaactttatctgctatgtttttctttgagtagttttcataagctttattactcatagaaaaaggagaggttgtttcatctatatattcttgtatcaaatcaaatgttgaagttgtgataggaataacttgaaaaccatcaccttcaacatagtagccacttttatcgtagtcattacgagatgtaatcttcatacatccttttacacgttgccagggtttatctgtaaaacgattttttaatataaatctacattttccttttttctttgttacattctcaccttgaatgtcctccaaagttaaacctaaaacctcaccaattctaagtccatattcatacatcaatttaataataatattatctctaagtgtaaatttttccccaattagtttctgaatagcctcatactcggtgtatcttatatattttggaactacatttctattaacttcctttaagttcattgagtatgtttgaacttctaatgctgattcattagagttaaaagcactaccattcgtgatccttttcatgccacttgtctcttcgaatatattgttctttaattttaaataacgatagaaacttctatatactcctaaataattatttacagtatcattctttcttttggtcttaaagttataagatatatatcttccactaccttgtgaaccttgtaagaaaactcttaatctatttttgtcatctacatctaaatattttatatctgtgttaaaaagttcaatgtatgagtagagtaattttaaagcttgaagtgattgttgccttttactatatccctcattggctaattcttcatttaaatatttgaatgtatcaaaataaactttcccatatgagcctataagcatcatatatgtaaaatcgttatattctctagttatagcagctaccataacttcgtattctttattcccaataactctcttaaacttattaccaaagtatcccttcgattctattatcgtatccatacattacccccacccaaacatatattcctatttttaagtatatagaatatttggacactttgcaagtaagcataagaattttataacataaaaaaacacctcttactattaagaaatgttcaagtacataatctattatgctgttatattggacaaattaataaggttgtataacctctccaccaaacaaagccgttttcacaccttttacaaattcaatgttataatccacatcgcctgtcatggctactaaacacccagtatcaaggcggagcgtttcacctggttgaagtacttttttatgtatcgtccccccagcatgaacgaatgctaaaccgtctccttcaagcttttgcataataaacccttctccgccaaagaaacctgtgcctagcttcctttgaagttcaattcctaccgatacccctttcgctgcagcaagaaaagcatctttttggcaaatgattttcccttcccattcacttaaatccatcggaatgatttttcccggataaggcgaagcaaaagatacgtgttttttaacttttccttcattcgtaaaagccgtcataaagagactctcgcctgtaagtactcgtttacctgcactaaacaacttacctactaagccactctgtcgttcacttccatcgccaaaaattgtttccatttcaatatgatcttccatcatcataagacttcccgcttcggctacaaccgtctctcctggatctaattctacttccacaaactgcatatcatccccgtataacttaaagtcaatttcgtgattgttcatttcataatccccctttttaatcattgattaagatacggattgcgactaagtaggtttcaaaattgatagaaaaaaacctgctttctgaagaaagcaggggaaacaattatttggttcgtgccatttcttttgtatcaagtggaacaacgcgtttaacggttcgacacacttcttctatatcaaacggttttgcaaaatgagtgatcgcaccaagcttcataaattcttgtacaagctgtaactcaccataagccgtcataaagataacattaacttcttcattaaactttttcaggtttttaaatacttccaatccgtccataccgggcattttcaaatcgaggattacaagatcgggacattcctgtttcacaagctcaatggctgtcataccgttcgcagcttggagcgtttggtacccttcttttttaaatagttcgcttaataacacgcgaatgccatactggtcgtccacaattaatattttcttcatcgtatgcccaccttttttgcgatatagtctcatatcatgcgacttcttatcattattgtgcaccatctaatcccgaaagaaaataacttcgtcgaaactagtcatgagattacaaatctcgcacattttcgcctctcgaaccgttcattattaagaaatgtaagcgtttaatcgaaaacacaggttcttttttaccattttataactttttcactcttaagtcgttttatcttttaaaagtggggaaatgataactagattaaaattaggagggttaaaaaaatgactggtcccacgattcagaccattaaagaaatcgagaacaaagcgaagaaagaacaacttgaagcgtccaaagctagaagcgttgtccgagaagctacaaaagttaactcgatccacccgtcctaatttcatattcagacaaaagtaaaagcaggggaatcaccctctgctttttctatgactaaaaaaaccgccaaacggcggttttttattttgaatctttattatatgttctcttcagctccaattcagcagcttcgtcaagggtttcaggatgatctggatctctttcaagcgtacgttcaacatcacgttgaatcacatcgtcaaatgtttctgcaccttctgtttcgacaatgatcttttcgatatccttattcaccactgttgaagttggcacttctgtctcgtcaagctctgctgctcgtttgatcgaatatccactcacaagtgcttctccttctggttgttctgcttggtttgaatcacttttacgattctttactttgcttacaatatcattcgactttgttttgaccgattgtgcaaaagcagtcgatttgtatttcacattactagatacttcaacacttttgtctttcgctttggtaacgccgccgctaatatcattccttaagtctttccctgctttaggagctagcaatacgcctgcagcagctcctacgacactaccagctaaagcagcaatcgctggacctttaaactgactctctgacttgatcggatctgaagaatcaatacggatcacttctcttgttgaggatgaataaccctctggtgctggttcgtgttcaactttcacatcatggcttgatttagaatctttcatctttatccttcctccttaacagcttgtatgtttgattttttgatgcgatacttctcccacatcgtcagagcagtacttccccaattcgccgcctcagctgcttttccctgcctagcttcgacgcctttctcaactgatttacttaatttagaaaacgaacgggttaaattttgtagagatgcacctgtttcttggactgatttgaaaacgggtgagaattgaccaactttcgactgcacttcatctgcaagtacattcgttttgtgcaacatcatcgttgtttcttttgataatccatcaatctgcccctgcagagaatcaatcatttctgccgtgttagaaagtgttttttcggttgaccttaacactttaattaaaaagatactaagcactgcgaatgcaatcgcgataagagccactgctaaataaagaataagttccattactatacctcctactcctatttgaatataattaccaataccccgaagtaggaattgtaatcatgaaattcatatgacaaacgtttcactaatccctaaaaaccatttcaatcatttcatttagcttagaaaacaaagggaattccgcttcttttgctgaaagaccagctaacaaacttagatagatcgattcataataccagcgttgcatttcttttccacgattaaatcgctcccagattcgttcaccttctgtctcgtaatcgtagttgatcgtagttaagttatggagtttatctgcacaagcaatttgcttcacatgaaacgaagctgtccttaacgtgtctattgtgtgactctttcttttttcccaactgagacttttatcaggctctgagcacccttcaactaaatctccaatgatttcaccgaactcttctttaacgttttcataagttatggaagtatcttccactacatcatggagtattcccgctgcaatcgcttcttctgaggcgcctgcctctaataaatagaaccctactgttacaggatgagaaaagtatggcaacgttgagccttttctatattgaccatcatgagcgactgcagaaaattcaacggctttttcaattattttcatatacaatctccttttcctgatttctctttaaggaaaaatgacgtctatacgtcaccattcgccataaccattcaatcggaccgtaacgatatttcaaaagccaccatcgactaaaagcaatctgcaacaagaaaatgcctagtaataatagaatgcctgtcctaacctcaatttctccatataaactcagaccatagctataaaaaatgagcgtgcttacaattgactggaacaagtaatttgttagcgccattttcccaacccactcaaggggctttagcgtttttcccgaatagtaaatgagagcaatagccgacatataaaaaagagaaacaagcggtccaccaagactatcttgaagatgagaaaatgcataagaatcaaacacaaaaggcgaaatctttacaataaagccgattgctccaataaaaaacaattttctcacaagtaacaaattgttctgtttcccattaaaccacccttctttcgcaaaagcggcacctattaaaaagtaagggaaaattgaaaacaagagaaacacaccatttatcccaccattcacataagtccaatcactcacgcgttgatttaaaatttccatatagctacctgatccataaatgagaagtgactgttgtatcgcttcaggattatgcgaagtaaactcatctccgttaaatggcaatagtaataaaaagaaaacaagggcataaaacagccacataccaatcccgatttgtaacaaatgcttcccctttagtttgataaaaagaagcaataaaaagccacaaagactatatgtaaataaaatatcgccatgccatatcaatacaaaatgcataacgccaaggataaacaggaaagccaatcgcctaaccataaccggaagaaatcgggtactacgagcaaccagacgattttgcagaataataaatccataaccaaacaaaaacgaaaataagggatagaaacttgcttgtgcgagaacatcaatcatgttcatggagaattgattccattgattcccccagtagctcaactgatcgatgtacatccatggtgaatggaaatcgatcatgttcacaaaaaagataccgagtaacgcgaggccacgcatcgcatcaatggattgaatcctttcattcgtaggtgtgggaactgctgttaatttagtcaacttactcctcttttcattctaatgatattcctctaagaactcgttccacataaatcaaacattatccttttttagccattctataaacgaaattaacttggtaatgttgtttgccaccgtacgagcttatgagttatttttatataatttaataaaaatctaccaagtttggttaaatctaatctataatagaaacaaacacaaattatggaaatttattatgaaacccttcgcgcacgttactcgtcttttatttgaagggccgaaggaggaaaacgcaaccttggggaacaaagaaccaaccaaccaccttgatcttaccaataaggaagcggtccttgaaacaattatggatgaatatggcgaaagtgttgtctggcttgcttttagctacttaaaagataaaggtaaggcagaagatattgctcaagaagtgtttattatttgctatacgaaactagacacttttaatgtgaaatcttctcttaaatcctgggtcctaaccattactgccaataaatgcaaagatgttctcaaaagctgggcttatcgtaacatcaccttcgctcaatcacttttaagtacatttaaacactctgcttctgaacccgatatggtgctcattggctcagaagagaataatgaacttacattaaacattcttaagcttcctaccaaatatcgcgaggttatctttcttcattattttgaagatttgaaggtacaagaaatcagtgaactgctttccattaatgaaaactccgttaaaacaagattacgacgtgccagaatgcttcttaaagaaatgtactagggagggtcacgatggagaaatatttaaagaaccttcgcactaggttgcttgatacaaaggctgttacttttactcattcccataaagacaatgtttggaaaacagttaagaaagatactcctccaataaagaaaagtagttttggaatagtgttacatcaaaaagcccctgctcttcttacttattttactcttctatttctgctcgtgggaaccggattatttgccgcatatgagattggcattttgccagaaaagaattccgctaacgtccactcgattacggaagaagacttatataataacgtcttacactcagcatcactcatcaataatgccgatgatgaagaaaaaatccgctcgattgccctttcttacttagccaactatgataattggaaaatcagcaacccagaagctttctatgaggaacagcctgcgattcttgctcaaggtagaattacagaaggttattttgagaaaatgacgtttagtatatggattgaaccagcaacaggtcttcctctcaattttgttattcgcaaccaacaaagcagcgttcttgaagagttcaccttaccaggcgtagcgctcgcacaggttgagcaacaaaaataaaggcatccgatactttgtcggatgcctttctatgttatttacatacatcatttaacacttctgaagtatggagaagaaactcacggtcaagatctggtagctcgtttagatcaatgctagttaataaatattgatgaaaccgctgaacatctgctttgatttccttacgttgcccatctgcggttaaaatgagtgcatcaagtatgccatttaacatggatacatcatcttttccataatgacgtatttgatagaacgatttataaagatattgaaagaatggttttggagttgatagaacgcgaaggtttctttctttatcaaaaaaagcttcttttggatcataaatatggccgatttttgagagaatcgtaccaatccggttcgtacagttaactgctgtatgcggatcattcactgatggcgatattgctctaagcgcgatgtctacaagcttttgtattgaaaactccaggtcctgatcattgattctttccgttccgatcgcaattgaatttaagaaagtgtcagcagaaaaagtggaagaacctttcatccacaccgttgcgattctagagccttcctttacgtaattccctacatcagaattaagtcgaataatgctttcattttgagtggcgagatcgactaatttcgagtaagggatttgctgaatatagcccatcttattactatatatcggcataccatcttcttctcttagttcactttcttcccagcgatcccacttctcgaacgtctcaccttcataaagttcacttttcttttcaactagataaagagatcttcttgtgattttttcaattaagttatttacctgaacaaacgtggcagaatgatgaataaataagatgaagaacagtaaacaagtaatcgcaagaatcacagttaaaagtggtgatagaataatccggctgtctttacctgttaaaagaagcatgttcacaagtgcaaaaacaaatcctgccacaaaaacgccaagtacatgttgagtaaaacgatccgaaataaaatcctgtaatgttctcggagaaaattgtgatgaataagtcgtcagcacgaccataatggatgaaaatgagatcgtcgtcattgttaaaatagctgttataagcggagcgtagattgactgtgcaagtttttcagttgcaagaaacagcttaggtaatgttccttgaagctgagaaacatacatgatgtctatccatgtactgagtcctactatcgccaaagaaataaggccgtatatgactggcagaaaccagaaactattacgcaggtgaatcgaagttttagaataattcattcgttaaagtcctctttcactattatgtcatctaactcttgttccctctttcgatcatcctaatcacttcatatgaaaatgaagaacttttttacggggaaatcgttctcttcatattagtaaatgaaagggagcagtcggtacctttcttttccccattcttgataagtttccccaacagaatcgtagagcattctttcttcgatgcgaattcgataaagaagagcgggaacaagcaaaaaaaatgataataccacccctccccaggtacctatgtagattggcaacccaactaaagtaagaagcaacccagtgtataagggatgacgcaataaacgataaggacctgaactgacgaggtcgacttttcgctccacgatcacgtttctcgaaaaaaaacgccctagctcttgaattccccaataccttaaaccaattccacttccatatagaagtacccctagcaattgagtaaacggtgattcattaaaaatgaaaagattacgttcactaaagataatggaacccacaatggctaaactaatcatacaaagaatccaaacaaaagatcgcttttcagaagatgatgattccgtactctttttccctcgtttcatcacaaactcgctaatccataaaacagtcaataaaacgaatagtacattgattatgaacatgccaccaccctttcaacatccttttatcagcagtataccagagttctttccttactgactgatacgtgtatgtttctttttgcataaagcttaacttttatacacaccaacacaatgtaagcccttacatgaaggcgaatccacctaataactacatacagcgaaacgaataaaatgggttaaattgtatattaatctgttttttcagtccttatataccgtgataagcaagcctctcatcttctaagcctatgtgaaatgagtttagagcgagcatcgtccgtattcgtagttattctccttgtattcggactatttgggcgtgtcgtgttgtcacgacatgtccgtttgttatactcgtagagtcaattgattaaagcaatcacatatttaacggcaagttatataggagtgaaatgatgaatctaaacgacgaaaagaaacgaatcgtaattaaaatcggaagcagctcactaacgagtagactaggtgacattagccgcagaaaactagaacgactagtggatgatattgtcatgttaaaagatgaaggtcatgaagttcttcttgtttcatcaggagcagtagccgctggttaccgccgtcttgggtgccttgaacggccaacgtcactttcagaaaagcaggccgctgcatcaatcggtcagggactgttaatggaagcttattcagaacgcttcatatctcacggctatactgcttcacaaattctgattacgcgcagtgacttttctgatcgcaaaagatacaataacgcacgcaatacaattaatgttctattagaaagaggaattgttccaatcgtcaatgaaaatgacacagtaacagttgaacgtttgaaatttggagataatgataccctttcagctaaagtcgctgcacttgtaagtgccgatcaacttatcattctatctgatatagacggtctttatagtgatgatccgagaaagaatccagatgctaaactattggagcatgttactgaaattacacctgaaatcgaagactctgccggtgaacctggtagctccgtcggaaccggcggcatgagatccaaaattgatgctgtgaaaattgctatggcatcaggtacaccttctttcttaggtaacgctacaacaaaaggaattatttataatgcggttcaccaaaccgcaacaggaacgtacttcacacctgaaggtcaagctgagcttgataataagaaacaatggattgcctttaattccggtcctgaaggtgaagtgatcgtgacagataaagcaagctctgagatctctgaacacgaacgtagcttacaacctgtaggcgtgcattacgtacacggacacttcaagccaggagctgttgtgaaactaacagacatggatggagaagaaatcggtcttggcgttacgaactactcttccaaacatttgaaaatgattaaaggactttcaactgaagaaatttccgagcttattgatatttcagtgaaagaagccgttcatattaatgattttgtttatcacgatcagctagctattccactcggctcgtaataaaatagaagaaaaaatataggaggcgtttgatgactactctcgatccaattaaagttaatgtaaaagaacaagcaaagcaggcacagggggcttccaaaaccctctccctgctaacaactgaggaaaaaaaccaggcgttgctcattattgcagatgaacttgagaaagaaacggactatattctaaacgaaaacaaaaaagatcttgagcgtggaaaagaaaaaggctttacagaagcgttcatggatcgtttaagtttatcgaaagagcgtgtaaaagactttgctaacggacttcgtgaagtagcagaccttgaggatccagttggagaggttatttctgattggtcccttgataacgggatgcaagtggaacaagttcgcgttccgctaggcgtcattggaatgatttatgaagcacgtccaaatgtaactgtcgatgcaactggtcttgcacttaaatcaggaaatgcgattgttctaaaaggtggctctaacgcccttaactcgaataaaggaattgttcgcgttattcatgcagcacttccaaaaacaaaaattcctgtagaagccgttcaactaattgcaacaactgatcgcgaagcaacgagccaactctttacgatgaaagaacacattgatgttctcattcctcgtggaggcggcgctctcattaacacagttgtaaataatgcaactgtaccagtacttgagacgggtgttggaaactgccacatctattttgatcaatcagcagaagttgacaaagccattaacattttaattaacgcgaaaactgaccgccctgcggtttgtaatgcggttgaaacgcttatcgttcataataaatggcttgaagaaaaccaagagactcttgaaaaagcattagctgaaaataacattagcgttcacggtgatgaacatatcgtaaacacgtttaaagatgctgtccttgctgacgaagatgactggagcaacgaatatcttggtcttgaaattgcaatcaaaacagtcgaaaatacgcaagaagctatcgatcatattgaacaatatggcacgaaacactctgaagcgattattacagaagatgcaaaatcagcttctctattccgcaatcttgtagacgcagcagctgtttatcataatgcatcaactcgctttacagatggatctgctttaggctttggtgcagaaatcggcatttcgacacaaaagctacatgcgagaggtcctatgggactacctgctttaactacgattaaatattgcatgacaggtacaggtcaaactagataaagttactctctcccacccttttaatgaaagggtgggtttttttgatgtatgtacagaacttattccccttcctgattaaataaattgctcactgcgcatactactagattgagcataactttcgtttattttatgagttgcctttataatgataaccataaatgagatcgtagagaggatgacaggaatgaaccacaacaaattatttacatcagcaaaacttggaaagctttcactaaaaaatcgatttatcgtcgcacctatgactcgcattaccgcaacagatgacggaagtgccaccacgaccatgcgcgattactatgaacgttttgcaaaaggagggttcagtgctgttatcactgaaggcatctatacagatgaactttacagccagggctacttaaatcagcctggtttaaccaaccataatcacatagaaacgtggaaaaacgtaacttcatccgtacatgaatacggaacttcaatcattgctcaacttatgcatgcagggggtcaaagtcaggggaatgcctacacagatgtcacagtagctccttcaaataccccaccaaaaggagagcaacttggattttatggaggatcaggctctttcaaaacaccaaaacctctttctttagatgaaataaaggaaataaggcactcatttaaaaaagcagctcgtcatgcgagagaagcaggatttgatggtgttgaaattcatggcgcaaacggctatctacttgatcaatttttaacagactatttaaacgagcgtgaagatgaatatggtggatcgcttgaaaaccgtctaaagcttttagtggaagtgatcgaagatgttcgaaatgaagttggaaaggactttactgttggcattcgtttatctcaaattaaagttgctgacccagcctataaatggcctgaaggagaaaaatcagcgaaggtcatcttttcaacgttagaaaatgaacttgattatattcacgtaacagagcctgatggcactcaacctgcttttggagacggtactaaatcattagctgctgctgcaaaagcatatagctccatacctgtcattgcaaatggacagctaggtgatcctgataaagcaagtaaccttatcgaaaaggaagaagctgattttgttagtcttggtacaggcgctcttgctaaccctgattacccaaatcgccttttaaacggaaaagaattaaaagtgtttgattttgaaagtactctccttcctcttgcttatattaaagaacatgaaattaaagaagatattataagagactaacgactaagagatcccactccttgcatttggagtgggatctcttaaattattctttctttttattccacattcaacaataggactatgattgtaactcggcgtccatacaaaccgaaagactcttataacctcttttactttgttcggaccttcaactaaagtacactagaattatgacgaacaaaggaggaagcaacatgacatccgtctcaacagaacatatcaaaaacacaagaaactatttacgtaaacaaacgttacaaatgattattgaacaatttgattttacgttaatgcaacttacgaaatctcaacgtaaaacgaaatatagtaagatgagcgaaagtccttttagcttctttcgtggcagcgcgtatttgtattattatgatgttacacaaataccttttcattaccatacaccagatgataaaccaacgtggttaatgggagaccttcacttcgacaactttagtgcttttcggaatgaagatggtgagaatgtctttgatgtagatgattttgacgagggatatctcggttcttatctgtacgatttacttagaatgaccgttagtattcgactttatgcggaagacttaggttattcagaaagtgaccaatcaaaactagtaagtacgtatattaagaattatgtgaaacaacttcaagcattcgaaaatggagaggaaaggcctgttgcttttcaattcacagaaaaaaacacaaagggaccaatcaagaaacgtataaaaaaacttgaagatcgttctccgacccactcgcttaataaacaaactcacattaacagtgatggtgaacgaaaattcatccgtaacggcgataaattaaatgcgatcagtgaagctgaaaagactcaggtaagaaacgcatgggaagcatacacaaaaacattgaaagacgagattgacgaaagcctgagacattacgaaataaaagatatcgttgagaaaaaaggagctggtattggctctactgggttaaaacgctaccttatcctcgttcacggtgaaagtgctgaagatcatttaactgatcttatcctggaaattaaggaagctcgcacacctattccagcttatttcttcccatatgaccaggctttttgggatacaaataaacatgaaggtctgagggtaattaaaactcaacaagccatgcaccataagcaagaccctcaccttggttacgttacaattggcgataaagaattttatgtaagagaaaaatcgccttatacaaaggaaattgagccaaaacatataaaagaatacaaagatcttaaacaaaccgttaagacgatggctcaaatttctgccaaaattcatgctcgagctgattctgacatcgatcaccattttttaacctaccatagtgaaacagaaattcttcgcgtgattgatgactggaacaacctacgcaatgaagtgaatgaatgggccactttttatcaaaaacgtgtaaagtatgactatgatattttcatagaatggtgcaaagagaaaaactatatttaaataaaagcctgccgaatgatattatcccttttaagtagacattcaaaaaaacctccatgatatggtggaggaaagaatgatgcttggaggggattttttctatggctaaaaaagggcagaggtttgagacgtatacagacgagtttaaacagaacgctgtgatgaaatacattaatggttctcaaagttacaatgctttagcggaagaattaggaataaaaaatagtacacagctgaaagtctgggtgaggaagtggaaaaacggtgagccgtttgatattcgaagtcgcagtgaggaaaatcctatgcatggtaggccacgcacaaactttaaaacaattgaagaagagagagattacctgaaagcgcaggtggattacttaaaaaagcagtatcaaaatctcgaaaaggagggaaaatcacgcaaaaaataaagtatgaaaccgtggaagatttaaggaataaagctcctgttacctggttgttagagattgcttccctccaaccatcaagctattacaaatggagatctagtaaagtaaagcgcgaagaaagggccaatcaagatcatgacatccaaatgcatatgatggggattcattttcttcatccggaaacaggttaccctactatgacgcgtttattgaaagaaagtggttaccacatcaaccacaaaaaggtgtatcgattgatgagcgagatgggcattcaatcggtgattcgtaaaaagaggaaaaggcatggatacactccgtctgtgatcaatccaaataggctaaaacgaaactttaaagcaaatggaacgaatcagaaaatggtgacggacattacttatgtatcagatggtaaacgattttattacttatccgtgattcaagatttattcaacaatgagatcgtaagctggaagctttctaaacgcaacgatttagcgcttgtactagatacagttgcccaatggacaaagaaaaaagacgtaacgaaagccgttctccattcggatcaaggctttcagtatacgtctaaggcatacaacacacgaatagaagaatacggcgttaagggcagccactctcgcaaaggaaactgcctggataatgcctgcattgagtccttcttttcgcatctcaaaacagaaaagttgtacatcaatcagtgtaaaacagaaaacgagatcagacaagcaatcgaggattacatctaccactataactacagacgtttccagaagaaattaaagcaacgcgcgccgattgaatatcgacacgcgttggcagcgtagtttttttatactgtctacttgacagggataagaccagaatttggcaggcttttattaagcagattgatttgaagacattgggttttgataagttaaaacagtttctagcaatgctttacattgaggcatcgaaaattgaatcattttaccgagcataaaagcaatgacaatacttccaattccaacaggccctccaagtaaccaacccaaaagcaacacagcgatttcaatcccatttcttacccaatcaatgcgccagcccgttttttctacaatcaagagcataattccatctcgtggtcctgccccaagaccagaggttacatataaaccgataccatatccgagaacaacaataccgactataaatacaattccctgagaaagcagcgtcactggatccgggagaatatataggaagaaatcaatgaataaaccgagcaaaagcatatttagaaaagcgcctaattgcggcagtgattttgtgtacagtgatgtgagtgcaagtataataaatccagtaatgatagaccagctaccaatcgttaaaccaaattgcttaaataatccatagtgaaagacgtcccatggaccaattccaaatgttttacctttaatagtcatggcgatgcctagaccaagtacggcgagacctacgaagaaaaatccccaccgaatgattttatttcgcacaaaaaaagcccctctcaaacagaacaatttcaaacctttgaaactatatcacaggaatgaaaacataaaaaccactcggtaaactagggaatgcttcaattaaatctttttccattactcgaagtaaaatgtacgtttcagcgaaaagaattaaatagattacgagacaaaaaaaactgcctgatgatgtcatcaggcagttgtgatcttccatttaattagtcaagtactgttacagtaactgtcttacgaccaaagtctagtgcatcttggcgatcagccatgaataaatcaactcggttaccctggattgcgccgccagtatctccagcaactgcttctccgtaaccttctacatgtactttagaacctagtggaatcacatcagggtcaacagcgattactttttgatttggattagctctcaaatcaataccagtagctgttacaccagagcatcctgtacagaatgcagtgtaagctgttgcttccatttgaatttcttgtccacttgcctgtgaagacttactttcagtgtttgattctttagcaggcgtggaattagaagtagtagatgtttgaactgcttccttatttgcagcctctttcttagcaggtgcttttggagcaggagcactaccaccgtttaatacagaccaagtgttcttacctgcaataccatctactgatagaccgttatctgcttggaacgcacgaacggcttgttcagtgatcggaccataaattccgtctactgtatagttatagtaaccaccaagctcttcttgtagcgcttgtacctgatgaccgcggtcaccttgaactagcgtacgcatagcttgtccattatttacgctttgcattgctgaaaatgtatttggacctgcgatgccgtcaactgcaagaccgtgttctttttggaattgctttacagcaccttcagtaattgatccgtagtatcctgtagattcatcatagttgaaataccctttggcagacagtacatcctgtaactcgacaacgtcgccgtgtttttcaccataagaaagtgtttgatctcctagtgccgcctctgaaactactggactagcaaacatcattccagctagtgctgtggatgtaaccacgtttcttacaatgtttttacgagctaccatgtatacattcctcctgagagttttaatattggtgttgttttttgtttctctcaatcacccatgtcccacatgataacaggcaaatataacacagcgattttagtccaataacaagtcggttacataaatatgacagattaatacggtttttataaactttgcacaatatagtaccatatacctatttacgtcatgtctttattacaaatatgtcaaaaaacaagtaaaaaccctatctttaggttcttcacaaagaacaaaactctatcaatttttttaaaacaaactatttctttctaattattaggtcttttaacctattatcttttctgtcatatgagagttctttaattgaaaaggagcatctaattcataaagtcttctatagcggtcgctcgacattagcagttcatcaagctttccttccattacaatttcaccatcttccataaatgcaatatgatccattcttttcatccctacaagatgatgcgttacccaaacgaccgttttcttctcaagtacttgaaagatcgtagagagcaaggcttgctctgttcgtgggtcgagtccaactattggttcatctagtaaaacaacggctgtctcttgtaaaagaatacgagcaagggcaatgcgctgacgctctcctcctgagaatcgcataccggcttcttgcatagacgtttgatagccttcaggtaatgcaacaataaagtcatgaagttggacgcttttcgcagcttcatagacctcttcatctgtagcagatggcttacctagtcgaatattattcaatacggatgtatcaaaaagataagggttttggtttaacacacttaagtgtcttttctctgccttatcctctagtacctctactccatttattaatagactcccttcagagggagaagatattccttgaagaatcttcacaaacgtggtctttccagagccacttggtccaagaatagcaagattcgtaccttgaggaatattgaaactaatccctttcagaatatgttgcccttcttttgtttgatatccaatctggttacaactaagatcacagctgttccagatactgctctcaccttctctttcttctagagaagaggacgcttctggcaatgtttttagtcgattgattgaatcttcatatccaggaagttcactcacagcatcagagagtggcagaaaagcctccgttaatggaaaaagaatcagcacgaatgctgcaattaaggtccgagccatttccccatcctggttgcctgtccaaactaacatagacattacgatacctgcgacaacacactgcgccataaaattccgataagaaacaaaagtagaacgatcgcgctctactctacgaatctccaaatcatcttgaccacagtgttgaagaaacgttttctgatgcccactaaaaacccaatcgccaattccgacaatgccatcggctagtgacaggcacttaattcttgctttaagcagcgcatatacgatatatttgactttgtgtttttcaaatcaaaagcgctttcatcaatcacatatagaagtgaggtcgccagcatgatgggtgcaatgaagcaagagtttaactggaggcaaacgttcaatgaaaatgtatttatgtccgttgctagtcattatcggggctagcagttacggtattgtttcaaccataattaaattagcgatgggcagtggttttacagcatctgaagctgttacgagtcaattctttatcggctttgtgattgcagtgcttatctttctcatcactaaccgacaaaagctaagtttcgctggagttaaaatcctaattttcgcgggggtttttacaggcttaacgaatattctctatggacaatcattaaattatttaccagcatccctagctgtcgtcctcctctttcaattcacatggattggcatgctgatctcaagtatttcaaaacgccagcttccaactcgtatggaaatactttccctttttatcttaatcggtggaacgattcctgcagcgggactcattgatacagacttatcaaacatcccttttcaaggctggttatgggggcttggagcagcactttgttattctctcttcctctatttcaatgggaaagcaaacgccaaaatgaatacatcaaaccgattagtcatcgtatcgtttttcgcattcttgatgtcagcggtttttcaatctccagagattatctggaatggtacattgctcgtagaaggactttggatctatggaattgcacttggcttatttggaatgatcattcctgttttcctattttccatcgcgattccaaaggtgggtcttggaaaatcctccattcttagtgcgattgaacttccgatcgctgtcatggtttccgtcatcttattaagtgaaacagtatccgttctgcaagtcgcgggtattgtgatcattattatcggaatgacgctaccaactcttttcagcgaaaacataagcctcacacggagaaaaatagtcgaacagcaatagcaaaaacacctcttccaactaggatgaggtgttttcgcttattagcttattcttctatttaaactccattggtccaacattcatttcaaacgacccatcttcatacaaaagtggcgatcgttccgttccgcttttcgaatatttctcaacatgactaacactcatatcatgaggatccgtaaaatcaatttttgcaatcgcaacccaataagcaaagttattcttctcaaaaagaggagacgtcactttttgccccatttggttatcaacaacagcctttgccttcatagatttaaagcttccaattccattggaaaccgcactatacgctgaaaaaagcacgaattttagttcagaaggtttatgaacaataaccgtttctttccctgctccttgagcatctccatctaaagtaatatacggttctttttgcgcgtggccaggcgtacgatagtacacctttccttccgttccgtcattcagaacatagaagcaatacagatccaaatcctttttacttttccattcgagtgtcgcgaccactttctctgatttccgaatcgaaatcgcttcttttttctttaaagtgaccgttagaggaacaaccgcttctcgtgtattcttgactggtgggctttggatggatttctctttctccacatcttgctcattattgctttcaacttcaataccaaagttcccacacaatgcagccagtccaccaaagaaaccactacctaccgcactaaacttccaatctccattatgtaagtatagctcgccaacgacaatcgccgtctctttcgttaactcttcaccaaaggtaaacgtgacgatgttctctccagttgttttgtctgcgatgcgtagcgataaagcggatacttgaccgaaatccagtcctttttcctccccttcgtgaatcgttaacgtaaacgcaactttctggatggcagaagacatcttctgtaaggaaatgtgagtttcatttcgacgctcaccttgcttaacttgtttaacactttgatccacgcttaccggctgaccataaaacaagaagctctcatccccactgcacttcccagtatcattcaatagaaacgcagctgcatctacttctatcccttgatgatcatgctgccaatctagcgttacaataaggtccgatacgcttctcccttttgtgatcggaaccttctgacctctactaacgttcattcgataccctcccctgtaaactattataaaccccacattattataccttatattggtaattcaaacagtgtgtataacgcgataatttatagaaaaagaaaaagcattcaccaagaaacacatgggaatactttctattgaacacgactatttgttcgacctaacctattaacctataactttaagactctttcccttcatttattatttccacaattgggcgaattgcaatgaacagtcctgcgataattagccaccctagcgatacatacgtccatcctttaaagaaacttaaactgtattcatagcctgtgatgaacattattcctgggaagatgatgatgaaaacagcggttaaccctattgcccaccttacacaaagtttcgcatccttatcgagctgttctttcaagtcgaatctcctcctcttcctcaaattcttcgtcatcaaagcttttgaatttatctttcaatgtatcaaaatcaaattcttgattagccattagtccgtgaccgacagaaataacaccacttacgataaacacggtaatattcccgaagaacatcgattcaagctgtccaagcgaaccaacactcacttctccgaacatcacatatgcagacgtaatccaggctgttaccccaagaataaacccagacaatgccccataaaacgttccttcattcgtcgcttttttccataataatcctagcgttactggaataacggctccacttacgaagatgcccattgccatatacacaaaccctaaacttatcccaacatagaaaaggagaatagacagaagccccatcattagtccaaagcttaacgttacttttcgggatacactaagtaatttttgactgtttgcttttggattgatcgagtgacggtaaatgtctgttacgacaatattcgtaatagctgttaattctgctgctccagttgacattacggccataaataacattgctagaaaaaggattgaccctacactaccaagaagataggaagccatttcaggcgcgacggaatctggagtactaatcggcacgccaagaccagctgcacttacacctaggaaagtggcaattgcaaaaggaatagaaaaccaggcaattccgccatatatgtatgctcgtgaagttgcactatctttactagcaatcgctcgctgccagtaggcctgatcaacgaaaacggcaccgaagttaccaataatattaatcataccgaaaaagagtcctggaatagatgccatcgtaagcattgatgtagaagacggaagatcttgaagtccttcatagatgggggttgttccaaatttcacgtagatcgctactgcgaaaatggtaagaattaaaaaaatcataatggtattgaagtaatcagcgacaaaggaagcttttaatccgccaatcatggtgtagatcgtgaaggtaagggggatgagaaaggctgctacaaacaaattcatacctgtcagggagttcagagcaattgcgccgccgagaataaccattgctgttactaaaatattggtcataagagcaaagaccataatcagtcggtgatttttcttatcaaaacgctgaccaataaattctagaaacgtatgtgcatttggtgccctacgctttaattgaatggctacaatcgcaaatagcaacacttgaatacaagcaccggcagcataccaataaggtccgcttatcccgtactgataccctgtagaagacgacatcatcaaggtagccgcccacgtccatgctgcaataattgacgcgcttgttaaccctacgcctacgctacgaccagcggtactatactgctccgccgtcatcgcctgttttcgtcttcgctgcatgaaaaacgtaatacctgtaaaaaaaactccaaagactaaaagcaacagataaccaacactggatgataacatatgattcctccaaatcgttgaattacgtaatacgttaaagtattacattaatcgcttcaactaatttgttaaattatgtaacatagtttcgtaaattaaaaatattcatgtcacttttcctaacatcgctatttttcaactaacgaaagctgactatatcaacttcatcaatatacattgactttttcaataactatttttatacttaatcaagtaaatagtatgtgtagcaactaaaaaggagagaccacatatgaaattatcatttcaagattatataagcattcaaattcataaaacggatctcagcctgactagttttattaaacaaaagctagaaggatttaacttagcacctgagcaaaatttaattatgttgctgctctgggaaaaggacggattaactcagaatcaaattgctcaaaaactcggtaaggataaaacgaatatcgctaggatggcaacaaaccttgagaaaaagggatttatcaaacgaattactccttccaacgatcgccgttccctacagctttaccttacttctgccggtaaagagcttggagaaaaagtccttcctatttcggaggaatttgatgaaatagtatgcaatggcatttctaaagatgaactccaggaatttgaaagaattctttccaaaatcaatgagaatgttcaaaactccagataacctggatgtttctcctcaatagttgctacaacaacaaaaagatggaggttttactttatggctaatgttttatttatcaaagcgaactctcgtccaattgatcaatcggtgagtgtaaagctttatcatactttcttagaaagctatcaaaagtcacatcctaacgacacaatcacagagattgatttatttaaagaaaacttaccttattatgatacaaatcaaattaatgggatgttcaagctctctaaagaattagagttaactgaggatgaaatcaaagcaacagaaggagtaaaccactatttagagcaattccttgaagcagacaaaatcgtcattgcatttccactatggaatttcactattccagctgtcctgcatacgtatttcgactatttgggtcaggcaggtaaaacgttccgttacaccgctgaaggtccagtcggattattacctgagaaaaaagttgccctgctaaatgccagaggcggtgtttattctgaaggtcctgctcaagcgtcggaaatggccgttaattatgttaaaacgctcatgaatttctggggcattgaggatacaacaagtatcattatagaagggcataaccaatatcctgatcgcgctgaagaaattattgaagatggtcttgaaaaagcaacatcactagcagttggcttttaatctttcctactagagaagccccctaccgaggatggtagggggcttcttatattgaatccgattaaacggctggaggtccaaacttcccattatgaaaatcacggtatgcctctttaatctcttccattgaattcatgacaaatggtccatattgaacaatatcttctttaattggtgcaccagaatagactaaaattctagtacgccgactttttgaagtaatcatcagttgacttgatttatttgcattaccttcttcttgataagttaacgtggcagctccatgtttttttagattcactttctctgctcctaagtccacttcacctgatagaacgtaaagaaaagcattatgattttcaggaagatgatgcgtgtaagaagcgccttcttcaagggtaatttctgctaacgtaattggtactaatgagcgaagcggtcctttctcacccaacagatcacctgaataaacccttacatttccgccgtctacgttcactaatggcgcatcttccccatacacattctgataacttgattgtgaggtttttaaatccttaggtaaattcagccacagctgaagcgtgtgagctatatcatcgtctacgccttcttctgcatgccttgctccacctcctgcattcatatactgaacatcgccaggctcgagattttctctagccccgccattatcaatgtgctccaatctcccatcaatgacatacgtaatcgtttgaaagccgcggtgaggatggtcagaaaaagtacctcttttaaaccaatcctctgccatcagaataaacggatcaaaatcagccgatcgatccggaggcagtacccagcctttctgaacagcaggaaattgaccttcttcataggacacataccagtgatcttttacacttctttgaaaaagttgatttgatgaagtcaattttttacactccttttctatatgctagtgtaagaataacactttttagttgctatagcatctattaggatctagctttctaagaaaaagttacttccataaacgatcgttttatagggattcatctacttataataagaagaactcacaactgctacaaaagactcgttaaccttttatatattccttcaaggtaagtttgactaattaaccaattttgaaccagcgctagattaatatgataagcatttagtctacacaaacgctatactcataacactcaaattatacagcacatctatttcatacttcataggaatgacactcaataattttatatcttatattattaatccatattttacatttttatgtttattaactggaaattcaggggtattatgtcatagtatataagtttcattttttgacaatgtgtgcattaaacctatcaagttattacaaattatgctaattatatataggaaacactgatgcaattatgtagaaatgatgcacacattactaatttaagaggagtgattttgaatggcaggtcaaattcgcgtaacaccagaagaacttattacgatgtcccaacgctatcaaacagaagagagtaaagtagaagaacaaattggtaatttagacaaaatgattgctgagttagaaggtatgtgggaaggtgctgcaagtcaagcatttagcgatcaatatcaatctctacgtccatctttcgtagacatgcagcgtctccttgctgacatttcaacacaactagcaagcactgctagatctcttgaagatgctgatgcacaaattgctaatcaaattcgtggataagcgataaagaattgatcaggagcgcttaggcgctccttccttatgaggtgaacaacatgtacattgaagtaactgtcgatctccatcattataaaaaaggtcgttttcttgacctcaggctatcaaactaccattctgtcaaaaaactcattgaaattgtgtgccaaacagaacaaatcccaattcctcctgatcaaacgcagtgggttcggttagcgaataagcacaaagttgtagccgctaatgagcgtttaattgatgcggggattatgacaggagatcgcattgaaatactctgaaggagatcacaaccatggcgaatcaagtgaaaccctatcttgaaactcaaatagatgcaaagattataaacgataaagaagcaattacttttctttttcaaaaagaaaaaatcaaattcgatgaattatcagaagttcatttcctaagcgaaatcaatactggcatccccaatatgattgatatgaatgaagatgagataagaatacagcacatgcttcccccttccgtttccgctcttccaacgatccttaaggaaatgactgaaagcgaacgtctcgctagtgcttatcaactagtgcaaaaagtaaaggatcaccgtttcaagcgtcttaacttaattatttgtcctgataaccttgtattggatcaaggattaacgccatattttttacattatggtgtgaaggaaagtcttccaccgtacgaggaaaattctgatcgtattcttgaggaaacacgagccactgtcgcagctatgatgaatccagagcaatcatttgaacaatacctttattactctgacacgctcacactgtcatcagaactaaaacaggtgcttcaagcgaaaacacttcttgatcttcaaccaattattcattcgcaaatgaaacatttacataagaaagaagctgaattcattaaagtaaataaaaagaagtggaagataagtcgctatgttctcctcggcgtttccatttgtttactcccagcattactttactccctttactctttgtttcttcttcaaccaaaacaagagaatattgttcaggcacaggagaactttttaacaaatgagtatagtgaagttgtgaattcgcttcaatcttatgaaattgacgattttccaaaagtgacacaatatcagctcgccctctcttatatcatcaatgagtctcttacagatgaccaaaaagaaagcgtgcgtaacacgatctccctccaatctgacccaaggtattatgagtattggattcatattggacgcggtgaagcagaacaagcactcgaaatcgcacgttatttagaagatcgcgacttgttaatgtacggcattttaaagcgtaaggaacaggtaaaagctgattctgagctagagagcgagaagaagcaacagatgatcaatgagttagagcaagaatttgaagaatatgagagtgaaatagaagaacagaataaagaagagcaagaggcgcaagaagccaagcaggaaacaactaatgaagagaagcagcaagatgaacagaataaagaagagaaatagattggaggtgaaataatggagcaattatgggtcttctttcgagatacgtatcaaacgattgagcttgataaacaatctctacccattacgatcggaacaagtatcaatcactcatttacggtcccttcctctcattcggatgaacacgtattttcgataaagcgtaaagaacaacactaccgattgtttaaaaatgatgatgagatcatgacagtgcctctaaataaacaatccacttttcaattaggttctgaagaagttgccatcatgataacgtctaaagcaaagaggcacgtttattatattggtgaccagcaagaaataactctttcgaaggcctcatcagatgttcaaatgaatcgtctagctgagggcgttggtttaaccctcgttcgtaagaagaaacattggacagttacaggtaccagtccaacaaccgtttaccaaaatggttcgcttttacatagaaaatcaccgcttcaaatcggagatatgcttttcctaccgatgatgacactgacactaattgctgaagacatgcttgagataacaagtccagaagcatttgaaacctctttaccagaagctacgattccgtcatctgagatgaaaaagaaatacccaaactatcgtcgtacaccgaggatgatgtatgagttacctgaggataagatcgatctttcctttcctacgcaagagtcggatcgaaacaatcgaagcctatggctaattatcctaccaccattaatgatgctaatcgtaatgggactagtggcacttcttattccaaggggaatctttatccttatttctgttgtgatgtttgcgacaacgcttgtcacatcaacggtccaatatttcaaagataaaagttatcaaaagaaatcaaaagcacgtaagaaaaggatttataaaaggtatcttgaggataaacgacaagaacttcatgaactggctcaaaaacaacgcaaagtgctaacgttccactaccctagctttgagcgaatgaaatacttaacagagcaggtttcagatcgtttatgggaacgtagccttgagagccctgacttccttcaatttcgtttgggaacaggaacggtaccagcaagctataaaatttccgtcaattcagccgacatgtcgacaagagaaatggatgagctattagaagaatcacagaacctgaagcaagtttacaatgaactacactccctcccaattactgcaaacctatttcagggagcaatcggtcttattggtaaagaagcggttgtgaagaatgagcttcatcaaattattggacagctggccttcttccacagctatcacgacgttcgatttgtcttcgtttttaatgaagaggaatatgccaattgggaatggatgaaatggttacctcactttcaaatgccaggttctttttcaaaagggtttatttataatgagcaaacgcgggatcagctcctttcttcgatctatgaaatgattcgagaacgtgacctagaagaagataaagaaaagctacgttttgcaccacactacgtgtttattgtttcgaatcacaacttaatctcagaccatgtcattttagagtatttagagaacgagcacacgcatctaggactttcaacgattttcgtcgcagaagcaaaggagagtctatccgataatatccatacgctcattcgctacatcaacaaaaacgaaggagatattctcattcaagagaaaaaagccgctgaaatctcattcgaacttgatcaacaccaacaaagcggtaatgaagagttctctcgaatactccgcacccttaatcaccaacgcggcattacgaattcaattcctgacaaagtatccttcttgcagatgctgaacatgaaagatattgatgaattaccgatatcccataactgggtgaagaatcaatcgtcgaagtctcttgctgcaccagtaggacttaaaggacgacaagacgttgtagagttgaaccttcatgagaaagctcacggcccacatggattactagctggtacaacaggatccgggaagagtgaatttttgcaaacgtatattctttcactcgccgttcactaccatccacatgaagtggcgtttctattaattgactataaaggtggtggaatggctcagccgtttaaacaaattcctcacctacttggaacgattacaaatatcgaaggtagtgaaaatttcagtacgcgtgcactcgcttccattaaaagcgaattaaagaaacgacaaaccatctttgatcagtatgaagtgagtcacataaacgactatacagttctttataaaaatggcgtagcggctgaaccaatgcctcacctctttttaatttcggatgaatttgctgagttaaaaacagaagaaccagagttcattaaagagcttgtcagcgctgcacgaattggtcgaagtctaggtgtacatcttatacttgccacgcaaaaacctggtggtgtgattgataatcaaatctggagtaacgctcgcttccgcgtcgctctaaaagtacaaaatgtagaggatagccgtgaaattttaaagaacggtgacgctgcttcactaaccgtgacaggacgcgcatatttacaggttgggaataacgaagtatacgacttattccaatcagcctatagccgagcgacttatatggaagatacttcggatatggaagatgaagtcgctcttgtgactgacctcggtctcgttccattatcagagctttcatcttcagaagaaagcaagaaaaagaagcaaagcgaaatcgaagtaatcgtagataaaattgttgatgtccagcaggaacttggcctaagaagattaccaagcccatggctaccaccactcgaaaagcgattgtatcgtcatgactttgaatccaataagaaaaaaatgacttttgccttgcttgatgaacctgaaaaacaagcccaatctccatatcattatgaattaataaaggatgcaaatgttggcatatttggctcatcaggattcggcaagacacaaaccattctaacgttacttatgagtatcgcatccacaaacacgccagaagaagcgcaattctatctactcgacttcggcaacgggggcttattatcgattaagaatttacctcatacgggagattatttcttaattgatgaggaacgtaaattaaataaattattgaaatttattcaggaggaatttacgaagcgtaaacgactttttcagcgtgaagaagtgagctccattacgatgtacaatcggttaaatgaaaaacctcttccccttctctttattacgatcgataactatgatcttgtaaaagaggagttgatggaccttgatccgatcttcactcagtttgcgcgagacggacagtcgctgggaatttatttaattgtcagcgccacccgtttaaattccattcgacaagctctcatgaataaccttaaaacgaaaatcgttcattatttactcgataattcagaagcttacaccgttcttggaagaatcccttttgcaccagaagccgtcccaggtagggcgattatgaagaaagagaaaacacacttcggtcaaatcgtgctaccagctaaaggagaagatgattacgaacagctagcttcattgaaagaagaagttcaaatgctccaagagaaataccgtgatgcgagcaaacctgaagcgattccaatgctaccgagtgatcttacttttaaaacattcgtgacgtacattcaagtttccaaaccaaaaaattcttatccaattggactgcatgaggaaacagtgaagccggtttctctctcctttacgcagacatcccattgtcttgtgctaggacaagctcagaaaggtaaaaccaatattatgcgtcttcttacccagcaagcgttacagcaagaaggagatcatattgccgtatttgattcaatcgatcgcgggttattccatttaaaagatgaggaaaagacaacttatttagaaacaaaagaacaaatcgaagaatggatggaagaagtgacaactgaattcaagtcacgagaggtgaagtaccacgagaggatgaatactggccaaacccttcctgagttttcgagagttttcctctttatcgatggatatggacgattttctcaaacgctcggaaatctccttcaggatcgaatgaccacactaatgaaaaactatagccacctcggcttaagtattgttgcatctggcagtagcaatgaactaacgaaaggctatgacccgctaacagttgaattgaaacaagttcgtcaaatcatcttattaatgaagaaatccgatcaaacgctcattaacctgccttttgacaggaaagaacccgatattaaagccggatttgcttattatgttcaaagtgaaaccgcgcaaaaaatccaaattccacttgttcaaatagaaaggaaggtccatgcgtgaaagaaaagaaaagcatcctgaagctcattctcgtaacagcaatcattttagttctcccgctcatttactttacttccattggagaaaatccgatgaaaaagaaagagagcgccacgaaaacgatcgctgtcatcaatgaagatacaggaaccgaagaagacgaggaagtcgtaaagttcggaaatgacgtcccccctattcttaagtctgaatctgaatacaattgggaggttgttggacgcagtgccggagaaaacggattaaacaatcaaaaatatgatgccattgtttatattccctccactttctctgagaagatcctaacgtacgacgaaaaccaaccggagcaaacaaagttggcatttacggtacagaatcaattaaatgctctaaataaagagcaagttttgcttgaacttgaacaagcaacgaatcgcgtgaacacgaagatgtcttctctttattggaactatgtttcaaatgacctcgtcaacatccaacaagagtttgaccaaattgtagaaaaagagaaagcattccaacaaacgatgctttccttctatacaccaagttcgaaggatttggccgagcagatggagcagcaagtttcgatgctttctaaccttcaatcaacttcagaaaatgctgaggaacgtgcagctgatcaaacggatacgatggaagggtttcaagaaaatctatcaaactttgttacttatacaaatgactatcgtgagtatcagcagaagcagcaagaagttcttgaacaaattcaagccgattcagttgattcgatttcacaggctacagagatgcctcaaccgatgtttatgaacaataaagaactgttcgaagggaaatctgagagcgtacttgaaaacatgtctcaggtagaaaaccaaatgatccagcagcaagaaatgttcgctggtctaaaagaacttcgatacaatcaggtcgagcgtcaggttaacgatttctatacgcttcaagaacgaattctaaactactaccagcaacttaaagattcaatggtcttaaatgaactagaaggtgaaatcgctacgcttagcaataaacttggtgatggtgacgagatcattattccggatgatcccgaacttcctgaagtccctgaagatccagaagaacctgttgatccagaaaatcctagtgaagaagaggatccaacggaagaccttacgaaacttctaaaaagtttacaagatgaagagcctcctgtaatcgatgaagatggagaaacaagtggttcaactcctgttgatctaagcgcagaacggaatgagctattagcgattgctcaggaaattgttacgctacaagaaacattgatcgccctagaagaaccaaaagtagaagatcttcaaactgcatcgacaacgttactaacgcttaacgatcgaatcaagcaaacggaacaacagcttctagccaaagaaggtggcgaaaatccactagatggcgaactagaagaattaaagaagcttgttgaaacgctcacaacagaaaataaaagtttacttgaacaaattgaagagttaacgaaggaactggagaagctaacgaaggaaaacgaaacgctctcttctcaaaaagaaacgttaatggaacaggttgatgtgttaaaagaatcaaatactgagttaaaagatttactcgtaatggtatctgataaaatttatcgtatttcctctggaattaatgaaaaggaaaatgcgattttagcatctcctgctctctcacaagcaagaaaagatacgctatccgtctatttccaacgtccgattaaaggggcgaacttaacagatgttcttcagtactatgcctatctagaccgatatgaagcaacacttaatagcatgctttctaaaaacgacgtgaaggaaaccatcttgcaggacaatgatcttcgtgaagaagtaaatagcatgttagaactaacgaacaaagaagaaggtcaatgggacgcggttggctcacaagtaccgaagacgagcgatgccctaacgacgttacaagatgatttcactgtctttttagcagactacaaaaacgttctcgatacccagcaagcaaaattacttgaaagcttaaacggaattgaagaagaagcagataatgttctaaatcaaatgcaacagtctcagcagcaaacccctgataaaacagcacagggcacagatatcataagtaatcatgaccaggttaagagtcagatgggttctttgtatgattggatggattctattgaagatagccaatctgaaattctttcgtacacagatgaactccagtctcgagtagctgaagtgcagacagatgccaacacactaaataacaagtgggaaacgaacgtcgcttccactcttatgattcgtgatgacgtttttaacgttatggggaacgcgtttgtagatggccaatctaatgattacgtctatgatttccttgctactccaattgacgtaacgggaagcgtctttactgataagaaagatacgaatcttccaccagtggtcattttgtttattatactcttaagcagcttgttgattggatatgcaagttactacttccaacatggtccatggtggttacaaagtattttattcttaatgctgacaagtatcgtggggctggtgatcagcctctacagtttatcaatttatccattaggaaacgagcgttctatggaatggaccatctttacgatcttactactattaagttgtgcggcgctcattcgcgtagcctttatgagtcaccatttgatcggatggctcgttaccgttggcctcgtcgccttgtttgtaacacctttattagctctttcaacaccaaactttagctttactgatccaatgtctcgcgtgtatatgtcaatccagaacagtacacaaacgctctttttagaaggtgcgatgattttatccgccattttgatcgtcctgatcattcttcaatatgctttaaacaagcgatcatggacacaaattaaaaaggatgaggcccatgaagcctaagatcattttcctattcaccttgatttttctctgctgtcacatcattccagtggcagcagagggaaacacagacatcaatgagctattaccgaatgagtacaaaaagaacaaactcaagaaaaatactgacttaattcatgattcctccaatacgaaggaaatggaagagatatctgaagatcagaagacgatatctttcaatggagaaaaggtttttaatcctgagggcacccgaaatgaattatttctttcaatgagtaaagaaaatagtacgattaaagataaagcggagaatctcaatcttttctctgaaacagagacagtagcttttacatcgactaacgcggaagatagcgaaacgacgtcgtcctcctttcaacttctgattggaattttaatcggtgtatgtctcatcgtcctaattatagtgctagtaatctataatcgattatcgtcatcaaaaagctaaccactcatccaaaaagcaacggcctattttatactaggaccgttgcttttgtcgttttacgtatcgattagatgtacatttccttcattacttgatacgctccatcactatgattagaaggaatcgctagtttgcaaccactatccggatagtatgcagagtggaaactaacgccggggtcataccccatgacatggtattttacgattagattgtttcgagtgttcatccacatcccataaccataacttactccctcttttacatccacatgaggagtgagcaattgacctatagaacgattactcaataactgaaaatcaatcaacacttcccaaagtttcaccatatcaggtgctgtcacatacgcacctccatcagatccaccgacaatcggaatagcatacgtattcgtccgccatgagccgtcatcctcatcaatatacccaagtgctgtattttgaggaagacgatctaaagaaaaataccccgaatcattcatatgagcaggcttaaaaacgttttcttctatataatgttgaaaagccattcctgtttgctgctcaatgattaaacctaacacgatgtagcccgcattattataatggaacgcctcccctggagaagcgatcatttccccattttgaaaaagtggcagaaagtcctgaaggctttttagaaggtacactggtgtctgcttccaaagatcttcgtagtcttctaagactgcttcatcaaaatagtctggtatacctgaagtgtgtgttaaaagctgatgaattgtaatgttcggatcgaagtgaggaaaagacacattcaagcaatctcttaactttgttttgaacgataattgctttttctctactaactgagcaatccctattgccgtgaacaacttgcaacctgaggcaatcccgaatcttgtattcaccttatttaatcgctcttctacacgattggcaaagccggaagataatttgaattcttcttcatcttgttttacaaagatagaaccagaaaaatcaacaccttttataagttgatcaaaaacattttcttgagaaaacaacatccacatacaccccttcacttttttatcaattttcaaccttcaactaaagttcgtcatttccttttttctttaagaaaggagtttaataaacttttcatactgtgaatcatagttctaaataaccactaattcaaattattctttattttaagataattacaacgactcatgagattcgttcatcttccctatataattgttaatagattacatattaggaggaatttatttgagaaaaaagttcattgcctcacttgttgtgacaacagccttattcacagcctcggtaccttatcaaaatgttttagccgaacagcctactcatcaagttgaaagctataagcaatggaacgagaaagcaaacgttcccctatttgtgaaggaaaagcaagcggttaaacgtgcctcttctactgcagaggatgccctaaactacctgcaacaaaataaagaaaaagtaaacattaagaacccaaaagcagacctaaaaaagaaaaagtcggtcaaagatgagcttggaatgactcacgttaggtttattcaaacaaagaacggtgtacccgtggaaggtgctgaaataattgttcactacaatgcggacgatgaaattacagtcgtaaacggagcttataatgaagaagtcgaagcaagtaagcttaatacatcgccaaccttttctacagaagatgccttgcaagtcgcaaaatcttcgaccaatgctccttctaccttagatcaagttccaacttctgagttagttatttatccattcgaaggtaaaaatcaccttacctacaaggtgaatgtaaacttcttaggagatgaacctggtaactggttcgtgtttgttgacgctacgtctggtaaagttgtggatcaatataacgccattatggacgcaggacattacaaaactcaaacgggcactggtaccggcgtactaggtgatcatcgtcttctacatgttacaaaaaacaaggttgaaaatgaaggaagcacatttcaactagcagattatagtcatgatgggttagacggaatcattacctatgattactcaaaaaactaccttgaggtcttttcaaataaaagcgctgcgtttaaatctgaatttgcggagcctgcagtggatgcccactataactcggaacaagtctatgattattatttaagtgagcacggacggaactcactcgacgataatggtatgccgattcaatcagttgttcattatggcaataattacaacaacgctttctggaacggaacttacatggtatatggagatggcgatggtgaattctttatccctctttccgctagccttgatgttgcagcccatgaaatgactcatggagtaacctctaattcagctaaccttatttaccgcttccaatccggtgctttgaatgaagccttctcggatatctttggggcattaattgatgactcagactgggagattggagaagacataatggcacctgctgcagtagcagatgggcgcacctctcttagaagtttaagtgatcctagtaaataccctgttggtgctgcttatgcgccatatggaaatggtgagggaaaatatccttctcatatggatgaattctacgaccttcctggtgacttagataacggcggggttcacatcaattcttccattattaatcacgcagcttacttaaccgcccaggacatcggccgtgagaaacttgggcaaatctattaccgtgctttgactcaatacctcacacctaactccgactttagtgatgcccgacaggcgatcattcagtccgctattgacctttatggtgaaggcagtgcagaagttgaagcatctgcaggtggatttgattcggtaggcattttagaatagtaaaattcatagagaacaagcatgaagaaaaattcttcatgcttgttttttctttattaataataccttcattcgctctttacgtatctaaaaaccctttgccttttaagtgcttcaaagacgtaatgaaacctaaaagtaattgaccagtatccgttaaatcttttaaatcaatcacttcatgcggagagtgcgtatacctagatgggattgaaacaccgccagttgcgatgccttctcccgtcatatggatagctccagcatcggtaccaatccccatgaaaatctcttcttgaaaaggaattcctttctctttcgctacattaaatagatgttggctaactaaaggatgtgaaataagcgatttatcagcaagtttaatacacggtcccccgcccaatcttcgcgttcccgtcataattacatcatatgtatcacttgttggggtcgtatccactgcaatcgcaaagtcaggctttatctttgctgctacaacagaagctcctcttaaccctacttcttcttgcacggtaaaagcgagatagacatctcctcgttcgtttttatcttttttcaacttactgattaaatcaattagtaacgccgtgccagcacggtcatctaatgccttccccattgcttttggtgcattctctggtcctactttctttaactctgttccatagctaatcggttgccctactcgaacgcccattccagtgacatcttcatcatttaaagcacctatatcaatgtagagctcccgatgattgctgactcttttaggatcatcccatttgacataatgagcggaaatcgtaccgatcacgccatgtactggaccattatctgatttaataaacactggttgagacaaaagaagacggttatcgaaacctccaacctgttcaaatcgaataagaccattcgattcaattttctttactacaaaaccaatctcatctgaatgggccgctatcataagagaaggaaactccggattaccattcatttttgcaatgatatttcctagggggtccaccttacattcatcaacttcctctttaataagattaaatactttcctttgaatattctgttcaaagcctgaaggaccaatcgtatcgcataactcttttaataaagaaaacataacgtagctccttattgtaagtagattttcataaaagagaagcacctctttgagtggaagtgcttctctcttattattttgtcagatacacattccagaaagcatcatcattcatcggatgtgcttcatatccttgcacgtaagacatcttagcaagtgggggagttgtatggccaataagtgcccatggtgcatcttcataaaaaatttcctgagcttctttataaagatcagctcgcttttcttcatcaaaggttgtgcgtgattccatcaaaaggtttgtaaactcatcactcttataaaaggcacggttattggcaggcttagtcgcatttgttttacttaagttagggaacaagaagttatctggatctgccatgacccctgtccatccaaacaaagccatatcgtgttcaccgttacttgttttatctagataagtcgcccactcatacgtttgaatctccaactcaacgccaacttcagctaaatccgattgaattgcttccgcaatctttaatggctgtggcatgtatggtcgagggttgctcatcccccacaattcagttttaaacccatcttcataacctgcttccgctaacaattctttcgctttctcaggatcatactcatacccttctatgtcctcattgtacccccaaagagaagatggaattggattaacggctttttcagccataccgttataaaaagcatcaatgatcgaatctttattaatcgcataattcaaagctttacgtacttttggatcatcaaacggctctttttccatattgaaagctaaatatccgatattaaaacccggtctcttaataagatcaagattaccatccgactcaaccgctccagcatcatcaggacttagaccgtcaatcatatcaacttcaccagtttgtaacgcggtgaatcgagacgaattatcaggaatcactctaaaaataagttgatcgagatgaggaatgtcttccacgtagtaatcttcatttttattcagttgaattttgtcatttctagaccagctttcaaatttgaatggtccagtccctacaggattttcattaaatttatctccatacttttgaacggcctctggactcgcgatgccgaacataggaatggctaaataactaataaatggtgcagttggctctgttaattttatttctactgtatactcatcgaccgctttaacatgctcaatcttatgatctttatcgcctttaaatcctccataaagaaatgagtagtatgtaaattctccatgatgctcggggtgatcagggtccatccaacgctcaaaattatagacaacggcatcagcattaaaatccgttccatcatggaatttcactccttcacgaagcttcaatgtccacgttaactcatcttctccaaggtcatactctgtcgcaagacctggttggagttctaaattttcatcgtatttaaataacgtttcaaaaatgttgtgagttacccgagttgattccccatctgtcacattaatcgcatccaatgataacgaatctgcccctctggcaaaaataagcgtgccaccatctttaagctctccaccaccgtcacctgaatctgtagctgaattatttcctccagaacaagccgtcatcagcacgattacaaccgtcaacaaggctatgattcctttcttcatctttattccccctcttatttgtagtaacgtcactaaagaatgtcatgcgtatttttaaaaatgtcaaattgataggttgtattcacctttcgaatccctggtatgtcataaagcttgtacaccataagccgaatatcttcttgattcggtaaattcgtttgaatcattagtgggtattccccagatgtaagtgtaatgtagcgaacctctttgtattccttcatgacagcaacaaccttttgcagacggctcggttcaacgtctacttgaaaaattgctgccactttcactccgaccgctaccggatccacaatgccaacaacttttagtacctcggcatcaactagcttcttatacctcattcgaattgttttctctgttacttgtaactcttcagcaatatctttaaatgacatgcgaccatcgtgtgataaacaaaccattaatcctctatccaaatcatctaaatccaactctctcacctccaatcaaaaaacaaacactaagatagaatacttcgaacgaacaaaatcaccattttagcgatacaagtatatgaaaaaagccggattatgatacttaatctatattttttaccttaaaatggttataggtagtataaagtataattagaattttctcaatagtaaaacacgatttcatccttcattaaccataagttaagttccagcagtgaaactaccaattgtatgactatcctcccgtttcataaaaggaggtttcaatcttttaatttaacccttaaactatatagtgaacctctggcatgaaagcattcgaactcttacataaactagttttactttatttctatcatctaaagacgatgtaaaaagttggattagcactcttgtatttggggtaaaaaagcactacataattgacaattctatagggaggggcggtagatcagtgaagctattacatacacaatccttgcgcaatgccattgaagaaaacaccaaacaactggaagcccaaattgagcaatttcaaaacctcgaaaatagtattcaggattttattagtctagagaatgcctttaatggaaaaggtggaaaagccattcggcttttctatcaagactggcatgttcctctcgttgaatacttccaactctcattaacgcaataccagcaaaaacttcatgatctgaagcaagctacgatcgctcttgagcctgcaaaagacggaatgatacgtgaggagtttctcggtggggaattaacgaatggttaaaaaaatacagaaaccaacacaattagtttagtagatgatgtgaatgctagcctttcaactgtgagtgatattgtctccattccaaagctaagtgatcaggactttctaaaccacgttcaacatgctagaaatgaaattgatgaaacaattcacggtttgcaacaatttgaccatcgtcaaacatcttatctcgatgaaatgaagcaagatatacaacagatcattcaatacattgacgaaatgaaaggcttaatgatcggtggtaagataaacatctcaacctatcaatcagggcagttagatcaccttatgaagtacaaacagctcaaagtttcactagagcagaagcagttacgagagatgttatcaatgtttggaagttatttgacgactttctggaatatatttggtaaaactttcatctcaagctctcctacgtattcttacgagctactaaaaggatatgaacgagactttgcaggcgttgctgaactaagtggagcagatcatcctaatgctcaagaatttgtcgatggtacccaccaggttgctaaaggaaaagaaatggatttatcgatgttagaggagatggatggcgttgcaattgagacattcaatttgcgcggcgttcctatgaattatgccattatcaatgatcgtctcgttatttttagaaatgaaccagacctgtggtattacacacagaacacggagtacggcttaactgaggagattttcggccaaattggcaaaaccaccgcaagtgcctttggtgaatactttattggaaaaggtgcaagtaaaattcctggcgcttctgctttaaataacaaaatggggaacatgccagacattcctggcactggcgccaattcaggagatttactaaaagaacaggcttcggaatccattcagaagcaaattcctttctggaaagaaattgtttcagcagaagtaccaaagtcgggtacgaaacaggttcttgtctatattggaggagatggcgagaattgggatcgccgtgccatgattacaatgagttctgatggagttgtttcgattgatgattggtatgttggtgaactcagtgaaaccgttaagaaagacaaatcggaaacaacctttagcgatatgtggaactgggcaaccgacaccgttgatgaaaacaatagtatgaagacaaccgagacgcaaaaggaagcgaaagacaaatacgggttatcagaaggtcaggagttaactcctggtggtggatatgatcttaatcatatccagaatgatgaaggcctaactattcatacgacaacgattaacgagcagccgattaattacaccgtggttggaggagatctcgtgattatccctgacaatcccgacctttatttctctcaaactaccatcgatcataatgctttaactcaaaatatgggagattacgcaaaaaagattgcagaaagtgccggtaaccgagccataggtgaggcagtcggtcgtgttcctggagccgacaacattgatggatggctacaaggaacatctgaggtccctttaactggtaaaaccgcgggcgaattaatcacgagtacctcgtcaaaaacacttcaatcaaacattccggggtgggagaaaatcgttaatgcaccagtcccatctagtggagaaaagcaagtccttcttcaaattagtaaagacggaaaagaaattacaggaacaaagcttttctatttaaaaaaggatgggacagtagaactacgataatcacaaatcaatttaaatcaggagactttacttatgaaaaaaatctttttcttactacttacactttttatcgtaggcggatgtaatgcgaatgggcaacctgctgaagatgaattcaatgaatacaataatgaagatcgcattgccctttttgagaagtccgaaaaaatctcagatatgggagcaaagctgattgaaaagtattccgagccagaaaaagctcaaatatacgtgaatgaagaaatccttcccttgctaaaggatgtaaaatcccaggctgaaaatgttgatcaaaagcttgaaacgaatgaagttcaggagcttcatcaactgtttcttgatcaggttacaacgttaacagacatgttcgagctacagtccgacatgcttgagcttcaagttcctcctgttagtgaagaagatcaacaaaaaacagaagaactatatccagagcttcaacaattatctgatgaggttgatcagattggacagaactatagtgaaaaaaggaaacagctggaagaaaaatatgaaagttcataagtgaccctttcctgcgaaagcggtcactgatacatagaggattttcacatgacgcttatcatctttcgcatcttagcatcatccatactagcagtgcactagttcattttcacttccttaaaaaatgtttcatcttttatcagaacatcccgctaaggaggaaataaatgaaataccgtacgttcattattggcatcactctactcaccctagctgcatgcagttcaactaatgaagttgcaaccgagcagccccctcctaaaaaagaggtcagtgagtcagatgaaaagtcgcttacaatcaatgaaaagcttaaccttaccgtatcggcggattctcttaagaacatgccaggcggtacacttacagaagatataaattatgaagaagatacagttgaattggatacgaatcccgagttaccttcagcattagcaacaaagctaccagatgtcttagaaaacctatcaaaagaagctaaggatataaacgattatcaaaaggggcttctgacgcttctttcaagtccaaactaccctgttgccatagacaaggcggagaactatgaatccccttttgaagagccatatctcccagatccaactgttcagaaagaggaagagaatcaggaagctcctaataaagcgattattttgctcgatgcaagctcaagcatgctgttagagagcaacggtgaacagaaaatgactactgctaagaaagccgtcaaaagctttgctcaaacgattggaaagtctagtgacgtttcgctcgtcgtttacggacataaaggctctgaatcggatgcagataagcaactttcctgtacggggattgaagaagtctatccgatgggagcctatgataaagctgaatttcaggaagccgtgaatgcatttgaaagtaaaggatggacacctttggctactgccattgaaaaagccgataaaatgagccaatcctatgactcagcgacaacaatttacatcgttagtgatggagctgaaacatgcgatggtgacccggtagctgccagtgagaagttaagtgccaatggcaacactgttaatatcataggatttgatgttgatgcagaagcggaaaaccagttaaaagaagtggctgatgcaggaaacggagaatactttcaagcagaaagtccagaagacttaaagcaaacgattgaatacgaatggctgccgtctttgggcgatctcgcctgggcccatacgatggccccgaacggttgggagatatctgatgaatataagaaagcagaacaagcgcctaaagaaatgttaaatatatcaaagcgtgaagctttccgaatcgatgaatcgatcaggattatggaagagaatgaatggatcacagaacaacaagcaaccgaattgaaagattggaataatgagagaaaaaacgccttctatgaactctatcaacagcttggagaaagaaatcgcaataaagtaaatacacatgcggaacagattcgaaaggatattcaagcttgggttgataagatggaaaaactaaaagaagagagcggaaattgattaaaaaaagcatctgctacgtttgcagatgctttttcttattcgaagacgatcacgatcgtgcattattatcataagcgccgtctaaggcttctatagcatttcaatttcatatgaggcattttttaaattcgatatagtaatgatatataccctagcctttcaccgcattaaaatgatataatgacaatattttaaaaattaaaacaaaggaaggcgttattgtcatgaggtacgggtttgctaaaagagtgcagcatcttcaatcatcagcggtaagagatatattaaaaatcacgaataaaggagatgtcatttcatttgcaggagggctaccggacgatgaactctttccagtagaagcggtacaagatgccttctcaaaaacatttcaatcaggtggtaaggcgtttcaatacgatgcgacagagggatatctcccgcttcgagaagttcttgtcgatcgtatggctaagaaaggcatcgcttcacatgtagataatattatgttgacaacaggctctcagcaggcaatcgatttatttgccagggtaatgtttaatcctggagacattgttttaacagaaaaccctacttatcttgcagccgttcaagtgtttcaatcctatgaagtgaaaataattccggttgattcggaccagcatgggatgattccagaagaccttgattataaaatgaaaaaatataagccaaaatgtgtatacgttgtccctaccttctccaatcctatgggcaaggtatggtcattagaaagacgacagcatttattaaaaacggccattcgaaaaaaagtgatcattttcgaagatgatccttatggtgagatcaaattcgatagtaaccaaacctacacaccaatatccgccttagacgatggttcgcacacagtctatacgagtacattttcaaagacggttgtgcctgcattacgaacaggatggatcaaaggccctcatcaaatcatccgcatcatggcacaagcaaagcaagcagccgatctgcattcaaactctcttgcccaccatgcgctttatcacctttgtacggattttgatttaaacgggcatattaaaaacttaagacgtacctattatgatcgtatgaaagtgatgcagcgcttgcttgatcaagctgaactacccggactttcttatacggttcctaaaggtggcatgttcttttgggtggagctacctgaaggcattgatacgacacttttattaaatacggctgtaaaaaaaggggcagcttatgtacccggtgcaccgttttatgtagcggatgccaaaagcaatacaatgcggctaaattttacacattcaactcaggataaaattgagaaaggaatggaaattttggttgaggtgtttcaagaggcagctgaaatggatttagaaaagactcatcagtaggtattctatcttttttatcatcgtctttatttagttttgtttgttttaatggaagtgacctcctaatcatagaaggtcactttttagtagtagtttaataaaagttcctcactagcattctaaatccatttcacctttttaccagctagattttttcacgccaggaatttgtcctttatgagcatactcacgaaaagcaattcgggacatcttgaactttcttagataagctcttggtctccctgtcacttcacaacgatttgtaaggcgagttgctgaagaatcacgaggcagcttacgcaatgcttcataatctccttttgcttttaactcttttcgaatttgagcgtattgttgaacgagctcctgacgttttttttctttagcaatttttgattttttagccatataactcttcctttcttattaatattttggtaagtgatcagaaaatgttgaccaatcttcctccatctcatgattagtcaatagacaacgatcaagcgactgttcaatttgctcctggtccaaatgaagaccaatcatcacaagttcagtcatgcgatcgccgtgaatatcatcccagcgttctagtagttcaggagcttcatcaatcgcctgtctttgcgcttcaattgagtaggttgcaatccaattcccagccgcttcaatactgagggatggacctgcttgagacaataatcctgtgacatcatttcgtgaagcaagccagaagaatccctttgcacgaacaatttcctctggccattgttcaagccaagatagccaccttccaggatgaaaaggccgcttcctccgatagacaaaagaagatataccgtattcttcagtttcgggaatatgttcgttattaagttccttgatccatccagcactctgacttgcagcttcaaagttaaatgattttgtgttgagcactcgatcaagagaaagattggcatgagtggttggtacaataatggcatcagggttaagtgtacttaagacggacactaattttcctatcgttgttttattcattagatccgttttattaagcaatagaacatttgcaaattcaatttgatcaattaatagatccaccacttcacgctggtcatcctctgacgattcttcctcacgatctattaaggtttctcctgatttatagtcatgccagaatcgattaccatcaacgatggtaaccattgtatctaacctgcacaagcgactaaggtcaatgcctaacgcttcgtccatgtatgtaaaggtttgagctacgggaaccggttccgaaatgcctgttgattcaataaccagataatcaatctctcctccttccaccaattttttcacttcaatcatcaaatcttcccttaacgtacaacagatacatccattatgaagttccaccaacttttcatcagttctagcaaaaccacttttaattagttcagcatcaatatttatttcactcatatcgttgacgatcacagcaatccgacgattctgtctatttgcaagaatatgatttaacaacgtcgttttaccagatcccaaatatccacttaacactgtcactgggactttattcgtcatagcttccatcctccaaatcaaaattattacgatttaaaatgtgtgcttttcataattcgttctgttgcttttctcgctccaataatattgcgcgaagctggaccgatctcgagctccgcaagaggccccatgacatatagatgtggacaccattccaggctttcttccacaataggatatccgcagttagaacaaataaggttttcctttgcaatcaaatgaagcagccagcgttgattcgtaagcgctgattcaaaacccgtagcaaaaagaacagtggctggtcgataaacagttgattcttttgtcattaatatattggattcactaaaaacagtttgaatttcactttgaacaatagataattttccgtgcttttttaagtgatgcaaacgactgtaaagttcagaaggaatcgagccacgatgtcttgcttgatgaatcatctttcttctaacatcatagttcttaatctgagaataagcgtccaaatacttagggccaagccaaccgggatcgctgtcaaagttatgtacacgaaatggatgacgagacattaatataacttccccaggaaaccgatgagacagaccaatagctgtatgggctgccgtaattcctcctccaataataagaagaggtggctttatgttgtccatgtttagttcagaatcaaaaatgtgataccctttgttccattcggttgcccatggcggatagtgcagttcattattaccaatcgcgataacactattttttgtataataaatttgttgatcttccgtttcaatttcccaaactggtccttgtttctccatttgcttcaccttcgtttgacaccaactatcttgtaagcaagcttcttcaaaaacggatgctgcatgttgattaaagagacctaatgaggggcgatcatagtaaccgtaaaaagggttgtcatagttaatcttttttgcatatttgtctaaactgaaaggagccacatcaatgtggtgaacagaaggcgaccgtagaaacggcatctgaatgcgctcggttctctccttccacctttcaagcggctcagtgtgaagatcaatgattaagatctcctcttttttaactttaccgctttttaaaagggacgttgcgatcatacaaccatgaatacctccacctataataatccattcatacatatgaccacccctcaaatcgtaactattacgatttgtattgtatactagataaatttataatgcaatccatcatttcaaattgatgctatatatcaaagaaaagaaagggatatgctccctttctaaaatggataaacatatggttctttaggtgcctcaatttgctttatttcatctggtagtaaaagcatcatttcttgaccgttataagatgtgttcgaaattgttccagttacctctacccatgtatcttcttcaatggaatgaacttgatcactttcaattaaagttccatagacacttgcatctgccacgcaacagttcataccaaatctagcgacaacgatttgtttttcattaaaatcgggttcacggtacacaaaacctttgatcgtcaatttttttccaataaattgctccaaattcaaatcgattgtcgtaataacatcgaggtaatttttattcgttatttgaatgtggttcatttttgaatatttttcagcaagctcatcgtatttattataatcagcagaatagccagacgaggtgtttgaagcaggagattcagctgcttcattcttcactcgctcatccatttcctccatataagcttctggatcttctagaaacttatccacatcttgtgtatttgaatctgacggatcttctgacaaggctgctgagctatctggcggttttgtatataaccctcccccatattgaatgcctctatttgccgctactgtactatcgattactttttgaggaagccctaatccacctagaacaggaaggataaataacagataaataatcgttttacgcacaaatgatcctttcatatgatgatcagcaccacagttgcattcaatctcctccgccaggtttgaggacatacttttaaaaaattgaataatccctattaaaaagaagcagccaccagcaaaatagacaaacggaagcattttcggagcaacataaagatggatcgtgtcacttagaactagcttgatgattaataagaaaaaacccattaagataatacttcttaaaaacatatgaaattgtagtgaagctgtcgacttcctctcgtccaagacccattcctcctctcttaattttaaaaaacgcttaccactaatacagaacaaaacgtaactaacgttatggtgaacataagaactaagacaaactttgtcttaaagtatgcgaaatacaacagcatatttttcaaatctagcatcggtccatagactaggaaagcaagtaaagaagtactagaaaactgattcgaaaaggaagctgctacaaaagcatctgcttctgaacagagagataaaataaacgctagtcccatcataactcccgttgattctgcttcatttgtaataaatgaagcaaggaggttgcggtcaagaaacccattgaacacactggctaaaaatgccccaatgatgaggtattttcccatatcgaagaattcatcgctagcatgatagaatgtttgcttccatttatttcttttcatcgtggttacggttcctgtttctccaataagttcttcctttgtccatcttaattgatttgtagtaccaaaaatccgaaacatcacaaaaccaataatgatggataaaacaaatcccaatcccattctaaaataaagtacagtaagatcctgttgaaaagcatagtatgtagatgcggctacgattggatttagaataggtgcagccattaataaaacaacaccaaattgaagcggcataccttttttaattaaccttcttaccactggaataatggcacattcacaaacgggaaaaacagcaccaagtagcgctgcagaaattaagccaagatacgcgtgtttcggtaacactttctgaagagtttcttcagaaacaaacgattgaatcagcgcagatacaaacacacctaaaagaacaaacgggatcgcttctaacagaatactaataaaaatagcatttacatttaaccattcactagggaaatcaaactgaaaatactgaagaacttgtgtattaaataaaaataagatagcaaagattaaaaataataagattcctataaaatcctttatactattgcttacagtatgaatcacacttccacctccatacccactttatatttttcttttaagactttccctcgcattttgtaaatcataattaattcgatttaaaatctattagtgcttctatcattctatgcccgtctagatcattcatgtcattttaagcttcatccagacattgttgaatgaaaattctggtttaacttttcttcgtttaaagaatctcctataagtataataatcggtttcatttcttctccaacagtttgtaaaaggcttagctttccagaggcaaattgaaaattatagttcataggcgcacctttaaatcgaacaatgcctttccctcttaacacttccattggtaactcagcaatccatttttcgaaaagtagtcgatctacctcagtaaacccatctatctgaatactccgaagagaagaatggttatgacgatgtcccacagcgctgtgatcttgattcgtcatgggagtatgaagatcatatctttttttaaataattcggtttcttgaatgtttccaaaagctgttctaaaaacaggaacgccctctttcaacataccactcattttcttatttattttcattatagaagattctgttattaaatcttctttattaagaatcaccaaattcgcacaagaaatctgttgttttaataacttacgaatctctttactactcgcaaagaagtgttggtgttcaagaaaatgacttccatcaacaaccgttaacatcgagttcaactcataaattcgggtaaattctggagtcgttaatgccgcttctatatctattggatttgcgacacctgttccttctattaacaataaatcaatatcttcttcgctaaacgaccatagtgtatcttttaaatcatcctgaatcgaacaacaaatgcatccatttaataatgtctttacgttctgttccttaaagtacgtttcctccacatttttcgtacctaactcattaagaataatgcccgtttttaacccttcctttttacaattttctatcatacttagaagtacggttgtcttcccacttccaagaaagccactaattaaataaactggtattttcatgcttcatttttcctccctatccattcgactctaaaatatcttaacacaaaacgtaatgattttgatttacaaatcgaaatcattacgataatattatgattacaatttgacgagggggagaactttgaatatcaaatacgggaaaatttcactgtgtttcatgactgtcttgctattagctgcgtgtgggggaaaagaaacaagtacgactgcttctaatgaaagtggtgaagaaaagaaactaagtatttatacaacgttatttccaattgaggatttcacaaggaaaataggtggggaacatgttgaagttgtctcgattttaccacctggttctgatgcacatacttacgaaccaacgacacaaacgatgattgatgtagcagaagccgacgcctttatctataacggattaggaatggagagctatgctgaagctattgctgattcggtagatgaggatgtaaagattgttgaagcttcatcaggaattgaaaccttagaacatagtgaagaacatgaagagcatccagaaaaagaacacgaagataagcatgaagagcactctgaagaggaacattcggatgagcatgaccacggtgatcaagatcctcacatatggcttgaccctaataaagcgataggaatggcggaaaacataaaagagatattaattgaacttaagccagatgcaaaagaagatttcgaagccaactttctaaaagttaaaagtgatttaactgaactagataaggagtttgctagtttagttgattccaaagatcatcctgaaatgattgtttctcatgctgcttatgggtactgggaaaaccgttatgacattcatcaaattgcgatttccgggctttctccgtcaaatgaaccatcacaaaaagcacttgaagaaattattcatacggctaaggagaaaaagttggattatgtattgttcgaacaaaacgtcacgcctaaggtggcaaaaagcctccaatccgaaattggagcaaaagcgcttcgtcttcacaatttatctgttcttactgaggaagatattaataacaaagaagattactttagcttaatgcgtagaaatcttgaaacactggatcaagccctaaagtaaaaatactattatttatattgaaaaacttatgtctataacttcattagagtaaagccctaccattttccaatgatagggctttacttgtatcaacttcttaatatccctctacttttcacttcttctaaccaggatggatactcattaaacaaacgattgtataggtcttcgtcgctcaccttatctaaatcatcaaacgggaagaaatcagcattatctatgactctaccaggcaagtcatctagtttctgtaagataccataattcgctttcccaatcccgataaattgccagaagatatttttactggaagctttctttaggagtgaggaaatctcagcatccttgtaaatacctccgtcactaaaaaatagcacataagttggcatatcctctctcggctcttcttttgtatatttcttcataatgtctttaataacagcaggttcgttattaccaactcctaatccacggaagaatttcggtgccggatatgtacgcttcacataatcttcaaagtcattttctgtcacgcttggcgctctcatcgaacgatctccaaaaaaccaaacgtcgagtacgccatcatcatccatatgagctgcaacagctagcgctcgttcgaatgctcgctgaacggttccttttgaaaagaggtgcgtcatcgatccagaagcatcgatcacaacagccactcttgctttctcatgctcaatgtttttcttttgtaaggaaatcacaacttgcttcttcagtaaatcgattttcgttaaattgattttaggaggtgtctgccgctttgtttctattctgcctcttcctcatcctctaccgtaacaccatgcgcttcggcgagcggctttaaccctccgttaaaccctcttcctactccccgtagcttaaatgttcccttataacgatataactccgcaacaactagcgctttctcttctttagcgtcagttacatcatagcgaacttctgttgcttcagatgaagcgactaacgtgcaaccatcaacgtcctgaaatttacttgccccatcaatcgtggcagtaaagaagcatttttcaatttgtgaaggaagttcgtctaacttaatttgaaaagaaaccgacttgtcattcaactgctgaaactgaacagcgcgtgaaggatcagcggattgattatagaaaaccatgtaatcatcatttggaactcttccattctctcctactaaaaaacacgtgatgtccacatcgtgtaaagaacgaagccattccattttcacctcaatctgaccttcttgagctattggagcgttgcctcccgtttgtaaaacaagtgattgtagagccatcgtgatcctccctatgattggtttatgatccaattatagcaagaaaatatggttaaaaaattgaaacatttagcccaaaaaaaagaaccaagagaataaatctcttgattcatcttcattctaattagtaagcaccatcagaataagtaagctcatagctatgagaataaatctcgaaaatattgccgaacggatcttctacatacaccatgcgatatggcttttcgccaggatagtactcacgaattggcatacgctgtttcccaccgtgctctacgattttttcaaccattccctccacatcaggatcctgaatacagaaatgaaaaatgcctgtcttccagtattcgaagttgttttctggcttttcgttttctggaaactcaaacatttcaacaccaattttatctcctgttgagagatgagcaattcggaacgtattccaatcgtcgccaaatacgtcacggcacatttgaccgattggagaatcatcattttgcacatcagaaggctccattaaaatataccaaccgaatacttctttataaaatttaatcgcctcttcaaggtttgggacagatagtccgatatgagaaaaacttcttggatatggtaacatagttttgtactcctccttagtgattatgttctgtcaacacacgtttattatactgagaacaaaaaaatcacgtaagaccgcacttttttgtgcgatactaaccaaaaggtaagaaaggagtcgatccactatgacttctccagtcgatcaaaacggaaaattgaaatgctcgattgaatatacgttaaagaaaatcggtggcaaatggaaaacggtgatcttgtggcacctctgtgttgatggtcattttcgctacaatgaactacgcaagttactaccaggtgtcacacacaaagtaatgagtcagcagctaaaagaattagaagaagaaggcttcatcgaccgcaagcaagaaaataccgtccccccaaaagtggaatattcgattacggaaaaaggaaaaacattgatgccgatcttagaacaaatgcatttgtgggggacagagaatcaaaaataataagtgcctggtcctcctagttagcaaagagtgacaggcaccttttttcatttatcatcgtcaatctcttttcgaaatctcgtaaattcctactttacttgccactaatgcttttgaaactaccgtcgtaaagagcgacacgtcaagcacaccaggtatttctttcagctttgtttcaagttgcctaccatcctgctcggcctcaaaccacacatcaactaaaaagtttccataatcgctaactgtatgtccatccttcgcagaacttgaacgcacttctgcctttccacccatctctcccgctttcttttgtacaaatgctagtgaatcctgcaagatctccagcacgactggatgcttatacgttaactctggaacaactttagaatcatcaacgagcaaaatatattcttttgccatattagcaatgagtttttccagcgtatgaatgccaccaccgctcttcagtgcatgcaacttctcatcaacctcatcacaaccatcaaatgcaacgtctacttcatcaacggtacttgttggtagtacttctagtccctgatttacacatagatgcttcgtttttagagatggggttaccacttttacatttaacttttcttccttaataaattcaattaaataaccaattgtactgccaccaccaagaccgatgatggtatcgtctgttatgtattctagagctgctttggcacacttttgtttcatgttcatttttggcaccttacctttttataagtttaactttttgtaagaaagcgagctttggttagttttattgtaacaaagtgagaagtgaaaaagtttagaaggataaggaggttcacaaataattgacgaataagttctttgcgcatagtacaaaaccttaatactcggggctatctaacatgtatgggaggggttctgtaatgaaaatgggagtatggtttcttaaattggcagctctttacttcctaattggagtgagtatgggattagtgatggagattatcgaggatcacagtttggccggcgctcatgatgctcatattaacctattaggttgggtttcaatgggattgttcggttttatctacattctattccccaaagctagtgaaacacttttagcaaaacttcatttctggctttataacgcatcattccctttatttatgcttggactatctttcttccttgcaggcaatacttccttaaccattcttctcatgatctttcctaacctcctagtcttaagtgtcatcttgttcgttatgaacatgttttggaatttgacagcagaagacgttactcacatatttaaaaaaaatgaaaatacatcactctaaatctattaaggcgcttaagagtaaacatagttaaaggcctaacttcctattggaaattaggcctttaactataacgtagatactttcaaagtctgtctcctagttccgaatacaagttattgattagaccacactgacttcaatcgatttatctccatcgaatgaataaacccctcaccgctaatgtataattccagactattactatcctctttcggaaacaccaaatttgtaagcaccgtttccccaccattcccaaaaatttcaatggaagagcgatcaattaatacggtcaactgcaaacgtttatgaggagactccattttcactgtctgtctacacgcaaaagacgaatgaaaagaacaatctccagatcgacttcgatcaaaggttagcatttctgttctcgtatcatattcgatgatcgtctcttctttctcagactttaagacctttaagccaactacttctgataaaccagggtcaagatcaatggttatcgcaagtgtgtttccacgaataccagctagcacattctctcctgattgtaccttttgttctttaaacagcgctaaaggctttttaatatttttaagttctgtaactggcagttgggtaagttggacaccagccgatgtggttttcagtactagttctctaggaattgtcatcgcgcttcgccagccttctgtaggcgtttcatttgcgtagcgccagttactcatccatccaatcaaaatccttctcccatcatgatctggtaagtctgaccacgttacgcctgcgtagttatctcttccgtgatcaagccagcacacatgatctggctgatgatcgtttcgaaacgtttcgccatcaaattcaccaataaaatattgtgtttttgaaccgctttcgacatctggatggtcgccaaggctaacgagtaatacccacttttgtttggatggatcgtgatccactggtagtttaaataaatcagggcattcccatacaccctgatgcgacccttctttctctccaaacgtactcgcaaactcccagtcgattaaatttaatgaagtgtaaatactaattgattgccccgaagcgatgaccatcacccagcgattcgtttctttatgccagaaaactttaggatctcgaaaatctagaattcgaggttctgaaaggaccggattccctttataaaatgtccagctcctcccattatcgctgctgtaagctagactctgcctctgccgtggtctctcggatccaggatatgtatccgcatgagtgaagattgctacaagaccactttgcccattaaagaaaccagtagtatcatcccagtcgacaaccgcacttcctgagaaaatagccccgttttgatcgggctttaacgcaatagggaggtgctcccagtgaattaaatctttactcaccgcgtgtccccaatgcatcggtccccacacgctactataaggatggtattgatagaataaatgatattccccattaaaataaaccattccatttgggtcgttcatccaatttgattccggagtgaaatgaaactgaggtctatgcttctctgaatagttgcttcgaggaatcacttgttcaacatccaatattcagcaccctttccgtcaacaaagtttttaactaaaccattaattgatttgtagtttactaattgcttttaggaaccaataactaataaagtaagctagaatacttgtgataaagaatagtcctgctggattatctaacaagaaatagactgtcccgagggtgacaacaccaatgatgatcgttgaatacggacttgctacaacaagaaaaaatgaatttcgcaccagttcgtgccactttgcttttacatgaaccatcatcggaaacaagtatatggttataagaataaaaatgatgcttagtaaaacactcacaataaaaatcacaatttcaatcactgagccagatagagatacgatttggaaattaaggtataaagaaagtccaactaaactccaaataagagataaaccaaagctttgtttgaaattctccttaaacaacttaaagaatgtaatgaaaacgccagcttttcctttttgaagctgccacgttctaacaacgccgaacatagccgctgttgaagggaaaattgtgatgattggaacgcacatgatggcccatatgaaactgagaaagaggaaatccactgctttttctaaaaaagaaaataccttgtatttatgatctcccaactcactctcctcccgtcgtttgcgaactcccttactactaacatgaacttcgtatttctaagcttgatggcaagctcacacgtgatgattctttctcgggattttctaaacgagcgagcaacaattccgctgctttttctcctatttcatgaatcggctgtttaataatggttaacggtggattggtcgcttctgtccattcatagttatcatagccaataacagccatctcttcagggacttgaattttgcttctatttaacgtaacgactgaacctaatgttagaatgttgttcccgatcatgaccgctgtgcatttggattgctcaagtaaaaacgccatagcctttttgccagcttccaatgaggcttcgtcgatcacaatcattgtttcatcaatctgaagattgttttctaataaagcatgcttatatcctctaagccgttcatcactcgtcgttaggccaagtggtccggatatatacccgattctttgatgtcccttatgaattaaatgaatcatcgcctcataagtgcctttgaagttatcgacaagcacacagtcacaatcaataccctctggctttcgatcaataaatacaatcggtaactgatcttcaaattcttttaaatagctgtgatctccgtatgttggagccataattaacccatcaatcatttggtttttaaacatattgatttgttgaatctcattctcaatttcttcgtttgaattacttaaaattaactgatagccaatttccttaagcttcttctcaatgctgtgagcaattgacataaagaaaaaacccgaggtatccatttctttagcaggaatgatcaaaccgatcgtttttgaactgctgcttcgaagacttctagctacgaagttcggactgtagttaagatcccgcatagcctgatatacttttttcttcgtattttcagaaacatacctcgtgccgttaataacatgagaaacggtggccgtagagacacctgctttttgagcgacatctttcatttttgaacgcatattgcttccatctttaacggtgcccatatctttttcacctacttatcaaattactcgctcctttaaagctgcgaatcacgtgacgcgtaatcgattacgttactttttataaaagaagctcttaaaaagagcttaagtaaacgattacgtatactataacattaattatagttattaaagtaagcgctgtcaattaactttctatattatataaaaagagtatatgtctacaagaacgagcttaattcccgtttataatactggctttatttaactgatagatagccaaagatttcatggttacttcaccatcgatagcgtatagctctacctgatcactcgttagctttggaaagatttgatctgagaacacgacctgaccatcattcccgaaaacttcaatagaagatcgatcaacaagtaaatggagtgtaactatctcatcagaaggcttcataactgcttcatgcttagcaccaaaagaattgctaaaacttgtatcaccagagttagaacgatctaaagataacgtagaatttgtcatgtcgtaactcacttttgtgaattcgtcatgacctacccgaactttaaaaccaaattctttcgccgttgattgatctgtttgaaatttagcaacaatttctaacgtatctcctttcacgtctgataatagattctcacccggtacaacaacttcattcgtccaataactttcttcccctctcaaactctgaagctcactgacaggagtttgaacgaggcgaacacctaaattcgaaatacttttcaaatttaattccttagggattgtcattttgcttcgccaaatagaagttggaatcgcttgaccgtactcccaattattcatccaccccatcgcaattcgacgcccatcaggcgtatgattaaaggtcagcggcgcataatagtcagccccaaaatcggaaactaatatggtactcgctaaattgtcattacgaaaggtcgttccatcaaaatcaccaataaaatattgcacacctgacccaccagcaggagcacctttactaagacttacctgcatcacccatttggtgttgtttggatcaccatccacaggtaattggaaaagatcgggaacttcccaaacgccttcatgcgatccttgattttcaccaaagtcactcgcaaatgtccaatctttcatgtcctccgaatgatagattcgaacaaattgcttttggaatttatcttccactgcaagcagcatcacccattgatttgattcttcatgccagaacactttcggatctctgaatactgaaaattggtcgatgtttgttaggactgggtttcccgcatacttctgccatgagcgaccgttatcattgctgtaagcgagactttgactttgattcccgcctttttcatgcgtaaacatcgccaccatggcatctttcccaaacccagccgtattgtctttatcaacgacaacactacctgaccatataaatccgttctcatcttcttctagtgcagttggcagacgtttccagtttactaaatccgtactaaccgcatgcccccaattcattggtccccatgttatgccagtcggattatactgataaaacacatggtattcaccgttatgataaacaagcccattagggtcattcatccaatttttttcgggagtataatgaaactgtgaacgatacttttcgtatcgctcacttgttaaaagatcctcttctgaattgaatacatgaaaatcatcaacattgatatggccccatccaccggtagccttgtccaccaccttgataaatacctcttcacctatataagaagaagcgtcccagtatacccttttatactgttcactttctgtaccggttgatttaaagagctccttcccatcagccgcacttacgagagacgcatataagtgatcactactttttcctcccccaatcaaaaagtcaatccacccacttccatagagtgtaaagggctctgattgcatttcacctatttgtgcgtctccaccatccttgaagttccacaagtgatacgcgtcttgatgattgaagcaacagtcccactcccactcttcatcctgcgttacatcttggtcactaaaggcttccccagtaaccgtccatccgctcaagtctcccgtctcaaaattggggttcgctatcgttactttatgcggaggcttcacaggagcattcacatcatcaatgctaatgtgaccccatgaacctttggaacgatcaacaacctttagataaacttgctctccaatgtagttagaaacatcccacttaactcgggtataaccttcctggttccccccacttactttcattagctctttcccatctgaacttcttactagtgcaacgtaaaggttataaatatcgttccctccagaaacaaggaaatcgatttgtccatttcctccaagcgtgaatttctgtgaacgtatcgttccagtctcggcatcatcaccgttatgaacaccataaagatgatagcgaccattttgattgaatggacctccccacccccaatcatcagcagacgttacatcaagatcgctaaaggcatcgccttccataacggtccaacccgttaagttacctgcttcaaaatcatgattcactaactcatcatgagcgggctcgtcaacgacggtaatctcactcgttgccgtatgacctccgtctcttgtttcagctttaatcgtagcattgcctggagaatgagccgtaacttttccattcacaacagtggcaacgctcggattacttgaagtccaacgaacctctttattcgttgcttgagctggcgtcacttcaggtgttagtcgttctgtatctccaacaattaattctaacgaacctgaattgagtgataccccactagcgttcaccttttcatacgcggaattcattttccaaacctttaatgactttaccgtgacagattcactttgatcattcgcccagagctgaacccctttcgcatcatctctggtcggataggctcttgtcgttaacccttttcgttcatttaaataagcattgatctcagaacggtccacgtacacatgcagattgatcgtctccgaatcaatatctacctctccaccctggtaccatttttccacatcgggatcgagacttgatttggttcggttcacccaaaattccttgctactttctttgtaatacacaatcgtttcttcttccccattcggtgaacgtcttaagctaatccccgcttcatttgcggatccattgtctagttctaactggatctcaagcatgtctccttctatgttggaaagaagttgattcgcttcttcaatagacgtgtccgatgtaagattaatgagctcttcgcctcgtaattcgttcaattcttggatcggcttcatccctaactttccgtcacctcgataaaaaacctctgttggcaaaccataattatgagcatatcccgcatcataatcgtcgtttgccggtcgcctcccctgcgtaatgctatgaatgacggttctcccatcaggcgttaccattccagccggtccagtaaaatggtctccaacatcgagtagttgaggcgtttcattatctggtgtgaacttagccgtctcaggattccatgtcccaatccaatagtacgtatacctcgactgatactcctctctttccattttggcagggttgatcaagaagatatgtttcccgctatcacctaatggaagcaaaatcggcagctcccaaacgcgtcctgtttcgggataggtttcataatctccaacgaataagtctccttcgaaggtccaatcttcaaaactagaatcctttgaagaatacacaagagcggtacctccaactgctttgccatcagatccttccttaccagaagttactagcatgtaccaggtgtcaccatccttaaagacgtaaggatctcgaaattcacccattattccctgtccttcttcttgatctagaatcacttctgaattcttttcccatcgattaagatcgttatcaccatcctgcaaaaacgtacttcttgctaaattaatgcgctgattaggctgatcacggtcatcccccgctgtatagaaaacaactggcacaccgttatcatccacgacagcaccacccgcccatgccccctctggatcaacatcatatcgcccggggataacagcatcgtcaacatctctccaatgaaccatgtcatcacttacaagatgcccccagcgaatatgattccagtaaggtcctctaggattactctgatagaacacatggtattgaccattaaaataaatgggaccacctggttcatttccccaatgatttggaggagacatgtgaaactgcgggcggtgttgatcgtccgctaagagacttcgatcggtttttacatcagcggttggtagattaccatttaaagcgcttacataagattcgtaggaatcttttacattcccagcactcaaggcttgattgtaaattttcacttcatccataagcccactaaacatatttaaatcaaagccatacaaccacataccatcattgttttttccaatcaacaaatctcttacactcggtttaatcgcagctccagcatcaaattttcgtgatgataccttttcaccattctggtatagaatagcttctccagttgtgctatcgtacgttgcgacgacgtaagaccactcatttaaagggagtagtgtatctgacatcacttcatgccaatcgtctccagtaccaaactgtaacccccacgtaccatgtcgaaaattccctagtatgaatccttctttcttttcccggttatgctgattaacgattgcagataagcgaccttcgtctccatgttcaaaattccttggagccacccaggcttcaaccgttatagcttctttaggagctggtagtttagtaggactatgcgtaacccaggtggaatacccatcaaatagtaaagcaccgtttgaaatgccatcatccttccacagtggatcctgtccctcctgaaagactcccttactaagatggtaatcaattaagttagtttcacccgttacttgctcgagtgtatccttacctgtaccttcatctaaactccagtgagcgattaacccatcagcaaacttagaattgttcgttcgaaaatcatcaacatttatgtgtccccaggcacctttagcattatctacgattttaatcattacttcttcaccgatataatctgaaacatcccaataaacgcgttggtatttttcagtatctcgcccggtttcttttcgcaactcttttccatcagaaattcttattagagcaacatatagattctcctcatcattccctcctccaataagaaaatcaattccgccattttgatcgatcgtaaatggctctgagtgcagctcgcctacttgatcgtctccaccatcgttaaaattccataaatggtagcgcccctcatgcaaaaattcatctccttcactccactcttcttcatgaacaaggctcttcgggccaaacgcatctccgcttacaatctcccatccccttatttcgtaaggcgctagcgcagtatattcgaaatcatgattataaatagaaggctccacatggtcatgtaaggaaggggtcgcaggaacattcacatcatcaagattgatatgccccgtagtcgttgaatcaacaaccttaatcctaacgactgtacctatatgagcagaggcatcccaactcttcttggaatatgtatctgttccagtccctgtttccttcattaattctactccgtctgattctctaacgagagagatcgataagtgatccgcatctgaatctccccctgtaagaaagtcaatctgaccatctcccccaagagtaaaggtttcagactgcatgaccccaacttttgaatcgtcccctcgccctccccatatatgccagaagttcttttgattaaaggtttgtttatcccaatagtgagattcatccgttacatctttcacattgaacgcgttaccacttacaattttccaacccgttaaatcacctgtttcaaaacttgggtttgtaatggttgtttgagcatgaacagggttcgaaatattcattggaataaggctacttataactaataagacagtcagagaaaccactttcaacctacagcgattgagcatgagtttgtaaagctcccttcaaaataagtgacttatccattcgggcaacttgggttataagcttttgcatgagcacagaacattaaaacccaggcttcatctcccaaacttccatcgacttcactgttaccgaaccattcgcccatatttctaatcctaatgcttcgatatcagggtatactctcgtcgttatactttttaattcattggcatagcactctacgattgaacaatcgacgtaaatatgaagctttaacttctctccatttagaaggagttttccactttgaggttgggccgggtttgaaccattcgttttctttttaacattcaacgtctcttctttactgttgtagtaaaggaccgttccgacattcccgctatcagactttaatacatttacgccatattcactcgcaactgcatcttgaaattctacatagatttcaagcatatttcctttcacatgagctaagatgtcattggtctcttcaacggataggttttctaacgaaacgagttttttcttacggagctttgttaattcttcgatcggcttaacgcctaatcttccatcgtctcgtaaccatagttgcacaggaagacccccattatgtgcccatcctgcttcatattcatctttaagcgaccgccttccctgggcgattgtaaacaaaagcaagcgtcccgttttaggatcaatcatggcacttggtccagtaaaatgaaaatccccaatatcaataagctgcggttctttctgatctggtataaaccgataacgctgtttatcccatgtcccaatccaatagaacacttctacatcagcatttcttccaacaggactaatgataaaaagatgcttcccctttccaagcggaagtaaaatcggcagttcccacacttcccctaagaaaggatactcctgatctttatcatcgtagagaagacctttgcatccccaatcaactaaattatcagaagtgaaaagaatcgcagctccactcacgccttctattccagtgccgacgatttggtaccagatctctccttctttccatacaaaaggatctcgaaacccatcatgatgcagacccatatgattaggctgaatcgttacgggtacgggatgttttttccatttctttaaatcgatatcttgattttccctatacgtacttctcgctaatcctgtcatctgatttggcttttttgatgaattgcctgctgtaaaaaacaaaacaggtaatccatcttcatcgtaagcggcatttcctgaccaaatgccgtctggagctaaatcatctgcttctgtttcaatggcaataggtaagtcgcgccaatgcaccagatcatcactaacccagtgtccccactgaatgttgccccaataaggcccctgtggattatgctgataaaacaaatggtacttccctttgaaataaagaggcgcatgcggctcattcatccaatgaccaggtggtgttaaatgaaactgtgggcggtaaggatcacgatcataaacgcttctgtcgatcgcaatgtctcgataaggtaagggcggaatctttcctttataagctaaaagatggttggtaaaactctttgttatttcaacttcatttaatgctcggttatagattttaatatcatctagtaaaccactaaacatatttaacgaaaacacgttttcaatcgtcatcgcctcgttacttttaccgattaaaagcgcttcatgacttatagacatggacacgtcttgaccgattgttttctcggcaactttttcaccatttaaatacaatttgatatttccttcttgaccgttaaaacttgccgcaagatgcgaccactttgacttaggtatcggagaattctcagcccacacttcgatccattcaccatctataccaatctgaaatccccatttcccatgcctatgaacacctagaataaacccctcattcaattctcgattatgttgatttacaatacccgtcagtcgctcatcttcaattccaccaaatgaacgtggagctaaccaagtctcaatggtaaacgcttgatctaatgaatgaatgccttcttttcgttcaatccatgttgaatagccatcaaatagaagggcttggccgttgattccctttcgccactgtgggtcatgaagaggtgaattggaacgacctttaaaaacatagtggatcttatctttattggagctatcctggacgaacttccctttgccctcagaaaatgcccaatgtgctactaatgattttttcaacttaacattcgacatcaaccacactcccaatttgtaaagaaagttagaacacgagtgttctaactttctccattgtgcttattctctattgatttttcttaaagcgatccaaaccttcctgatagatttccattaagcgactaagacccatgtcttcaagctgcttcttgtagctatcccactcctcgtttacgccgccttccattagccactgtgctttcttttgattcgtaaattctttaatatctacttctagacgattaatttcatctagttcatcaggactaaagaaaatttgcgggtaattctcgtcttcaagatacggcgcatagatcgaattcaaatcttccaaacgctgttttgcacgaggttccatttcaaccgtttcttcaaagtcttctttcaaaatcgctaccggtccatttggtgcaaccttttgtcttaattcgcccatcaccacgtcgtcaggctgttcttttaaaacgagtttcccatctttttcttcaaaaattgtaccaataggtccccagttaatttgagctgacatctttgtttcatataactgatcgacccaacgcatcgtaatttccggattggcatttgcggaagtgatcgcaaactctccacgagagtagtcagagttattagatcgaccgacaatttgatcgccattcggacctacaagcggtggcaataagacataatcatcttttaattccggaccgacaacctcttcagactcccaccagatataagagccatacttttcgtttttccctttagcgaagtattgagagacatcttgagtaaatgattctttatcaatcaaaccttctttcatccattgatgataatagtcgatggcttctttatactccggttgaacagctgtatagatcacttttccatctcttacaatgcgatgctcaacattatctggcatattaaacgccgcaaacatatccccaaagtttcctgtccaaaagttgaacatgaaacttaacggaacttcatcttgcttgccatttccatttggatctttttctttgaaggcaacaagaacatcatgatactcttcaagcgttgttggcatttccaagcctagctcatctaaccaggttttattaatagacataaagttcggtacagcgccaagaccagcttcttctgcacgagggagcgtataaatatgcccatcaggagcagttaccatgctttttaattcaggtcttttctcaaacaatttttgaatattaggcgcatgctcttcaattaaatcttctagtggaataagcgtgccattttgtccatactttacaatgtcaagatccgtaaatttagccgaataaaacgcatctggcaagtcaccacttgcaagcatcaagtttttcttttcttcataaccgtcatcaggtatgttactccattcaattttcacattcgtctcatcttctaacgtattgaaaatttccatctcgtcgtattttggggcaagtggtgctttgggtgatacaaattccagggtaacttgatcgtcaacaattggaagtccttctttattaaactcagcagattcggcctttccatcagaactactatctttcgaagaacaagcacttaatacaagaatgaaacagagcattaaacatatgaacggaaaagaccaactttttcgtttacccataactaaattccccccgaatggttttaatttacggcaatcacaagcaacttcagtaaagcaatatgactagcgatccacctcctagtaatgtagtaaaacaaatgattaacctttaatacttccaattaaagctcccttcacaaaatacttttgtatgaaaggatagagaatgagcagcgggatcgccgccacaataatgacaccatatttgattaaatcagcaactctttgctgagcagcaaacgattcaacatcgccaaccatactggcagaagcttcattttgaatcaggatcgatcttagaatcagctgtaacggatatttatcttcgttatttagataaattaaagcatcaaagaacgagttccagtgcgtgacggcataaaacaataccattacagcaataatcggtttagatagcggtaatacgattttcaagaagaatttcgtatttgaacacccatccattttggctgattctaacaattcatctgggatcgtcgattggaagaatgttcgtgccacaatcagattccaaaccgcaaccgcctttggaataatgagggcccacatcgtatcgaccatccccaggtttttaacaactaaataggttgggattaatccccctgagaaaaacatggtaaagacaaacagaatcatgaagaaatttctacctaccaagtcttttctcgagagcgcataagctgccatgagtgttaacgtaacattcaccaatgttccaacaacggtgtacaacaccgtatttttgtaacctgtccagattcgattatcctgaaaaattcgttcatatccttcaaacgtaatcccctgtggccaaaaccatacgtcgccattgtagacgctatcagggttactaatcgaagcgatgataataaaatacagtgggtacaatacaactagtgagagtgtcgtaagaaagaggagattgatgagatcaaatattttatcctctttcgattttcttgaccataacttcgatcgattcattacaaattgagtcattccatactcccccttaccataggcctgaaccagataatttcttggcagccctatttactgcccataacaagataaagttaatgactgcattaaacaatccaaccgctgcagcaaagctatactgagctccctgcaaaccgactttatacacataagttggaataatttcacctgctgaaacgtttaacggcgtttgcattaaatacgccttctcaaatccaatgttcatcagatttcctaccgagagcactaataaaatcatcgccgtaggtaagatcgctggaatatccacatgtagaattcgttgccatttattagcgccatccataatcgccgcttcatgaacttcaggactaacaccagctaacgcagccagataaatgatcgctgcccaacctgtttcctgccacaatcctgaagaaatataaagtggtttaaaccaacctgcctgcgacataaagtgaaccggttcggccccaaagatcatgagaaaattgttaattaagccgtttggtgagaaaaatacatacaccatacctaccaaaacaacaactgagataaagtgaggtgcataaataacggtttgaacgaattttttataacgttgattttttaactgatttaagagaagagcaaccatgatgggtaacgggaagccaaataataactgcaacacactgagctcgagggtgttctctaacaaagtccagaactggaaggaattaaagaaacgttcaaagtgttccaaaccgacccatggacttcctgaaacccccaatgtgggcatgtaatcttgaaaagcaatgagaacgccatacatcggaacgtagtgaaagacaatgaagtaaattagcgtaggaagtaaaaataagtacaattcataattatgtaaaacctttttccaggagctgttgacctttggggcactacggacatttcttctaggtaacgctctaagtttcgtctccataatctctcctcacctataattaatcgtttacgtaatcgattactttttgtgataaaaaaaatgaattccccatggatgattcatctgatcagtctattatcataaaaagaagaactcatttaatcgtttacgtagatgttttgattgactttattgtaagcggtttcttgttgcgtgtcaactggtttttagaaaattgaaacagacattttgcaatttaggacaggaactaaaccaacaagagtaatctcgtaaatctcagttcaaaaattctacctaagtatattttctacttattagctgaacctattgaagatgaaacaagaagataattcatgtggtttgaagggaaggtaattatgaaagctgttacttaccaaggaaaacaatcgataagtgtaaaagaagtagaagatcctaaaattcaagatgcacaagatgtcattattaaagtgacatcaacggcgatctgtgggtcagatttacatctctaccagggaaacttcccccttccgatcggttatgtcattggacatgaaccgatgggaattgttgaggaaactggtccagatgtaacggctgtaaagaagggagatcgagttgtcattcctttcaccgtcgcttgtggacagtgtcactattgcaatcatcacctagaaagccaatgcgataattcaaatcctcattatgattctggtggattattaggttactccgaaaaattcggtaactatccaggtggacaagctcagtatctaagagtgccattcggaaactatacgcctttccttattccgcaagattgtgaactagaagacgagcagttactctttttatcagatgttcttccaactgcctattggagtgttgagcatgcgggcgtaaaaaaaggagatactgtaatcgtattaggatgtggacctgttggactgatggcacaacaatttgcctggcaaaaaggggctgaacgtgtaatcgcggtcgattaccttacttacaggttaaatcattctaaaaaaatgaatcggaccgagatttttaattttacacaatatgatgacatgggagaaacattaaaggaaatcacaaaaggtggggccgatgttgtcattgattgcgttggaatggatggaaagaaatctcctcttgaatacgtggagcaaaagttaaagttacaaggaggaacgctgggagcaatccaaatcgcaacaaaggcggtaagaaaatgcggaacagtccaaatcacaggtgtgtacggaggcttatataacatgtttccattaggttcctttttttctaggaacgttactttaaaaatgggtcaggcccctgctagaggatatatgcccgaaatttataaacaaatcgtaaagggagaaattgatcctaccgcattgattactcataagcttccattaaaagaagcttcacacggatataaaatctttaataaccgtgaagaagattgtataaaagtggtgttaaaaccgtaataaataaacagggcttttaactaaaagccctgtttttgttaggtgtgaaaatttactttaatttcttcaatggctctgttgctgggccttcgatcacatttccgccatattcaaatcgagatccatgacagggacagtcccatgacctttctgctttattccaatttagctcgcagcccatatgagtacaggtgttatccacaatagaaatatttccttttttatctttgtaagctcctacactttttccttcatattggactacagctccttcatccaaattaagtgtttggatgtcttctttccttcgatccacttttccttttacaaattctttcgcaacacctacattttcttttataaaactttttacatgttcaccatgaagttttcttgacggcgagaatagttctgcataaacgttatgttgattcgcaatatcatcactaataatttttgctgcgatcgtaccgtttgtcattccccacttcgcaaatcctgtagccacgtaaatgcttgaatttctttctgtaatcggaccgatgtaaggaatgccatccaatgtaaataaatcttgggatgaccattgatacactggtccaccagcgttaaatgactctttagcgtatgttaggagattttgataacattcatctgtattttccttttcacctgctggatgaccttctcccccaataatcagataagtctctccctcatcattggtaaagttacgtaaagaacgcttaggttcttctgcactcaaatacattccctcaggaatcgttgaagctcttactgcaattgaataagaccgttccgcgtggagcctggagaaataaagaccctcaaaatctttaaaaggaaaatgcgtggccatcactgctttattacagtaaacagatgagccttgctctgattgaacgtttaaccgatcacctttttcaatttcgaccactcttgtattttcataaatctcgactccattttttctaaggaaattgactaactcattaaggtacttcacagggtgaaattgcgcttgctcattcattttaacagcatttagaacctcataagggagatcagatttttcaacaagactaccttttataccgagtctcttataagcttttgcctcggcttctacttgacccgccccttcttttgtccttgcatagacgtaagcatcctgtcgtaaaaaatcgcaatggatttgttgttcttcaataattctcttcatcagttcaatggcctcttcgttcgctttgtaataggtttgtgcttcttctaccccaatcttatcgatgagttggttgtagatcagtccatgctgggaagtgattttagcagtcgtatatccagttgtaccttcaattaacttacgtgcttccatcaaaacgacgctgtatccctgctttactaaataatatgccgtagtgattccggtaatccccgccccaatcaccgctacatcgacttctctatcctgacttaatggggggaacgaagaaatttcaacatctctccaaattgcttgctgtgtcaagccatcactctccttcttgttcatctgtgttatggtatacccgtcatcgaggagtaaataactggatatcgaaatcaaaacattttcaaagataaaaagccccatatcagtgagaaagggacctacgaatttatgatcgttcggcaagagccaggcgggggcgcgttgctcgaaaccaatggaagcaaagaataaagataagaacaatatcaatggcatctcccccataatacatcagcatcgcaccgttttctgcttgctctttagcaacacccatcggtggataagcatagagatattttgaaagaataccgtgaccagctaaagcaatgatgaatacaattgaacgataccaaaatgaaagccgatgtggtcttggatcgatatagatgatagacacggtaaacagataaccggcaataaatacatgaaggtgtacgatgagatgaaccagcatgttttcatgcataattgaatagagattagtcgtgtacaataaccagagtccgcctatattgaggatggatgcaacaatggggtttgtaagaaagcgtgatggcaagctttgtagcacctttgagacttttcttgctgaagccgtaggtaatgttcgaagcataagcgtaactggagcagcgagtgccataagcagcggcgcaagcatccctaataacaaatggccaatcatatgtacagtaaaattcatatgaccaaaacttgccaccggaccagccactgcaagaatggcaaataaaacgcctaaaacccaacaagttgttcgatacatcggccattgtttatatctttgatttgagcgaatcacagcaaaagtatacaaaatcaacacaatcacaaaaggcaatgctaacaggatttgaggaacgattcctattacatccgtatggatactatgattagcctcgcccatcaacgactctcttttctccccttctccttttcaaaaggaaaagcccagcgaggatcatgataacagctgatccattccacacaagatcgtatttcataatattttctacataacgtatctggtggatttgcatcagcttgtgttgaatggttccatcatatagttgaaaacctccagctcctaataaaacaccgccagaccatcgcttaagactgaaaacgcctctccttctaagatccgctaaaataaaaagtcctccaatggtcgcaaaccaactaaacgcgtgaaaaagcccatcagaaatcaatcccatatccgtagtagacttatcatagaaatgatgccaacgtagcaattgatggaaaagcaactcatctaaaaatgcggcaagaccaactccaaatagtaatcccgaccaaagattgcgattcttaccaaatgcctgacgttgggcttccgtggatttagttgtcatctttttactcctttattaaataatctttttactcactaatttttaccacgaactaaatcttaataaactaaatcttaataaattaaatccataccaacatgtttcagtacgtttctcgcatattgagacaattctacaaaagacattacaaatgaatcttcttttctatttatgctaaaatgattaaacttgctgatacttcacaaaggattgaacgtgtaacctacacatacaccactattaaaggagccgtgtacatgaagaaaacaatcttacttgttgttgcctttactgttggttatttgttcgatctgatgaatataccagctggatggctactgggagccatgctagtcggggcattttacagactcgttattgatgatatttcctatcctaatcttctttttgatctcgccttagcaatcattggcatcagtattagccttagtattaaaatcaaaatgtttaaagaggtcaccagttacatactcccactcttagtctcgatcacgatcctattagttgccagttggatactgggaaaaatcttgtcgagattttcaaaccttgatgcgaaaacggctttattttgctgtttacctgcaggagcttccgtcatgatggcactcagtcgagaatataaggcgaatctcggtatggtggctgcctttcaaacggtccggattatgatgcttgtctcaacgataccgattgtagctggattcatgacttcctttatctcaactgaggaggtacaagggaatgcagttaaaaccgcttcacaaatagacatgccaggttggctcgcaatcatcttctacctgaccctaaacggtctaaccctactattgtcaaaaaaatggcggattccaattgctcccttcctctatgctatcattgttgggtttattttccataccttcattcagcctctcccttcattaccaaaccttggtgttgggatcgggatggctatgttaggtgtcattattggcacgcgattcgatcgaacttcactcgtagaaatcaaaaatattggatggacaagtgcgggaattttgctggctttcttcttattaacttttgtcgtcacctttgtgttttatctcatgacaccacttgatttcatcacgagcctactagccattgttccagcaggcgcaccacaaatgtcttcggttgctgcctctcttcaactagacgcaagtattgtcgctgccatgcaagtcattcgcttgcttgtacttgttttaatcattccgatgcttgtgccttttcttgtttctagtaatcggggagacggttcgcaacactcctcgtccccaaaataaaaaggttccgttcatcaaaaatgatgaacggaaccttttttctattaagctttaaaatccctggtataataccagcgaatacactaagaagataaaccgtactaagcgcactcctggtcattccatcatatctgttcttctaaaaatttacgcatatactggttcaccacgtgcggtttctcatgatgtggggcatgacttacgccttccattcggtgaatcgtaaggtcacgaacatagtcctctaatccgtccagattactgttctcaaaagctggatcagcatcgccccaaatgattagcgttggcgaatcaaacatttgatatggaagttcgagcggtttttgaatatgctcttcgaacggaaagaaggaaatagcacgataatagttaagcatggacttcatcgcatccgactgcgtccaagcctctatatacttctcttcatcctcttcggttaaatacccttttttcttcccaggaatcgtcatcatgtttcttaatcgctctgcgttattttcaagcagtgcttcatgagaatctggtcgctggaagtatcccatataacgactcgcttctcgctggcctggattctcttctagctcccgtctaaatgtatacggatgaggcgcatcaaacataatcaacttcttcacatattcaggtgcggtgtaagctaacgtccacgcgaccgctccaccccagtcatgggcgactaaaacgcactccttctcctcaaacgcttcaatcaactgttttacatcctctacaaaaatagacatatcataggaagaaaccccttcaggcttgtcagaaacgttgtatcctctcatatccacagcaacaacgcgataatcctttgaaaactcctccatttggtgatgccaattgtaccagaaataagggaaaccatggagaaacagcatcagttcgccttccccttctgtcacataatgaaggttcacatcattcacttttacatagccttcgttcatttgttcattcaccctttcttataaagacttctaacatcgagacactttactcctcttccatttaatccacaattaggatgtctcgctttctcgataaataggaaaaataacctaatcgtggcggaataaaaatgtgatgaaattcctactaaacagagggagtacaaattagaaggatcgtccgttctctttcgttgtctctacatttcttcctatatattctattttcaaacccctctcaagctttatgttgaggtataataatcaacaaagaatatgaaggaggagaggattatgttttgtccaaagtgcgggacgaaaaacatagaaaatgctcggttttgcagccagtgtggtcactcatatacgaggtatcagcagaggaatcgatggtggttgaccggtatcatccttgcctttttattaataagcggcggctttattcacactttcgttcttgataaagaacggattaacgaaacaacagtagaagagacgattcaaacgccagtcgaaaaaatctctgactctactaaactagaggaagaagcaaaagatgaaaaagaagcgaatgcaagcacatcacaaagcgttactaaggaagaaagcacaacagaacagatcgctccttcacctcaaacatccacagaaaaagataagaaagaaatcatacgtgaagcacaagcaaaagtgtataccattttaacggaggatagtcttggatcaggcttcttatttcaggagaatggcacagttgtaaccaatgctcatgtggtggcaggctatattgatgtcacgttgcgcgaccaggatggccgagaaatgaatggtaaggtgatcggcatctcaaatcagtatgatgtcgctataattgaagtacagaatctaaaaggtacttctcctttggagatggaaatgaaagaatcagaagttggcacagaagtaatcgcacttggaagtcctcaaggattagaaaacacagcatcgatcggatacctcactgggcttgaccgttcatttgtatcggaatttcaatacgaaaacgtctaccaaatcgatgcccaagtttcacctggaagcagcggtggtccgttgttagatggaaaaacaggaaaggtgataggcattaactccgtcctgttaactagcgatgaatccatcgccttctcgatcccaatgtatacaatgacggatttattaacaaactggtcgcagtcgccaatggatgaaaatgaagtcgccagcacctttaccttctacaatgaattttcagggtatgatgaatatgaatcggacgatcgtgttgatgatgaatatgcagaagatgaagaagacacgtacggggttccgtttgacgaagcaagcctcgctaactttatcatcaatttcagagggaactatgaaacggcattgcgaaatgaagactttggttatattgaagaccagcttctgtatgacagtcaggcctattatgaaatggctaactacctagacgagataagcgaccagggaatgctctttaaatttacgttaaatgatgtgaccaatattaacatgcagactgatcaagcgatcgttagcacttatgaggtttttgatttcatgaatgcggcgggggaatggagcgtgtatgagcggattaaagactattatgttgtaacagatgaatatgggaattataagattacgcatatagagatttatcagtaacaatagaaaacacctacttcttctattgtagtaaacattgacgttaataaagcttcttctgaggaaaccgatcgaactaattcactaagagttagatcagtcggtttcttcattcatcctaatcctgccccggttaattaacacccttgaatccccctccagaaaatacgccaggcattttggagacgctcctcatgctctacttcagagtaataaaagagctgttcaaatgtgccatcaagtaggcatatataagcatcgattacctcatctggatcggcttgaatatctcctcttctcttcccctctttcacaacatccattaatacgttcgttaaagcttcttctgatttaataaactgttcattaaatgtgtctttcaatactaatggtggaaaaagcataaatctcttaaataaaagacccaaatcttcattttcaagatacgttgtatggtctttcaacaaactatataactgcctttccgttggcatgtcacgatactgttgaacttgcagttctagaaagtcccgataatctcgattgactttttgaagaatagcgaaaaaaagatcttctttacttgcaaaatgagcgtataaagaggattttttaattccaactgatttcgcaattttgcttaatgaggtcccttcaaaaccttttctcgcaaataacgggagagctgctctttctattcgttcactcataggtgacttggtagatgacatccttgtcactcctaacatatctcaggcttataagttcttctactccattataagggttatgtctctctcatatagactccctttattttcattattctttaagctacagaagctacagatacaaacttccaataaccctaaatttattttgttaaatattttcttaacgtttccaacaatcttaaatgctatcatttacgccatcatctgtcaaaaaggttcaatctcttctttccgaatttacatttataggaatgaatctaatcattagaaaggtttataacagcctaataatagaggatttagaagaacatgcctttactgttagctgctgtttctattagaagaataaaagaactatcccctctcattaatttaagcgtatttgacaaggaaatctaatcatgtaatatttattattaaatacgttaagaaaatatttaacataattaattttaatgaaaggggtacgagaatttgaaagtagctaatgattatgtccaggagccactcccttaagtttacttaataaaaaaaatgaatgctaaaggtagtgagtaagcgaagagccaaaaaattggcaacaaagtaaaaaagcaaaacaacaaacgtactcccacttaggatgcgttatcaacaagtttgaacttaaaaattttctagaggtgaaggtatttgagtgaaggaaaaggtaaattattaaaaataggtacatttgtagcagctattttagttatgtttatttatttaggaacgactaattcgaatgttaactggggctcctttattgcaatgttagtattctacggaattatctattatattggagcgtttatggcaagtggcaaatcggaatctgcatcagatatgatggtagcgaaacgctctttaccactgtggatctcgatgtttacaatggctgccacatgggttggtggcggttacatatcaggtaccgcagaatcaacttattcacttggactagtatgggcacaggctccatgggggtatgcactaagtttaattgttggtggtatcttctatgcgagaaaaatgcgtcgctatgaatttatgaccatgatagatccacttgaacaacgattcggaaagaaagttgctggtgttttatatattcccgctcttttaggagaagtcttctggagtggtgcaatcttaacagctttaggaacaacatttggaacaattctaggtttggatttccaaacttctattattctatcagccattattgcagtggcgtacactgtcgtaggaggcatgtggtccgttgcatttactgatgtatttcaaatgctcgctgttatgatcggactgttcttagtgcttccttatgcactttcagaagtaggcggtttaagttcggtttggaatcactatcaaaccgatatggggagctatgcaagtcttttccctccattagatggctggaaagatcctgaatgggggaactattattggaactggtgggattttgccttactactcgttttcggtggaattccgtggcaggtttatttccaacgtgttctttctgctaaaacggaaaatacggctatgtggctttcaattattgcaggatttatctgtattattgcagcgatcccagccgttatcattggtgcgatcggattagatacagattgggcaagtcttggtataaatgctcctgataacccatctatgattctaccttatgtcttacaatatttaacgcctggagttattggagcgattggattgggcgctctcgcagctgccgttatgtcatctatggattcttccattctatcagcatcatccatggcagcctggaatgtgtaccgaccactgttcaagcccgatgcatcaagcgatcaacttaagaaaatgatcaagcgctcgatcgttttggttggaattgcagccacgatcattgcactgaacgttcaaagcgtctacgcattgtggtatcttgctgcggaccttgtttatgtcattctatttcctcagttaacaaccgctttgttctttaaagatgcgaataaatacggttcaatcgcaggattaatcgtttctttcatccttcgaataggtggtggagaaccaatcattggacttccagttttcctcccttatcctatgattgaagatggcattgtcctgttcccgttccgaacactcgcaatggtagcaggtttggtaaccattatcgtggtgtctaaagcgaccaagaagatgtgtccacctaaaccactattgatgccagctgagagagaaaacggtaacgaaaaaattgcctcgtagataaatcaatacgaataaaaacggcctacttcatcgatatcgatgaagtaggccgtttgttatttgctagtatttttattgtattctaatggactagaatggtgaatcttaaagctaggatcttacacccttttttaaagcctcttatgaagccatgtagcttttcaaatcttattttcaaggaataaccttcccacataatttattctctcagaatcggttcttaagccatttcagttattccagagaatatcttcatttctcaatctcaataaacactcacctaccctaaaaatatagcaggttttatactaccctgtatttcatgagaggttaatagcatccctcatctaccttcctcattaaaaagacgtaccctcattcttactatcgttcactagaataaaccataaagaggaactaaacgtacgtgttaaagacgattagataagattcaaagatcgattatctatcatttatgacatcaaaaaagcattcgttgcaacagacatcgaatgcttactgtgaacttaaaaacgttagctctatcaaaaggcagagtagcaaggatagaaatagaaagcaaacaaaaaaaagagaaggcgtcctttcaatcatacctcacgttgaaaggacgccttcttataagacatttattttgttacagtaccagcatctgccggatgaacgccatgacgatagaaatcggcatcgattggatcgagtggtttacgaccaaggataagatcggctgccttttccgctagcatcaagactggtgcgtgaatattgccgttcgttacgtaaggcatagctgacgcatcaactacgcgtacattatccagaccatgaaccttcatcgttttcggatctacaaccgccattggatcagaagctggtcccatttttgccgtacaagacgggtgaagagcagtctcagcatcgtttctcacccattccaaaatctcttcatctgtttgaacagcagtacctggtgagatttctccatcattataaggtttcatcgctggttgcttcatgatttcacgagaaactcttactgcttcaacccactcgcgtttgtcctgttcagtagaaagatagttgtataccatgcttggatgctctttcggatctgtcgaacgaatctttaatgatccgcgggcgtcagagtacattggtccaacgtgaacctggaatccgtgagcggtatctgctttttgtccatcgtaacgtactgcaaccggaaggaagtggaacatcaagttcggatatttaacatcctcatttgaacgaacgaaacctccaccttcgaaatgatttgtcgcagcaggtccagttcttccaagcatccactgcaggccaatccatggcatacgtgctttattcaagttaggctgttcggaaactggttgcggacaagcgtgttggatatagacttcaaggtgatcctgaaggttttctcctacacctgggaggtcaacaaccggcttgatacctagagagcgaaggtgtttcgcatctcctacacctgacagttgaagaagctgcggcgtgttgattgccccacctgaaaggaccacttcaccagcttgaacttgatgcatttttccattttgtgaataggtcaatcctttagcacgagtaccatcaaaatcgatactagcaacgaaagcgcgcgtctttaccgttaagttctctcgtttcatggctgggtgtaagtaggcacgagacgctgataaacgctgtcctttgtatacatgcttatcaaacggaccaaacccttcctgacggaaaccgttcacatcaggagttcgtgaataaccagcttctacaccagcattaaagaaagcctggaataaaggatttttcgctggtccacgttccaatttgattggaccatcatgaccacgaagatcatcatctggtgatgctaaagcattctctaaacgcttgaagtacggaagacagtgtgcgaaattccacgtttccattccttcgtcagctccccagcgttcatagtccaacgggtttcctcgttgataaatcataccgttaattgaacttgaacctccgagtagctttcctcttgcatgcttaatacggcgtccattcatgtatggctcagggtcagattcgtatttccaatcgtaaaggctttttcctgctggaaacggaagagctgccggcatttgaatcaaaagatcccatgaataatcttttcgtcctgcttctaatactaggacactttttgtgccatctgcgcttagacggtcgccgagtacagaacctgcactaccgccgccaactatgacaatatcgtacttttccattttgttgtattcctccttgattgttgaaaaagggaaattactattgggtcacatcccctttttttctaatagatcagttttattttcttcctatatagagctcgggcttgagctcttaagggagaaccaagttcccccattatcgtgattcaataagtacggatgaacgattcaattagaaccagttaattgtttcaggtttaaggttttggaagatatgcttggtttcggtatattcttctagacctgctttaccaagttcacggccaatgccagattgcttaaatccaccccaaggcgcatgcgggaaataaaggttgaagtcatttatccagacagtacccatgcgcattttcgctgcacagcgttctgctttcgcaatatcctttgtccaaacaccgcctgcgagtccgtagatagagtcatttgcaagcttgatcgcttcttcttcagcttggaatttctcaaccgtaataatcggaccgaaagcttcatcttgtacaatgctcatgtctgttgtacagtccgtgaaaattgtaggcaagtagaaaaatccttgttgtagttctgggtcttctgggcgttttccaccaacagctacagttgcgccttcctgaatccctgcttcaacatacttttcaactttcgcaagatgctcagcagaaataagtggccccatttgagtctcttcatcaaatccgcttccaagtttgaatttcttcacgcgctcgacaagcgcatcaacgaatttatcatgaatgctttcttctacaatgagtcttgtcccagcggaacaaatttgtccggcgtggaaaaacactccgtttaacgcttgatcaactgcgatatcaaaatcagcatcagcaaaaataacattcggatttttaccaccgagctctagcgcaaggtttttcacattcacgcttgctgcttgcataattttcttcccagtcgcaatgccgcctgtgaaagaaataagatcaacatccgtgttatttgatagctctgcgccaaccgtgtcccccgcaccaagaacgaggttagctacgccagcaggtactcccgcctcttccattagttcaaatactttgatatgagtaagcggcgtaatttcacttggcttaataatcaacgtatttcctgttgcaagtgctggagctagcttccatgatgcttgaagtaaaggatagttccaaggcgtaatttgaccacatacaccgactggttcatgtacgactttactgattgaatttgctaccggagcatcaattagctctccaccatctttatctgcgagttctgcaaaatagcggaacacgcctgcgatatcatccatgtctccacggctttcttcaactgttttaccagtatccaatgattcaagatgagcaagttcttctttatctcgttcaattaattcagcaatctttcttacgattgctcctcgctcagttgcaggcgtaaatgcccactcgccattatcaaatgcttctcttgcagccgcgattgctgctttcgcatctgattcgtcaccttctgggacagtcgcaatgatttcctggttatatgggttaataatcgtacgcatacgtcccgagttcgcgccaacccatttaccgttaatgtattgttgtagtttaagatccaaattgatcaactccaatgccgaagtaagttaagtttattaagaatttatttaacacatttaacgttaacacgtccttttaagactgtcaaaacaaattcatacggaaattttagaaaggattaagatattctaaaatggttatacctattaatgtagtcattatttagaggggataaaataaaaatcttatatttgacatttcatctaaaaaagttaacattaagttcgtaaagaaaatttgataaatacttaacacgatttacttttatatcgaaggagcgacccaatgagtgaatctaatgaaagacccagaatgaaaatagaagaagccaaagataaagtgattggtgccattgctgagacgatggatttatatggggtaacaccagcagccgctaatttatacgcgacgatgtactttaaagatcaaatgactcttgatgaaatgcgcacggaactcgggatgagtaaaccaagcatgagtacgagcgtccgtaagcttcaagaaattgaaatggtcaaaaaaacgtttacacggggatcgcgtaaacatacttatgtagctgaaaaaaatttctttcgctcctttatggccttttactgtcaaatgtgggaacgcgaagtgaaaatgaatttggaagccattgaggaagcacaagaagatttcatagacgtgataaaagattccactagcactccagaaatcgtagcaaccgcaaagaaacactatgatcaattagaggaatcgaaaaaatactatcactggttggatgatttagttgaaagcataagaagcggtaagatatttgaatttctaccaaaagatcaagaggattaaaagtgaccaggtagttgatagcaaagctacgatcaactgcctggtattattttggagacacacttacataaaaaagtaggcttagtgttgcgctaccgttaaaaaaattcttaatacattaaactattcgattgtggaaatgaatcattaacatataggaggaatgcaacgagatgatgcagagaaaaaaaggacttagtgtactgttagccatcctaatgattgcggtactgaccgcatgtagtggcgaagcaggtacagaatcagacggaaaagataaagctatatcaattggtcaaattaattgggctgaaaatattgctgtcacaaatatgtggaaagtgattttagaagataaaggatatgacatagaatttaactatttgaacatgggttctactatgacggcgttagatagcggcgatttagatgctagtttagaagtatggttacctgtccaggatgcgaattatttagagaaatatcaagatacggttaacttctctgaagaaacgtggtttgacgatgcaaaagtaggacttgtggttccaacctatctagaagacattaatagcgtgaaagacttaaatgaccataaggaactgttcgatagcgaaattgtaggatttgatcctggtgcaggtacgatggaagtgactgaacaattaataaaggactatgatctcgattttgaactagtcccaagctctgaatccgccatgttagcagagattaaaaaagcagtaaaagataaagaaccaatcgtagccccactttggagtccacactgggtattctctaaatatgacttaaaattcctagaagacccgaagaacacattcggtggtgtcgaaaaaatccatcatgcaactaggcaaggatttgacgaagattatcccgaagtaagcaaatggtttaaaaactggaaaatgaatgatcaacaaatcggtgagctgattgactatgtggaaagtagcgaggaccctgccgatggagcaacaaaatgggttgaggagaatcaagatttgattgatgaatgggtgaaataaagacttagatgtagaagaagctggtatctcattgtattggggcccagcttcttttgttttcggagatgtcgtccaggagatttacttttatgaaatagaagtgtgagaatcatcgatacggttattgccattcatctctattcattttttcatttactcaaccgttaacccagtaacagtttcgaaattcttcttttttagatttaggagaaccgtctcagcgactctttgtgaccttctatggatcgcacagaaaaaatgatctatgtgagttatactcaacctctctatagatatgaagatctttcaaagataaaagattacctaactaatacttcgggtagtgagtactattggaagacaatcaaaggaggctgaaggtatgaataacaaaattataggtggcgttttttctaatgtaggaagtgcagaacaagccataacggaattacagcgtcacggctatggttccaatgacatatccgtttttgctaaagataaaagtaaagtacatgtcttagaagaagaaatggaaacatccgtcacatccaataaaggtgggcgtggaaaaaatgctggaaaaggagctggattaggagctttatctggaggagccttaggtggggttggtggtttaattgcaggtttaggccttcttgcgatccctggcatcggaccacttgctgcagcaggtccaatcgccgctgctcttactggtgcaggtgtaggtgcaggtggtggtggaatcgtcggcgcgcttgtaggtgctggaatacctgagagagacgcagcacagtatgaaaaccatttgaaagatggaaaaataatcgtaatcgtagaagcttcagacaaagtacaagataaggtctatcgcaccttcctatcgaataaaaccgaaaacagatccatgtaccctgatcattatcaaaatcataatcatgagaatgatcacacttcacactacagcactactactaacaatcatgataaaaaaacaactccactaaaagataacacgcactctgaagatacaaatactaactttaccaatagaacgaatgaaacgcgcacaagaacctcagagagacatcattcttctcgcacccgtgactaacgttcttaagttgatacttgcaagtacaaaggaacttctctacacagagaagttccttgtttgatgccatatacctcgcttttttagttatcatcctgtattgtgaaagcccaattgacttcgtttgtttataaagaagtgaaaaaattaattagataagttaattgtttagtatcttttgaacgcttatcaatacttggtcaatatcctctttagtaatgccgttattcgttacaaatctaataatattaggaccgaatgggcctgctataatagaattttcttttaactgacctatgaagtgctccgtagttttgttagattttgtaatatctactaaagtaatatttgtttctactttatttttaacgactactccatcaatattttgaaagccttcagcaaggtgctttgcattttcatgatctttctcaagtagtttaacgttttcttcaagtgcaataatcccaggtgcagcgagtacacccacctgcctaagtccgccacctaagcgtttacgccactttcgagcttgagaaataaaatcagaagaacctgcaatcattgaacccaccggtgcacccaatcctttagataagcaaaactgaacagaatctgtatacttcgcaaattctttaactgagatttgagaagctacagcagcattaaataatcgtgcaccatctaagtgaacggggataccgtgttttttcgatatatgatagattaagtccatatttagagggggaacaacagctccgcctgctttattatgagtgttttctatgcatatcagtccggtttcaggctgatgaatatcatcgcctcggatggctgcttctacatcacttggtttcatagcaccattcacaccatctatggtttttgtttgaacacccgcaaaagcagacaatgctgcagcttcgtaaagaaagatatgggcttcggcttccattatcacttcttggccgggcttacagtgtactaatccggcaatttgatttccttgggtgccacttgttacaaataaggcatcttcttttccgagaatatgtgcagcgagttcttcaagcttatttactgtgggatcttctccataaacatcatcccctacttcagcctcgtacatcgctttcctcatcttttcacttggttttgttaccgtatcactccgtaaatctatcacaattgcccctccctttatcggttacaatataatgcacaaaaagtataaagttatttgataattgaatcaagttaggaaaagctgatatcaacacagcttggtttcgtttcatacgcaaatatgtaatgtaaaaagccaccttaaaacaaggtgactttccccctattctaactctatgagtagcgcatttccagattcacttactttaataatagccgtcgttataccctcgaatgcatcccctgccccttccggaatgaagaaactctctatgccatattggacatcatgatcagaataggtaatcccattcaccacaatatcttcatcagaaggttcatacgatttattccaattaccttcgattttgtaataccctccatactcatacaacccctccgaagtaggcgtgagaacaacttttatcttcttattcgctggaagcacggtaccaggcaacgttgagatatcgtagcgaagcgtcacataatccccttgtaacatcgagcggggatcaacaggcgcaagagcaagtcgaacctctttcccagattgaagcgctacctcatttttcacgccattataggtgacgaacgaaaccatcagaatcacaaccaaccaaattaatttccatctacctgcgacgaaagtgggttcttcatcagtcgtttgtgtgtaccgcgataccgttcgcgtaatcactaatacaagaagacccgcaaccaacagcgtaatcgatttatgaacgagcgaccatgcgatgtcatagtacttgtagaacagaaacgcataccataaaacgagccccacccaataccgaaatggattggactgccatggtttataaaagacaagaagcgtggttagaagaagaaatacactattaaacaaccagtataaccattgtccttcaaagaagaacgttaagataaacagaggcacaatactataaacgagcgcattgcgattgaaccacccatcacgtccaagaatatgaatcactccattaccaaagacaagtacaagcaacagcagtggttcataagaatccatcgaaagtaatgattcttccaccttaaataaaaataagagaagtattccatttgcgagtagataggcatacgaaccaatccatgggttcgtgataagtttaagtacagcaccgatcagacagaatgagatcaacatcacaacgatcgtttcaggttgaaaaccattggaaaatgcatctattagatttgctgatgataagattgataacccagacagcaagaggatcgttgataaaaacgggattttctcttttagtgcgagaccgggtagtatcaatagaaaaatagatgaaaacataaatgcaagggcattatcccagctgaagataagaaacatgatgcccgaaaaggctgaaattaacatcactgtactgactaccgtcaccacaaaaagtaaggatgatttaaacatccgcttccaggtttccgaacccttttcacttcgttccaatctaggaagatacttaatggtcagaaatacaatgaagccgacaacgactaataagaaaaatggcaaaaggtcacccagtgcatcgcctaacccttctaatattttcccgaataggaataatcctagtgcaattcctgttaagataaacagttctttttcttcacgatgtttccaaagaaatacgctgatcaatccgtacccgacataaatccacgccataatcgtgctgtattcccagtagccaaaacttgaagcgataaagacaaattgaataaaacaaaagctaccgaacatgatccaattagaacgaagccatggtgagcgcgagagaaaaaaccacgcatgagtgaatagtaaatagatgaatactagaatcaatgctgtctctggcttccaatctggaaaataagacgttggaaacacatagaaataaaaagcgagctggcttagtaaaaaacctaatacataaaatgctttgtatcccgtaagtgcaccaaaaactacagccggaaccaaccaaatcagataaaggagatacgaatccgcatgggaattatacgtttgaccaataagcgccacgctaaccccaaacgcaatcattccaaccagccatagccatctttctagaaatcggtgtgaatgctggaagcggctaaggattgtcgctgcgacaaagaacagcaacataagtccaatcgcaagcccgtttttttcgatccttccgatcccttgccaattcgatgcgaaaaaatagatgacgctactgataagtaacgataagcctagtaaatagcctgtatgaatccgctttatatgcatgcactttccccctttatctaatgccagtaaaaccatgttatatggagtatatgttatctaatgtgttactaactcaagtatacaaaaaatctcacagtctttatcctcatattacgaaagagaaaaagaaaatcatcttaccttcttcaattttccatataaaaaaccctcttgctcccgcaagagggtttccaccaacttcatttacttgatcgttcactgatttaaaagtaaaaaatccatttctacaaattttgttacttacccggaagctatctcgttttttcattaaagtgtacagtatcttttaaatcattgccttcttctaatgagtcactactggtcacctttttcacaaactctttgaccgtcttgacgtttactcctgactcccaatattcagcgatttcaggggtcactttaaccaatactacattcggatcatcagcagaagtgtttagcagcttttcgacaatcttattcaaatactccttcttcttctcgttatcctgaaccaattcagcagtgccgctgatcgatacataagatgaacctgcgtatgctaagtttacggcaggattaagcttaatatcctcatatttatctgtatctttttttgtaatgaaccaaatctcttccctatccaattcgacttcctgcgtttgcattggacgggacatcagcttgccatctggagatatagtggtcaacatggccaccttctcatctttaatcaaatcttttatgttcttaatggttttctgattttctgaattatggttagtcaattgtggttcctcctttggatagtggcagttactgatctccttttaaaagaataaagtaacctgccaatcacatatactctcttttcccgtttagcttcaaaattacacttttctcaatcagcagtactctgaatagtgcctctccactaaaaaagcccttgtttccaaggactttgttacaatttgtcagctatttatttttcatttgccaaggactagcagtaaatactccagaccctttcattaacttacaattttaataaatcatcttttatggaatcgatctgtgtagcataccttcttaccttctcatccaactctttccaacgtactatacgatcccgcaccatctgctcaacaacttgtgggttcggtccccctgttacgttccttctctcaataaacttagatgggtcacagatgtgtttccaatcttcttctgaaagttgcacgccaccgatccactcgtttacttcaaaaagacttacttcatacaactctttctttgcctcgtttgcttttttgcttacgaagctggaaatctggtgagcctttcgaaatggcacatcataatctctagcaaggacatcagctaattcagtaatggtaatcatgttcgttttggcttgttcaagcgctcgttccttattgaatttcatcgtcgtaatgacagctgttaatagctttgtaacacgattcgctttataaaacccgttataaagatgcggttgcaaatcatcttctgtatccacaatatcgccatatggcgtgttatgaatcatctgaaccacacttagtccttccccgacagcactgctagcaagggctcttgaatgttccagagataccggatttcttttctggggcataatgctactgacctggacataagcatcagagacttttagtaaccctacttcattggaagccatgcggagaagctcttgaatccacctccccatatttgtcatcagactaactaatgtaagagctgcttcaagtaaataatctccagttccaatcgcatcatatgagttctccataacgtcatcaaaccctaacagctcaaccattcgctcacggctgattggaaaaccggtcgtggtaatggctgctgcccccatcggcgaacgattgactgtatgatacgcttgccacaaccggtccacgtctcttgatagattatcggatatggcgagtaaatagtgaccaaaagtagttggttgagccggttgcgtgtgagtgtgagcaggcatgatcgtatgaacatggtcttccgcttgtataacaagcgattgccctagattttttacgttttccaacagatcgagcatatgatcacgaatcacgatgcgatacatcgcctctcccatatcatttcgactcttcgcaatatgcatcttgcctgctaaatcgtcaccaatcaactttgcaacttcggcttcaacaaggaaaaagaaatcttcgtattctgggacatagtttagtaacttcttctccatctttgccacttcatttacgccatccaatatcttctttacctcaacatcagtgataattttttgttctttcagcatcgtcgtatgggcgcgatgaatcataaacatcgcgtcaaataagtagtcacgctgatctttaaaaaccggcttaaggagctcgtctacgtaggttttcccgggaaaaatagcaccatcttctaactcaaaatcttcctttctcttattcatgatttcacctcattgtactagagcgtattttctgatttaactccaaagaatttataagaaataagcatcacgatcgcgataagaccaacctgaatcatgccatatgctgccgcctgaccaagattaaacattcttagctggttcataatctcaatggaaatcggtcgattgtctagtgtatacaacagaacagaggttggaaactctccaacagcttgaacaaaggctagcagagttccgcttaaaactcctggcataataatcggcaagactactcttctgaatgtatacaaccaccttgcccctagattctgtgcagcttcttcaatcgaatcatccatttgttcaagtacagcgttcgtcgatcgaacgacgagtggtataaaacgaataaaatacgcgagaggcaagatccagaatgtcccgacaagtacctgaccaaatgaaaatatagatttactattaaaggctaaaataagattcattccaacaacggttgcaggcaatgcccacggaagcataacgagaatatcaagtaggttcttaccgaagaactttcttttcacaagtgcataagacgtaatgattccaaacacaaaacaacctaagcacgcaaagaaagccataattaaactattccgaaccggatcccagatgttcgggtcctcaaaaagcaaacggtagttttcaagattgaaagaagaaggatacttctgccacgtccacgctccttctggaacaaaggacagaatcgctaaaactgcatgtggaagtaaaaggacaatcatcgctacaataccaagagataccatcacccattttaagaatggattattaacctcacttcggtgagcaccgatcccttttgaccccatccgatagtcttttcgattttggaaccaacgcataaataataagaaggtaatcgaaacggctgagagaataacagattgtgttgctgccatttccaaatcgccattaattttagaaaagtagatttggagacttagcactcgataccctccagcaagtagaaacggagcactaaaggaagccatcgaaaccataaagacgagcagggacgctgcaactaaagctggtgttaataatggaaatgtcactttccaaaatacgccgaaacgtcctgatccaagattggctgctgactcttccagcgacggatcgacattattaagagctgatgaaaccgtcatataaaaataagggtacatcgtataagcgtgaacaagaagaatccccgtcacaccaccgatgctaaatggaacttcctctaaattcagtaagtcttgaagcgctactgggataagacccgcttctccgtataaccacataaatgccattacaccgacaagggaaggtaaaacaattggcataattgcaatccctgagaaaaatgaacgtccaggaaaattatatctcgtaaaaataaaagctaatgggaccccaatacatgcgcttagcaagacagataacaatgatatgtataccgaattccataaagcttctaaatttgcctgtgctttcggtccaaaaaagtctacataattttgtagcgtaaataacccatttttcttaaagctctcaataaacgtttcaactgttggatagagaacataaccaatgaggaccaggataatcggaataagtagaaggattgtttttcttttttcagcatttaacatccaatatcactccttcgccactggcacgattcgaacctggtcaggtggtagttgaacataaatatcagatccttcttgtagatatgtactcggtccacggtttaaatcggttacttttaatgtggcgtgatctccattaactttgatgaagctatgaacagactcacctgtgaattgaacaagatctacttttccttttaaaacattcactccttctacatttgtttttgataagataatagcttctggtcgaacggacattttaaagttttcattcttactgaatacttcctcaccagaggtatcagcatgaacaagaagattcaaatcctcacaaaaaagcccttcatccttttgtttcacttcaaacaggtttgtttctccgataaattcagcaacaaaatcattgaccggctgattgtagatttccgttggtgttccaatctgttggcaattccccacattaaagacagcgattcgatcactcatcgtaagtgcttcaacttgatcatgcgtcacgtaaatggtcgtgatgccatactcacgctgcagacggagaatctcatttctcatttcatctcgtaatctcgcatcaagattacttaatggttcatcaagtaataaaatatccggttcaatgacaagagcccttgctaaagcgactcgctgttgctgtccaccacttaactgactcacctgacgttcaataaaagccttcaagcgcactttttctaacacatcttctactcttctttttacctcagctttactcacttttcttacttttaacccaaaggccacattttcaaagacggtcatatgagggaaaagggcatagttttggaaaaccatgcccgtatttcttttttccggtgacactgtcgtcatatctcgatcatcgaatttaactttcccagctgaaggataataaaatcctgcaatcatcctaagagttgttgtttttccgcatccacttggtccaagaaaagtaaaaaactccccttctttaatcgtgatatccaactctttcacggcagtgacatcaccaaattgtttagtaatattagataaggttactgctgtcataaccaacaactcctctttctggagatctattcttctttttgcttttcactgtttttaatattgttgtcccaatattccatccactcatcagacttctcctggaaaacttcccaatcgatctccatcgcattgatttctgtttcttcaatccactctggaagatcactaatatcatcacgcgttggaattctataatatttctcagctagtagcttggctgcttcctctgaattaacaaactcataaaaagctttcgctgcttctggatgcggcgcaccttcaacaatcgcaattccttctgttaagactggcgttccactctcaggaatcacatagctaaacggataccccttctcttccgctagcataacggtatccggcatattccaaactgatagattgcctacgcctttcgctacctggttgtacataatctctggattggccgcgtactctttcgtattctcatctaatttctgtagccattcatacccagcatcagggctatccgtctctttgtaatccttatagatgatagaagaataaattgtacgcattgtacctgaagcaagtggataacgaatgattaattcatctttccatttcggatctacgagatcatcccaatcttttggagcctcttcttcagagatttctttattattgtaaagaatgacttcaggggtttgagaagtgcccgtccaataccattcttcatcatggtacatatcatctaaagaaccggcatagcttggctcatatttctgcaaaagctcatccgtcttggcttcatcgaacatcacttgaggtgcaccccaccatatatccgcttgcgtattattcttttcggagcgaaccctatctagaatttcctgtgaaccaaggtcgagaaattccatgtctacatcatattccgcttcaaattgtttctcgaattcactcaaaatatctttaccgtgcggagaatatacgacaatcttatcttccaaatcaccttcactttcagaaccagaatccccatcgctacttgcttcttcattccctgccatacaccctgttaggatgatgccgaacactagcattgtaattaacatcatccatcgaaattgacgtttcatacgttcatttcccccttctcataattggataattgaatcatgttcttcaaggaatagcgccgctgccccaacgattccggcttcctttccaaacgttgacggtacaattttgcagctctgtggtgtgaaatgctctacaatttcaattaacgaatgcttataatcctcaaatgactcgcttacaccacctcctataatgacgagatccggatcaaataaagaaacataattagcgatcccaaaccctaaatgttcaattgctttttcaaccacttcactcgcatcctcatccccttttttccaactaataaaagcttcttttgccgttaagggcgtgttctttatttcagaaagtttattcccgatggatgaaccacttgcgacactctcaagaaatccatagccctcataagtcggatgatagctctttgcacttttaaaatctgtcactaaatatcccatctcacccgcactgtaacgactgcctcgaaaaagttttccgttaatgatcatcccactgcctattcctgtacctatcgcgataaaaatgagattttgaagagactttccggcacctagccactgctcaccaagaacgctcgtattgacgtcattttcaacatagattggaaacggaaagtactcactcgctatcttccgaacgggataccgcttccaccgtaagctaggcgcatccaatacaatgccatgttccacattcgttacacccgggacaccgattcccattccaaggattttctcattacttaactgtaaatcatgaagcatactatttacgtctctttgtaagcgcttaaataaatctttttcaaggtattcacttgtggaaaattctcggtaagcatgaacttttccgtttaaacatgtcaccccagaagctacttttgtgccaccgatatcgacgccaatcacataagctgcctttggattaaaaataagatgaacaggctttcgaccaccactaatcgtcgattcccccggccctttctcctcgatccatccctcttgtaacaattgttcaacgatcagtgaaacagagggtttactaatttgaatccttttggaaatctgcgagcgagaaatcggttcaaaatcccgaatacacttcaacacaagttgcttatttatatttttgatatatgcggcatcgcccttttgcataaatgtgtactcctttataaatgataaaaaaacagcagaaacatctttagttagttaatgttacttaccaacgattactttcatttataaaggctgatcaaacaaatgtaaaatactgtttatgccctttctcataaactgagagttattatgctcaataatgcttctaatttctatcatataatataattttagaaaattttatttattttgttaaattgtgactatatgactacctaaacggtacaaaagtaggttccatttattggatcgatctgcttataatggttttaagttagttatattctgttactaactaaattcattcaggagacgaaggaggatttatttgaagaacctggggaagattttattatcgttggttttgatcctttctgcctttggtacaagctccattagttttgcaaaagagtcacccaacttagcactatgggaatcggttgtaccattaactacaaccgcaagctttatgaacacaggtgctcatccggatgatgagcgtagtcatttcctcgcttatttatcgcgtggacaaggtgtggacacgtcctttctactctccactcgtggccagggtggtcaaaatgaaatcggtagcgagcttggcgatggactaggcatcatccgcacaaacgaactgcaagcttcctccaaagtccttggaatcgaaacctttttcttaaacgaagattttgaagacagcatcaaagactttggcttctctaaaacacctgaagaaacgctgaacaaatggggagaaacggaaacctacgaacgactcattcaagacatccgaacatttaaaccagacatcatcatgccctcttttcgcaacgttgactcccagcatggtcatcaccgcgccatgacattgcttacccaaaaagcatttgaagacgcagccgactcttctgtttttcctgaacagcttgaagatggcttaaccacctggcaagtaaagaaactctacctccctgctgaaacagaagagcaaaccaccacttctatccaaatcggaatctatgacgaacactatgacatgacttacccgcagcttggtgaaaaagcgcgttacttacatgaatcccaaggaatgggaagagatgttggagatggcccagaaaccgtcaatcttcagctagttaaatcaacagttggcgatattccggaacaggaagaaagcatctacgaaaacattccctacgatttcgcggattacgctaacaccctttcaaaaggcggcaataaatacaaacaaaagctgatccatcttcaaaaggatcttgaaaaggtgaaaagtgcctatcctcaccacgagaacgtattaactcaagctgaaaatgcgtacaaacagcttcaaaagctcatgaaacagatggagaaagacaacaagctatctgatgatttaagaaacactctaaatcataagcttcaagtaaaagaagaacagctaacaaacacgatgtttaccgctgcacagttggaagtagatgttgaggttgtcgatccacaactaacaccggatgatacaacaaatgtaagcgtttcgatcacgaataatggcacgtctaaaatcaaagatctatccgctaccctttccatccctgaagactggatcgtaaaaggacagcatcattcttcatcattagcacctggagatcaggtaacgttcgattataacgtcgcagctacgtcaagaaactattatgatgcctacacaccggacgcgattaaagcaaatatcagttttaaagcgaaaggacaaaccattacagaaacattctcgccagaagaacgcgtggccctactaccagaggtatccgtgaaaccgtctcctgagaatttagtgattaacacaaaagacattgaagaaagtgtcacgatggatgtagaagttgaaaaatttgcggaagggactctagaaacagacgtctcccttcaattaccagagggatggacagccgaacctgaatcgcaggaagtttcatttggatctgatgaacaaatgaaaaccatctcgtttacattaactcctccacagaatgtggaagaaggcgaattccagatcgttccgcaagcccaaattggaaacgaaacgattagtaaaaacgtccaagtgattcagtacgatcatattggcacaaactattatgtatcagatgccgcagttaacggcgtagccttcccgctcgactatcctgaagatcttaaaatcggatatgtcgatagcggatttgataaggttgcagatcagttatcaaatgtaggcatggatattacacaattaaccgagcaggacttagcatcaggagatctctctcaatacgatacgatcgtcactggaatcagagcgtatctttcaagagaagatttgctgcagcacaacgagcgtttattggaatacgtcaacaatggcggtcaccttgtcgtgcaatacaacaaaccatgggataactgggacacgaacactaccgcaccttatgaactagaaatcggccagccttcgatcgagtggcgcgtcaccgatgaagatgctccgattaacgtattaaaaccagaagcaacgatctttaattatccgaacaagatcaagcaatcagactgggatggctgggtccaagaaagaggcctctacttcccaatgaactggtcagatgaatttgaaacttacgtaagcgtcgccgatccaggggaagatgcatttgaaggcggaattttgaaagcagactacggggaaggaacgtacatttatacgaacttagtatggtaccgccagattcagaatcaggtacctggtgggtatcgtatttttactaacttggttagttatccttattatgaggagtgaggtagatagaagaaccgcctggagattttccaggcggtttttttatcgtaataagctgcatcgaattttttgcactcaatactagtctagcttttattattgctctaatcctgctattccaaagcccccggctccagaatgagttgaaatcataccgcccgcttggatccaacgtatattctggaatccgttttctttggcgacctcatccatccgctgcttgatccgttcatcgagtccgatggagtagataaaataaagctgctctctatcgatgttgaattcatttaagtaatctctcaaaagtttttcactagctccactcatttttccgcggtacttctttgtagacattagctttccatccttcaactcgatgcatggctttattttcaatagagctccaatcagtgaagccatattgcttacccgtcctcccgctttcagaaaatcaaggctgcctgggatgaaagccagtcttgatttaggaacgattgcctctattttttcaactaagctttccgcttcaatgtcaggttctttttctaaaactttagcggcatacaatacaattgcagctaatccaccagtaacgttcaaagcatcaatgagataaatgtcttcaaattcttccgcagcaatgacagcattttgaaaagaagaagatgcttttgatgtataaccaatatgtacaatgatgcaatctggggaattctctcttatagttgcaaaaaactcttgatactcatgagcatttgtagaggtagtagaagggatttttttcgtgcgttcgtaatagtcataaatatcctcgaccggcaatgaaccgtctaaataatccttaccatccataatgatgtgcatgggaacgacttgaatatcgtacttttcagctaaatcacctggtaagtcggcaccgctttcagtagataagattatccttcgcattctatttcccccttggttatatttagatccgccttcactcttcctgcgttatgctttaactatacaggagaaaccgtattagcattgtgataacttttattttcctgacttttaatgcacaatttgggaatttgaatacgactgctagtgttgaggtctgtgataaccggcttctattaactaaacctaaaaccactaatattatatataaaaaagacccgatcctcataatggaatcagacccttctgttattcagctattaaaaatcgtgaggaggttcttacgactcttcgtccattcattttttgatgatttactcagcatttcaatatgaaaataactcccaaacttcttttccactgattctgctcgataacttttcctttaatttaagaagctttaggtgatgctcacttataatcctttactattttaatgttccgatgtttcctttcccattgtctacggttaaggagtaatcatcgtctcttaccgaagcataaaaaatatgctttatatttgaaacccctgctgctttaatttcgtttaataaccattctttatctttgtgaatgagttctaaattcttatattgtattttcccttcaatgaccactgcaataggaagaccgctataatctacatgacaatttagtattttgggtgtcacaggcatagactcttcttttggaagtacacttatttctccatttggttcaagaatagcgtattgaatattggtaacgtcagcatagcctttgcttcttatacttgataataattctgacagagaaaagcgactttttttcagattcattttgattaactttccatgttttatcaaaatcgttggttctccaataacaaatcgattgaggtgcttgtatagacttaattttgatagtgatatatgtatgaaaatcacaattgcaatccctattaatgcttgaaaaaccccctcgactttgattgctttaatcgctatggttacaataaaaaatagtgctgttaaatcatgcggggtaaattgagctaaggcggatttccccataaatcttataaccacaatagtcactaaaaacaatatgagtactgttccgataaacgagagcatagagacacctctttatataaaccatttattaaaggaaaaacacactaaataattctactaccaaaaaatactgtcggttgaatacgatcacgctgttcaattatttttcatgttacattccatatatcgtccatgtctctcatattgttaccatctttgcccacaaactttccatttccaagactctaattgtgaaaatgtgaaggaaggggaactttccattgtggaaaacgattcctttaaataaagttctcaggaatattttattgctgcgtggaaggcgttatcctgaattagacagcgctacatgaaaaaaaggtgcctgagcctcgctatgctactaaactaacgtatcggggctcaggcaccgcatttaagcaaatggatcctgatcttgtcatatttaccacggtagcttcgagtcctttatttcttctgcccaaataccctttaactcgttgatcatttctattgataagctaccttctgatgctgctacattctggttgaattgttctatatcttttgctccagggataatggtagacacttcttgataggaaagaataaattgcagtactgcttgtgccattgaaatatcatttccaagaatacgacgaacttgttctactaaccttcctcttcgttcaatttcctctgcactccatctgcttctaattccgctaaatctactattcgtatcatactttcctgtcagccatcctgaatcgagaggaaccttggtaatcacgccaaccccttgatgttcagctgattgtatcgcagccgctggttcttgatgaaagagattaaacataacctcaataacctgactgttcgttttattcaatagttcatccatctctactccagtatcgaccgaagctccatatgctctgatcttcccttgcttctttagtttttccaatacttcaaactgcgggctgtttccattaagagttgagaatggcgggttatgaagaagtagactatcaagataatctgtatgtaaccttcgtaaactatcttctactgagctcatcaatttttcaggttcaaagttttgttcaccattcgaatgatgtccacatttactgctaatgaccacctgatctctttttccttcaaaaacttttccaagcagttcttcacttttcccagctccatagttaggagcagtatcaaagaaagtacatccggaatccatcgcgttcctcactaaatgaatgccttcatcctctgtcatctttccccagtctttttcattacctaattgccatgccccaaatccaacctcagaaacttttattcctgtatttcctaagttgcggtgtttcatgaactagttcctccttttcctcattcatgcttttgttgaatgtttaattagtttttagtaggtctaacaaatagtatatcgtgtgtgagtaatttttcttttagattctaagttactattttaacaataatttcctaagttaagctaatgaggactgttattgatcttataagaaagagcctttcatatgttcactttgaacgatgaaaggctctttcttttatagtgatgaagcatagcgggctcgaaccgctgacctctacactgccagtgattaacttcctactttaagggagtttgactgagtactagaaactctctataaccctttctatgttaaggtttttcgagaatgctactttgaatgaattattttgtttttcggcgagttatgtagagttagcacacactttgcacacaaaaactaaggtattactttcccatgaaatagcgatagtacttattttatatccaaaggctactatgctgatttaaatgataatactctatagttaattactattttgacgctgagctaacgtccatttaacaattgcaatctctaatgggtcaagacgaggcattatcgatcgataccaatggtttgcttcatctcccggtaaacatttagctgctttaatgaatgctcttctttgccacaatggaaattccatagcatttcttttttttggtctaaaccatgactgttcatttgcttcacctagagcattaataatttcccttcttgtaaagtcatcaaaatactcattataaagagctggtaagttatcaactttccatccaggaccgttagcgaaggtcctaaataaccacccacgatgcagctccaagtgacctattatggactcatctagtattctatatagtttttcactaaccgttactttttgttcttctgttaaatctacctcatttaagtaattaaacacatgtttgaaagatggatataacttatcagcattatccagcactaaatccaatacctcagtattttgaagttgagctaaccttttcaaaacaaacggtactgttttagtatcaatgtcctccttcattaattcttctcttaatatttcttccaaattcaattcatcaaatgattcttgtgtagattccggtaaattatcaaatgaaatcgttgtataaggatcatctataccagcatcgttaaatatttcagttattttctcatttaaactgtctgttgccctactttcttcactttttaaataatgcttcctaaaattttctacgggtattatttttgtcttatgttgttgtagagtaagaccatgattatcaaataaaaaattagctagtagcgagagctgctcatatgcttctttttttgttttacaaaagactctaaaatcatcaacatatctacaaaaatctactccttcacttagtaaggcttcatctatatcattaagtgtaagctctgctagtaaagctgatgcatcaggccctacgggtattccatatgaaatgctgtagttccaattgcttaataagcgcttaattgcttttacatgattggttttattagtgcaagagcttaaggcattttctagggggtgtgaataaattctaggataaaaatctgcaatgtctgctactattacatattcatatccctcacctatgaaggggtcaactttcgttgagcagtagtccaaaaaagctccataattaatttctgaatcaaacattcctccctcttcatttggtttaaacctatatgaaaatgatatgtttctatttataggtacacgtctttcttcgatatcttgtcccaactcataaactagagctgtatagattaatgtgtctagtggatctagtaaggtcgatattctaaacccatacttatgcttaggtgtcaggctcctcttgaaacttctaactgaccagttcaacacatcctgagtttgcatgtaagttttaaaattacctccgttcggtagttctctaacttctttatcccaaaggtaacgtattgcttcatattcaaatggcactggaaaaatgtttgtatctccatatttctcaatgtgttttaacgcccaatctagtgatttctcctgtaaccttaacaagttaactcccccttagattatttacaaattactatctaaaataaatatgtaccttacttaattctacattatctttcttctatatgtaaaaaatggaacaagcttaatttaaagaatttggcatatatccatgtttgggatagctttatattttttaacaaaaaaaaccttcaatatacaaccggaactagattgttgtatatcaaaagtcttttatatttttcgattattacattaacagactacctatgatatgtaagccctcgacgacttagatagaaaattataatatgtatgattgacagctgattcctgtgatcagcgaaccaacccttgtaaattacgtaagagaaagtaaaatatctttagcgattgaccaaatgattcacttttaaattggtattatatttagataaaagatggttggcttcttcttcttgtagcaacgttagcttaaaacgtaaccgattgaatgttttataatgcatatatctaggtttaaaagacggtttatcgaaaaccccttcattatagattcctaattttctttggagcagtcgaatttttaattgaaggtactcaaattcttgtccagacttctgacaagtggtgtaagtaaggttatggcaattccgacaacgaaaatacttaccaacaacatagagcttcatgctgttcctactacacccccgacaagaaaaccataccctttccccaaatccaacctcggatgtaacaatgtctatctgttcttcaaccttctcggaaatcgtggggatggttcgagaccagtgaaaaagtcggattaagaccagatcggtgagttaaatctatcattctccatgaaaaaaccccctgaatggtataatgggtacgaccaaataccgaccattagggggttttacttgtgcttcgattacagtcaaagcaatcaagttttcactctgtattatacgataaaattccggaaaatcatattcttaagaagataacgactgttattgatgtttctttcattaacgatcttttgaaagacagttactccgaacgttttggccgtcctgccaaagaaccagagttaatgtgtaaacttctatttttacaacatttatataattattccgatgaacaaatgaaggcagaagctgaactgaaccttgcgtttatgtactttctcggtctcaatccagaagattccctgccagacaaaagtctcctgtccaagttccgaacgcagcgacttggagaaaatacgcttgatgaaatgatgactgaaatggcgagacaatgtgtagaacaagggattcttgaaggaaagagtgtcagtattgacgctacccatatcgaagcgaataccaagaagaaaacacctgagcgattgatgaaacatctggcccgaaatatcattcatacatatgagcgagaaacggggcaatcacttgagaacttaccagaggttccagattatcaggagattccggatcaccgagaagcgaaggctgtgatgaaagattacttattgaacgtaatgaatcaagtagaaaaacaagcatcaaattacgatcaaaacacgaaggaagcaatacaaaaagctcaggagatcctagcggatcccaagtttatcaaccaaaaaggcatccgatcccttattgatgaagatgcgcgggtcggtagaaaaagtaggacgcaggacttttatggatacaaaactgaatttgtgatgacaacaaacgaacggattattacgtccgtacgcacatcggatggggcttacaccgatggtagttatgccaaagaaatgttagctcaaaccttaaaatcacacatgaccatcacggaagtgtatggggataaagcttatttcagaaaatttatactggatgatatacactccttaaaagcgcacccttatatacctgtaagctcccttgtatacagacttgacgaaagtcaattcacctataataaagacgctgatgaatggcagtgtagccaaggaaacatcaccgaaaagaagaaatattttaggacaaaagggaaagatggtggccgagaaggatataaatattactttggattgaagcaatgtaaagcctgtccacttcatgacgaatgtgcaaagaaaagtgcaagaagattactggtggtagggataaacacagctgaattctatgaaatatctcaacaccaaaagtctgaaacgtttaaagaaaaatataaaaagcgagcttctatagaaggaaagaatgcggagctcaaacgatttcatggcctatctcgaaccagggggtatggtctattaagtgcgtccattcaatcgaaattagccgccatcgcggtaaacatcaagaggatcgctgcgatagcgtcctcttatttccatgtatttttggttgaaaagctcctattacactctttatttagagttagcgactaagtctaagaaaaaaacggtagtttttcactggtctcgaaccgtccccacgattctctttctattacacaatttgacaaaacaatagttttctcctttaattaagtttgagaatattttgaattgagggggtactattatactatcagcatatttagaagatactgaatttgcatcaaaacatctgttcacattactagatgaattagttgagcaaaaaaacaacttaattcatcttaaagcaacagcaaatactcattttaacactgctcaaacatatgaagcttttgcaaaccaagttaaaacactgggagactatgaagaaagttttgacttcgttagacgctcatatgaaaaccgcaagatccatacacaaaaacaacaaataatcgatgaaattacatcgaaatatactgaaaagattcttaatgtaaatgggccaattgagattattgcgcaatcaattcttcaaattgcaaagcagggattatcttcaacatacgcttctaagatacaaaatatcgttccgatgcttagtaattcaccaagaaagatactaaccagtaatggagattcaattaagaaaaatagagacgggatacctactagtcatgatataaatataatagatgttatctggcaaggtagaaaccagtctttacactttgaagacactccacatcaaaatgttattgatatatttgatccattaaaaaatcatttctcaaatttagatggttatgataataaagaaaataaagcatttgaagtgatttcaaaagtgttaaaatgggatgattacgatacgtatttcaatgatatacaaaaaatagtataggagatgttgtttatgcttattaagaacattaatgaagaacaaaaaagtcgtattgatagctatattgcccagttagaaaaaggtgataaaataaataataatgatgttattgaggttattcatgttcttaaatctgcaatagacacaagtatcggacagagggacaggctcatcgtcccccaaatatttttaaaatagtacccacggtattttcacttcgcgcaccctaggcgatatctttacacaaaaaaaggacgcccacatgagcgtctcggtttgatttcgactatttataaatgcttcgataatattgagatacgctggccctgttgtatgtcgaataatcgtcatttttcggagcgtcttccggctgcgcttctgcccatactacaagtaagatcgctaatataagcccgattcctattgtgattagatttcttttcataaaataacgcctcctcccattaatatctacgcgctattttatatataagaagtacatcctcatccactaagtaatatatttacgatttaatatcccaaacgggatgacttcctcatttcgtttttcttacaatcatgcgctttttgtactgccacgctataataatactatagtgaacctacttagctacggtaggacgggggctcatccctgcaaagatggagcggcttttttatttgtctaacgtttgatctttcggcctttattcaatttgccaagaacttcattaagtggcgaaaagtccgcatgttgttttctttaacgacttctgcgataaatgagtataacgaataagcatccgcaaatctgaatgaaccattaacatctgtaaatgccgaatatccattccagcctcaagcgccatcgtcgcaaacaaaaaacgcccccctactccgaattaatttcagaataagaagcgttttgaccggtgctgtgcaccatttttcgtagtagcgctaccctgcgtctaagtcatcgggaagtcaccgacaagtcaacgttgatatagcgcaattcctaccatagatggagcatagcgggctcgaaccgctgacctctacactgccagctatattagattagtaaaatacgtatttcatcattaaaatgcgttcaccaggacactttaacatcatagattttatttagttcgtgaaatttcgtgaacatatgttgaagcaatactaagagactatgggtgaggcgaattatatagtatagaaacgagtaaatatcagaagtaaaattactcagatgcacttaatgtttgaattcaccttagtgactcttcagataacactgaagtacttctatataaaatgaattacattaatcttaatatctaatttataaatcacactaaaatcagcattttttcacaagaaaatatattgctttagtggtggtcataaatagaatgttgtagaggtatttaccttaaagcggtaaataaaagtaccctctttcataaaatgcttttttttcagctttcaccctaaatttcttaaaaaccaagatattaactttaacattgcatatagtattgccattcctcagttattgcagggtttcctctattataaatcagaatatattctttataatagcggggatcaaaatcagattcttgagcttggaagccaatattttcaaaaacgctctttaaattctcattaattatttcataggctttgttttcaagcttctttacaaactcaatatctttgtaattttcagctgcgttttcggtatacattaaatcattcagtttttcccattcgataatatccacaatttttgagtaatacttaaggatttttaaatcgtcagcaaatacttcatctgacattgcatataggaaatatctaattatttgttttaaatcataaggtgtctctaatatagaattaattctttctctaacaaccgtaatatcaataagactacctttcgaaatccactctctaaaaatcatatgtttatcattatccgagatctcttggttattaattaattctctatttatataagtgtcaaagtatgtctcgacgtattctttaaatgtagatttggttttttcatctaaaatgtcacttttattaatactatttttaactctatatgcaatagcaatgttctcgggatttagtaattcattcaagtacttaacatcataatttttttcaatacataaggacataagatttactatgctccttgattgtatacttgataagttttttgtgtattcatacattattatttggtacaagttaaacaatccatctttattttcgtcaatgatttctatgttttgagcaattaaattacttatttcttcaatagtatataattgtttaagttctgtgaatttttctcttaataaatttttactcaaattattaaatttatttaaaaacaacttgatttcagcaacggataaagttccttctggaacactatatttaaagtacttaataaaattctccttagtacttaatctattttccccattaatgtatggattacgaggatgctctccattaaataattgagctgagtatatggaaagttgcaagaaaataggtttaaattgattaatatcatcctgcatttcttctagttctttatctttttcaagaatttttttatcgactctttctgtaaaataatctgggtttcttgaaataaagttaaatagcttaatattttttatttttattaatagtaataataacaaatcatttagattaacttcatctttcaatatcgtactaaaaaagcttactaagttaaaatatctaataatgtttctgacactaaaatcttgattaaatataaagtctattattaattgagtatctatttcttttaattgattttcattaaatgatagtgaaaatttactttttataaaacttttcatattacttttctctactcttggaagatagattggaatttgtatgaatttttccagatattccatcccgacttcagaatcataaatatccttattacctttatttagtgttgcacccagcgatttggagattttttcctcatccattcctactatatatgtagtatttgggaaatccccaattaatcgcattaatttaaatattaactttatctcatcattatcaagtctatctaattcatcaataaatactacaattctttttgtagttttattaaattcaacttctagttccttttttaacttgtatatatcccgttcttcatttgagataatctcttttagattaatcattagacctggtggccttatacttatggcagcaaccagtttaatataatcatctaagtatttctttaaatcactatttattcctctgtctttacttaacgctgctaaaaactgatcaaaaaaccttaaaattaaatcatcagactcactttcaaaataccaaggtgtaaaattaatagttatcgtattatttttttcaagatttgttctgacaagatttaatagcgaagattttccagctccccaagtaccataaattccaactgttaagctttctgaactttgttcacttattaatctactaatatccttcgcaaattcttttcttccaaaggtatcctctttagaagtagatataggtttttctgcaaataatttatagtgtaaaccctccttgtcgattttttttattcttttacgattgatgatcatttcaacaataaacactactatgtatgtgagaattaataaaactgataaccaaaacgagttatcaaaaaaatctgagaatatatttccttgatagttttttaaatgattttgtccaaacaaataacttatacatacagcaataaaaaagataaaaatcatagttgtgtatttattttctctattactaaaaatatacagaataaagttaatagctataaaaattattaacgtataaagaaatccacataaaaaaagtttgctattactaaaaacctgaaacttattaattattctgttaaagtttaacctaaagaattcaattaaaataaagaaaaggaaaacaccaattatttgaaatatcttgatgtttatgccgttaattactttattactaatcattaataaataacacctcatttaaagtcatcgtatataatttttaatgtgttatatcttttatgtcttccaatgcttctttctcattttcataattaatggtatagcacttgattttttgtttgaatttccatcaagatgcttcattttagctcctcagcagtcatatatttctcatactcttttaacaacgctcgttcagatgggctgggatttagtagatactttaacttgttgtttccacgtacattacttccaaagagtttgtctgaatcaacttcttctctccacaaaaagaaattattatcacccttatttccactaccaccaagactaattcgatttgctcccagttttcatagaagtattcctgaagtaaaggaattactttcgttttcataatctccaaatagaatgaaatactttcttgttcacctgatagaaataaggcatgccctaatacatgatcgcagtcaaaaagatattcaatacgctgattaatcgctctaagcatttgttgaatattaataccatctatatctcttggtaacagagtataatttggcatcaattcaatatattcaaaacgccttctaagtgcagtgtctagcaaagcaatggaacggtcagctgtattcattgttccgattatatgtacgttattcggcactccaaaattttctcctgaataaggtaaggtaacacttacttcgttttttgtaccacgtctattatctgtttctattaatgtgataagttccccaaaaatcttagaggcatttccacggttaatttcgtcaattactaatacatgctgacgctcttctcgattattttcactttgatcagttaaaggtttcttaagctctctacatttatatcttctctataaaacatatagattgtttgctgggagaatcgctttcatttcaatatgctactaaccaaccggcagctcggtatcggtatacaaccattcaactgaattctagcttatttaagctatcctctttacttgattggagttcttttttaccttctactaaaagtacataatatttactgtcacacactttaactgttattatgttaaatagagtctattatataatcattttttatatactatctcttacttgatttaaaactccttttgtcacttctattattccaattatatcctctaatgattggtgagatttgataaagctaataataaaagatacctttaaaggtccattattacttggtaaaaattattactacctttaaattatcaggtagtgattgcagataaattgaatatagtagagcttaactattgtgcataatttattatgaatagtgttcacgttggttatttaagaaacaataaaggatgtcaaacctaattgacaccctcaattattaattgactcagttagttctcgtacagtgcctacccgtttttcaaagaaattatcccagatatctaaacatgtatctagcataactttattgttaaccctcaatgtatcgttatacaatctaataaggagttttggcaattcggtagataccaatcgtaatctattactaaaatcttttgtttcgtccgcccagtgttcacttatttcagaacttaaacttaataaaatatcactaaactccattaaatcatcctcatattctaagagaatgtaaatcaaattagagctatcattaaaatatggagattttatatatttttttataaagccatctaagtgtttgaacttattgaagtcaaatctgaagactttattcatttcttcttttaaatctacttcatagttttgtaagaagccatcaagtatctttatgcttttatttgaaaagctttcattactaattagttcccccgctgcttttattacaccttttctttgatttagagatccattaatacactttcttacttgttcttcaaatatatcatgaatgatatgatatgcagtgaccatcctactacctaaaataacaacctcttcatgttcgcaacaaatcattctttccagtattaatcctaatttgtcataatgttcatttattgtgtaattcataaaggttatactgtacctttcctccaccactcgcaaatcttctatacaatttttcaaataccaatttactgctttcagtttatcaatatttataataggtatgagagtccctactaaactaattcttactgatggatgtgagtctttcaaaatattttggatagtatcttcatacgaacttaaagtttttggatccctccataaaagtttaccaattgcatctaccgccacacctctcacacaattaatactattatcaaatagttccgtagaagataaagttgccatcgaaccatcccaatcatttctatataaattcattgtttcattttctggatcaggatgatttgtacttatatattttaaagcatttataatattttcaggccaattaatatcatctctagctctaactaatctacaaaatgcaagagaaatttctctactatttacattaagatgtttgtctaaaacattaattatcgtttctttagaagcagggtgccattcatgtacttccatatcagaatcatactctttaaaagcaagagcccttataatagcagctatatatgatggcggaacatcggatgataaatgcaatgaaaggtttccaaatcgttctggatttgtcttagctactctttctaaactagatgaaaattgaaaaattgaacttcctactaaggcacctgacttatcttcagtccataattttgttctatctgtcttaacctttgaattatttattatatttaaccatgaattatcacttatttttaatagattactatctagtttggactttatcactcccccaccatagctcttaacattcgcaatctcatcatcggatttttcattatatcttcgtttaaggactttaattaaatcattaactttatcagttgttctttttttatccaatttcgacaacaatagatattgcgtttctccccaataaaagtttaaaaagtatccttctttcctacttctaaaacaccacctagctagttctagctcatttggttcatgataacaatataaaaattcttccaactccccaaataaatcattactgcaatatggtgaaagagattcgataatttctcttgctatcttttttgggggcatattaaacctattttcaccaagttgtataattctatatccattatttaaaaatagactcataccataatccgcatagttgggggggaaatgactaattgattcgaatacaaattctttaatagcatctgaatagttctcctgtgcataatttgctcttttaacaaattctgatggatcattttttgccataacactgcctgcttttataattaacctaattgtaccttcaataatggagaactctccataagtgtttccccatttatattcatccatttctctttcaatttgttgattatattttgctatttgtgatagtagtctatcccaaacttgaatagggtatttttctgctattagcagtaattctttcatatcacttttgtaccaattttcaattctatttttcccatttccctcacttagataagataaatcttcaatggccactaaaatagcttcaatatatataattgttctcaaagggtgttttttcgccaataaattccagttactataatgatggtactttttattttttgctagttttatacgaagatcaaatatttcttctgaatctttttcagtatcccagcctattacgccaagtaatctatcttgtaaatctgaattaccctctgccaattgattaagtagttcaagtaactctttaggaaaagagttttttatgctacttaaaaggtttatggatatattagcttccatttcattagtagacataatccattccccaagatagccttttttagctaataattttatacccattgaatttcctataatcacagtctctaatacatgaggtctccaataatcatcttttattaattctataattagttcttcagtctcaacgtcatattctaaagattgaccaattacctcaagtactaaatgcttcaaatggaatctaatggagttagaatataaaatatctctggctaattgggcaaagttgtagaatttttcttgaattaacattatcatcgcttgtcgtaattgttcacgtcgaagcaatgtttgattgcttttctctcctaaccattccaagatactttttcctaattctattgattctactactctttctgctatcaagtagtctaagtaactttggtgactaaaactcaaagttccattttgctctcttataatagagtgtgattttaaagcattaagtgctatctgcgaatttctatttacaattcttatcggggcagatatcactccgttcttctccataaatgtagttaatttatcaaccgtatcgtttaaatcagtaacggacaaaccttctttttcgattttcaacctcttaatagaccaaaaagctcttaataaatctatggatgaaccaaaataaaagtcaccatctttgttaatttctagccacataaataaattttgtggaatggataacaatgaatgttgtttgtaatcaaattttggatatgtttcacctaaaacttcttttaaagtattttctgacaaggggctaacctgtatattttcccaagtatattcttgattatctaatttgttttcaaaccaatttttaagttcagggtcatattttaaatcaaaacttctacatgacactattaatttaatttgtcttccttgtcgttttaaaaataaaacttgattaattagctctttacatacatctagagaattagctgagtgagctcctgtccatctaattgcgtctagttgatctattatgatgaccactggttcactatctgaaacacttgctatcgaaaaaaccggggaatctgagaatcctatttcatttccataatgaaatgcatttacttttggaatttgccggtccactcttaatggaacatataatataccctctttatcgaaatacttggtaagttcataaagtacgccacttttacctacacccgaatctccagtgacaattattagaccgtcatggttcaaaatttgtatacaatcatttgtttcaggacgattaataagttcatcattaattaaattaggttgtattgattccttaaattcttcttgtaatctaaaaaccactggcataatagtatttagaccccatggttttaagaatattccttgcttctctaaataggttaataaatcattagaattaattgagcatccaagtttatcattttctaaaggataattagataaatgtgcataaactgtttctcctttaccagtaaataagaaacttgcttctcttaaaagatcttgttttgttacctcattatcaggaaatagaataattttaatacgtcttaaataatcatacgcactattaatatcttccttatttttatcatctaattccattgcatcacaaaagtctttaaaagctttttgaacactctcacctctagttaatatttgatatttataaaaatccttggaactaccacttgaatttcgtgctgaatcacatatatcccctaataaagtgttaggaactgctgaaacaatattgaatatgtaatttggatttttatcaagttgatatttaacctttttcaagatcttcttatttttatagtccgatacagtccatttctctttatcagcatttctagctttgcattgatgcccttcttttattccctcactatgcttaacccaaaattctactccaacctcatcttccccagccggctctattgttatcgaaactatttcttcattaattagtctgaaaaactgtttaataacccatcttccctcatacttattgcctaacttatctgctcttccaccaggttcaaaggacatactttttcctcctttaaatagggttgtaaaaggactatttactaaaaggagttcctaaatttaaaggaactgctttctgctgcttttcttgttggtttcataactaaaaaattcacttctataagtcttttactatttcttcatccaatattgcttttctcttttcccaatcagccataagagagtacaacatttcataaaattttcacctctatttatggtacggttcacagtagtgattttagaggcaaagaaacagcgttggatatttttaatgctgtttcttgtcttactttactgagtatattttgaattgattaggagttaaattactttgtattttcgagtcttttaacaaatcatttctaattgcaaccatcgcttctccaagtgcagtttccttttggacatctgtagaagagtttgatataacggtttccaaaaaggcgtatagctttactacaacatcatcaggacaatacatccaacataaatctacttgttgcagaaaattatcttttaaacttgggctatctgaaatcacatagaaccccttaatgcttttaactaattcagcataacgttcttcttttcttttgtagctctcttgctttctcttacttttttcatttaaaccccaagtaataaagcctgcaactaccgaaattaaagttattagtagcggtaaatactcaatcatgacttactagccccctttatactccttaattattgaatcccaagattactttctaatatatttgcagatggattcaaatcattaagcagactttctatgatttgtttttgggcatagttagctcttggtccaataagaatttccatatctttcatagcatgttcatctaactcaagatcaaaaaaatctttcttcagcttttctgtctctaaacggtcaaataatcgagtctggtcttcgtatgattttactgattctaaatctttcattgtccagggtactacaaaaaatttataacgatactctttttgaaacttccattgcttgttcttataaatcccaatgtctttaattcttatatttttttcccaacttatttttttaactccatttaccattttggtttctggttttttctctgttaatactttccgatttatcttatcagggtcatcggtatatcgtacttgatataggcttgccaaatagggtgtgtttagtaaacaatcgtgattcgatagtttttcattagttagtgaaggatgtgttacgtaactttctttaatatgttttccaccaggtttgatctttacagttttaaatggattgattggtaacctaatccttactccagtcatgttaggtgtatatagattccataaaggaattgattcctctgtttcatctgtccaacaacttacaaagcagaaccttccaagatctccataatctgcagtaccttgttcctctatatcatccactcttgatagactactgaatcgcattgttttatttttcaagattaaagcaagagtttcaatactcgtataatgataaagatatggtaattcttccatatgcttatccccccatttatttattaagctaacagagttgattctattttcggtatggaatcccttaaatgaatgcctttttttcttcttccatagaataactcattttacctagggcaacttactaccatcgcaatggagtgatttactagattccctaaatatctctatactcttttacaccttgaaatacagtcaccaattacccttggttcatatcaactcgaccatttagatggtcatcatacaattctttatatgcttgaatgttctttttacataatttattggatctaggaaatgcagttatcaattttcgtatgaagcccccctaaatcccgaaacctcattatggtttaattgtaacaaatataaccagttggggggatataggaatgaaaactggcacacgacgcaccagttttcccagtatttattactccttctaaatgaaatgaacaaaaacctatctaactagcttataataggagtatccgtgatctctttttacccatttaatgttactctttatgctgaggtaattatgaatcaattttgttaaggcatgccgtccataaattatttcatttggcaaaccgtttttaattaattggtctattatttcatagataggtgtataacgtttatgcttctttaaatattgcagaatgatttcatcaaattccccaatatattccgcaacatcaactttaccacttaatactttatagatttcttcatttttcacttctacttctccatatggtgtctcaagaacatttctctctattttcttattcgcttcctttttattaactatttcttttaaccttcttacctgtctattagataaaggtagcttcatttctattaacctttctatatcacgaggtattttagtatcactcaaacttccctttaaaaaaggaaatagctcccagcggtcatgatatctttgtagaatttcatccagttcataattaatgtcatttatacctttagttatttccagtgcaatattttctggtatattaagttcttctagaaagtgagttcttcctagtgtccttttctctttggtcttcttatttattaatatgtattgatgacgaagtggtcttccacatacacacttaatacctttctttattccaccgtgatcaatgtacaaatggaatttccaatccttagtacccttatgttttgctaaaacatcagcaaaatatgagcgataactttttcctattaccaaaaacaacgtttttttctgttctttggttaactgttttaaatatgtagttctttctttctcagtgaggtacattttcatgaataacatctccctagataatattaaagagagggctcaatattgtatcctctctttgtcattattacctatacaactacgtaaaaaatctgcatagcttttttgattaatttattttcacccaataaacaattatttgatgctacaaattccatgaataattgtttttttataaaatactatatgattacccatagataaccgtcattagtgaattagaaagaattggttaactgataacatgaaaatatcagatggaatagttggttaaattcaattctgaatccttctctcgtttgctatgaaagagatattccaaaggtagttaactatcaatcactttcaatggattagtacactcttttaacaattttcataatcagaagaaaccgttgagttaactcaacggtttcttctgatatgtttatacacttctttgttttcttctaataccatgcccatatttcttatataattgggatcaatatatgttttagttgattggatttttttatgccctaaaagttgttggattacaataatatctgccccactttcagccattactgttgcaaaggcatgacgaagtttgtggagagttatgggaggcaattttgcatcaataagaagaaatttaaatatttcttggaattctgatgcagacattttcttaccttctttattaaacaagaaatcacaatgtgaaagatgatgcttagtcgtatacttctggataatatcgccaaatccatctcttaagacaataaacttactggatccatttttggtatctttacgatagatagtctcatttttaaaatctatctcatttattttagtatttaaaatttctgataccctactaccagtacttattaagagaatgaaaaaaagtgaatctctttcaacgtggtcactttttttcaataaactctgtaggaaccttaacaaatcatgtcttgttggtacatatttaattcctttaattaagggtttctctttatgtatttctaatgagaattttattccttctgttacgatttcaaaatcatatttcctatttaaataaagaaagaaactatgcaatgcgcgtttggcattatagaagatattgtgaatagaactactcgttatccctttaccaaaatgtacagaaaaaagagaatcactaattggattatagttatctctcacctttaaataatcttttactgaattcaatacctccacactaagttttacttttcttggtttagttttgccacaacttagacggagagttccttcaatcaaatctaaatcgtctaatgtacaattagcaatttcaattggcctacagccagtgtctactattaataaaaatatagaaagatctcgtagctcattatttgacctctcatatattgcgttcatcattttgataatcatttcttttggaacgtattcattagtacgctttgatcttccacgtaaatatttagggataatatactctttagaaatcagtccttcacttatcaaaaattcaacaaataactttacagttcttagatcagaagtaaccgataccttttgcaattcctctttcgttattctgtctgaaagcatttcctcgtaagaagaaattttttcaaacaacaaagcctctttatttttttctaaaaacacactaatttctaatccttcttttcttaagaaacgtgaaaagcacaatatccttttttgataaacatgaacagacatgtatccattactttttaaaaacactataaaatcttttatgattaaaggtacctgtattggtatttttttaggtttgataacttttttcttcttctcaatatttcgcttcttaagttcgtagtaatcagctaattgaaaatcgatgtatttatattggtaaagataatttatgaaggagacaatcaatttatattttttcttcaatgtattagtagcagtttgataatgaatttgcacacgttttaagtattcaaggtattctttgcaatgcaaataagataattgttctattgttatcccatgatataagaaaaaatctcttatgactttcccagatttcatcaaatcctaataaatgtattcgtatcgttcccaatacaatgaactatcaaaacgttggactttttaaagtccattgacgattaattattaatttcaggatacatttatcttggtgatgcagacgtgacaatcccaagatatcctgattatgaaattgagagaggttaccgccttgcccatgattttatgaagggtgaaataacggaagaagaatacttttcagagcgaaaagatgatgctggtagagatttctttgactggccagaattaattttgcttaagaaagatatggacttattcagaaagtacttgctcactttttcaaaacaaggacgtattaatatctttctaaaaaaagagatgttaggaatgccgttaactgacttatccgataagtatggtattccaaaagacaagatcagagcattaaaagggcagcttcctacaaataaaataaatactaaagttaaaataagaaaaattgggttgaaacatcctttttcatttgaattattagctaatatggctattttttcaaaagttcctgtttcatggtatacaaaggaatcacctgaacataactggaccattgatcattttaaatatttatctgatgctcatttgtcggttgatcaattctttgattatttaactcacacaagggaaaaagctttaataaagtggaaaaatacaaaagaacatcttaaaacaaatatatcgatctatgatattaggggcgtcattttaaacattgatgaatcacagaacatttatctaagagtcgccttttgggaaaacggaggatttatcattgaagtcttcagtattgaaaatcctttttatgactttttgacgctaaatgaccttcttaaatcatttggttctctagaggtaggttacgttcatactttaattaaagaacgaattaattttgttattagctgcagaagcagagataactcccacaccctccctcctgacttttgtttctttaactggtgattggactttaaaaagtctaatcgtatttatagcttcaaaaatgttgaacctccttgcaaagggaggtttttgttatgacgaaaaaaacaaacaataacgggttaactactgaagcagaaaacagaagacgcagcatacttatgctagaacgctggttagaagaacttgagcagacatatgacaatcgtttagaaaccagtattaaagatgaaaactaaagacaaagaagattatcctttaattttaactgcaaaagaaataagtgagatacttaaaatctcaaagcctacagcctacgagttaatgaaacatccaacatttccactaatagttattgggcgaagcaaaagggtattgcgaaacgatttcttttcttggttgaaaagataagcccctacggtaattccccaaaatgtatttagagtaatgaagcggttatctatatagataaccgcttcattactctttaaaagaagatttttgcaaataaataatttacgtaaaactaagattatacacgaagttaaattgaagagagtgacattctctctttttgtctatggattgcacacactactcaacaatcgctccgatttaactgaagaccccgatcgagataaatgaaaaataatcagaaagctaatcaggactctttaatcagatatcagttttgaacatttaaatactccggtaattcattacttaagtgcttatgtttctcccaaatttcaatattgcttttataaaagttctttaaatctgcttttaaatcccttggcggataattggttgtgactgctctgttaagagcttctacaatttcttcatcaagatcaaaatttcttaaatagtataatactagatctttatttctattgccccatttgaaatcatatactattgatttatgtataaaggccttttcataaaagtggtcaaagaaacctttgtcctttaatataaacttgtcaatttgagtcacaccttccccccaccacgattcactaaacaaatcagaaggtactttgtcgaccatttgatcatatgattccttcagttgatcatttggtattaaattgtttctaatcaattctataaaaattgcataatcatcagagaaagaaaaatgttttttccaaagtaatcttataaacttctcatctttatgaaaatatttaacaacattcggctctcctcgtaaaagttggagagtaaaatattgtttatcatcagatactaaatatgcaataagtatatctgtatattcttgaggaagagtaaatagtttagaccacaatagcaatgaaacactatcaattgagccatataaaggatttttaacatgttctcttgacttatcaaatattaaatgcaaaaagtcattaaaattctgtttctctacagaaaatgaaatttgatcaactattggattaattttagttccctctggagttaaatgaggattataataatcgttaatctgttggacgatatgttgcattccgccatgaactacaaattttgataagttcgattcaagaaacaaccaaaagctttctacatgagaataactaataatatttccttttgcatgagcacaatcattccttctatttttccaatagaagtattgttcatggagatcttcagataatttgaagattggctttttcttattttgaatactctctattattcttttttcccagctatcatcatttagaagatttttttgaatatgctgccattctgaaactttatattcttgtggtgcttttgatgataacatccgatacttaattattgtttgtaagcctaaaaacgaaaataaaagggaagcccgataggctgaagccttatagcatattatactttcttcaaaaagttctttggcattattatcgatattttgagattctatccattcggagaaccttaatttcatttttaccaccatactttaaaagattttgagcgttcataatcaagcaaaccaacctaactgggcaattctttaaaacttcatttacttgattcatatttcatttaatataaatacatccactttagttatatttataaatttcaaatcattaactctagtttcataataaaaaacatatctcataaaatctatttcaattcgtttattaattcatattatatttttcgtaatatgtttctaataagaatatgccgattgttgccatgctatttacaacaagtcttgcatgtcttttttctaacctatattgtttaccaccttttccatgagcagcactatatccagtccttagtactccaattcctaaaccagcgttagtcagtccgcctaaaatccttttgatttcagcatcagaatgagcaccaggcgataaatctaatagtgcataactttttgaaactaatgatgataaactttgatcttttggatactctgtattaaagaaatctaataatgatttacaaatactctcaagtgttgaagaagcactagcaattgcttgatccttatccttctcaatatttgaaatacaacgattaaagtcatcaattatatttttcaaataattatcttgtaataagtcatctaattgatttaatgtttctaaaccgttatgtaaattaatatctaactcttttgctacttgtataacaactttgtccgaagtgattgataataaatcaattacatgctttcttttactaggaactattgattcattattgtgtttaatattaaagccactaagaaacaagtttatttctgttgtactcatctcttcttgcaacttgatcgcaacttcattgattagtttaaatctatcacttcttttcaatacaaagactttgctcataattttctctcctttgaacataagatgaattcaactaaatctcgaattcaatttttcaacactcctgcccgattccttactaccaattatttcaaacccctattactttcacaagctttcgctctatttaaccatcaattttaataagagtattataggaattttgttatattagaaaggttaaagtgtcaaaactctcacatattcttaggatatagtgcgtttcatgataatctacgagccaaggagtttcccctaactctttcccgttgaaataaaatgattcaagccctgataccgtaaggcgtgggggcttgctatgtgttatgtgtaatacatcgacactggatctatatcttcgtaaaattgatattatacacgaagtttaataaagagagtgacatgctctcatttgctctaagcacaaaacgaccagttaaataatcgcatgtctatttactgacagtcttatgctactgattatataaaaaagcgtaccccttcctttgggaatacgccaatttcaatttttgctacgtagcttatttatcagtagtcttctattatttctcctccggctgccttaactaaagaatttattaatcctgtaagttcttcatctatttcttttttgttcatttcctttgctattttggttgaatctcgattttctttatactttcttgctcgtgatccagatatatctttagctaccttcattgcttccttcggatcagcattatatacctctctttcaatactattttcttcaagatggagcacgctctctactttatcaattgggaagtaattttcaatttcgcctttttgtagcacaaaaagttgatgctcgtttactttatattcatgttttagaaccctcgttatatcttctacacgatccttactatgaaaatctgtatcaagtaagattaaaaacttcacattgaagtcttttatgactttgacatttgcataatactcagcattttggcatcctttcatatcaacaaaataaattcccagctctttatagttatatcctagagtactaaaccagacttttagagcatttacatctgcaattccttcaactaaacagcaaactttccctgtcatcaattggctaatttgaactatttcacctatatcttctcttacgtctgaaatatccacagtttgtgtggcagaggttttaccttcgtctctcaaaagtaaaattacttgattcaaatctccttcgtccataaacaatgtagaatgagtagtgattagagcttggctcccatcattaattagttcttttattgagtaatataaatctctttgggcagataagtgtaaaaaagcttccggctcctctatcaaatataaatactttccagaattatcagaggtggtatgacctacctttccgtttatttttctattaatatcgctttgtgcacgaataattgccataaggacagaacgttgaagtccattacctctttgagataaaggagttttcactccatgttcatcctcaatgtccatttggaaactaaaactttttgaaacatcaagaggattagttacttgtgagagactaaaagaatcaccttgtgatattaacttactttctacaatcccaagaatttcttcatttatgcttttcattttagtttctaataaagacactgctttattgccatcctcatcttgttgtaagagcttccttattcctaccctaaaaaggctaccaaatgcagacgaatcagaggtcattttctgctcactttcaggatcttgagcagctggtacggtaatcaattcagggagaaactgcgcaacttcggaccacctatttgatatatcttcccatatattacttccatctagttcctcaattgcatcaataacttctttttccagttcagctatttcatctttgttagttggtttgttttttggaaattttatgcctaaactagtgccaatttttttcagattattgtatcctaacaaatcttcactttgaggcggaacaaatgcttttaaacattctatacttttaattagagttgagttttccatttgatatgtataccttataatagcttcttcacctattttaaattcttcagaaagatcattaacttgatcaaagtgcaaacaaatctctgatgttactccttcttctgaaccaaatggaaaatcatttaaagcaaatgttctctttgaaaaaaacgtttcaatagcttttataagcgtggactttccaacatcattttttcctaccacacacattaaattatcttcatatgatatgtatacatcgtctaaacttcgaaaatttttaataattatttttttgattctcacttttatcccccttcaaaaattggatgacttatgtcaggagttttttaccaataaagagctatatgaaatttatctgtctctttcccaaagaacatgcaattcgcgccttttcctgaataacctctaatttggattggaagaacttcatatgcctctgggtacatataaaatatatccttagttttactcccatttctatttagatatggaaagtacttcatcttatcttcgtcaatatctggatacatccctctccctttacctaattgtacaatctgacttagtctatctacagcattaaaccaccctataataaaagctctatttcctttgtaaccattagtaatttcattaaaaagccagtcaaaatcctttttaatttctttccaagtaattttgttagatattcctccaccactttgaaaatttcttagaaacttgacttctatgagaaactccttcgaatctacaataatatctcgagtatcaggaccttgcatattaaatcttgccatctgcctaaatgggtaccccgacctaacagttaaatctgcttcgctaaagcctgaatctgctattaattttaattcttctttactattaacatggtcaaacctctcattaaattcgtctattataaacagacagttagaaattaagtattgatcaattgtaggttgcttttgactcataagtacctccagtaatttatttaacttatttcattaactaatcaccaaaactaaatactgatgagtatcggccaaaaacacaccaataaaccccaactcacttaataccaattatttcaaatagatattaatcccacaagtacttcctcaaataaaataatccaagcccccatactataaaatatgtgggcttgctgtgtgtattatctcggcttgaaaaggggtatattctcgtaaagttgatataatacacaaaaatttgcaatttaagtactgatcacttttcaaattaaattatacataataaaatctatgtgttctttcagtgttaattaaaaaaaaaatgaattcctaatgttaacattaggaagtcgaaaccagtaaattttctatttaaattctaatgatacataaaacttccatgatctctcgctctcaacccaggactgaaaaggaagcattccttccaaaaaatgttgattctatgaacagtgagtacctacctgctttttaaattgtggttcgaccctgcacataaaactgttggaaggaatctagtacaacccattattacctttcactaacgagagataactacgtaactaaaaataacgttcattcaaaacgctcattcctctcactttcacgctcatattctgaatttcgttctaaacgaatctcctctctgagttttcctttttcaattcttgcccattcagctataacagaattgttatatttttcaagttcattcaacaagttcagacgattttgcataatctcagctcttgaacctgaccatgacattggtctgaaactggatttgaattctcctaatatttcaaggggatttgaagatgtgtttattaatttctctgccagtgaagtccatactagccttttatcctctttatttactttgaacggtgttattgttgcagcaactcttataaacctattcttcggatcaatttcacaccaattccaaactatatcttcatgtatttgtgaagttggattagaagaagtaaaaccgtctttaaataaccgattaatatatcgaacctttttctcctcttgtaataagaaaacattcaagaaaacttgtggttggacagttataattgcatttattatatgatctaaatctctataagcatggtgtttagacatgtaatcgaagattttttcacacaaaatagttgcattcttttttgcagaatcacctttataacatgtctctataattgtagaaattgcataatcaagattttgttttttactaatttcacttaattcaagtttaattgttagttcttgtcctattagctttatagtgttacttattttttcattttttgatgaaccatgaaatctcatgtgtaagatatctattgaaacaatagtaccctcattttttgaagatattaatcttaatatttcacataagctatcatcgtcaatggtttcgtgcattctacctgtacctaagcttgaatactcccatacaggtgcaacatcatattctaacgcttttttaagccgtatcacatctctattggttaattcaccagcaatttgaagtcttggaaaaacagcagcaaacaaatcatcagttacagcctcgtctaagaattgttgatagagagtatggttaataactgataaagcatttagataccctaaaaccatcctaaattttctctttggctcttctataaaatttaattgttgacgaatactattccaagtgtcttcaagattattactaccttctgctacgccatggccaaagtcatataggcctactccttcactttgtaaaaagcttggtaataatatgttgaagatatccggattgttaacaacttctattccaacaagtttagttttttcatgtatttcttttattgctcctcgagtatccaattcattattttcactataaattaaatcagcttgatatcggttactaagtgtatatagtttggctctatcgattaaagaggtcggtcgtaaatatttatccaaattaattaattttgcaagtgcctgttcatccatactctctccatcgaattttaaagttgctctgatttctaaccaaagttctatatataaactatccttggaaattttcttgataccctcctcaagttctttatacatgcctgcttttgaccacaatcctctaaactttttggccaagagagacttcgccttattggatgctaaaccatttttttctgcaagtaagacagtataatcaataaatagtttataccaatcttcaatatcagaattacttcttggttcaaatccaaaatctctactacgtgctccaaaatcaaagttttgcgaagaattaaaatgccaggattctaacgtagcctcaagcaggaatattcctagatctatttctttttcattgttagtaccaattaatttcttaataaccctaagcctttgttctgatttagcatgagtacctgataaatataaatagaataaggatttaagtaagcttcttattgaattataattttcatcgggtttctcagataatgcaaataaacataataattcaacagattgctcaaataactctttttcataagccaatgaccttaaaatcctagttaattgactataataaggattagaacgtctgaaaaaatccagattacctgaatttaaaatttgccaaaaagaatctaaggtgttttcaggacaaataggagcaatattattaaatatattaacacgaagatcatttaaatcagttaaactacctattaacccttgctcacttaaccatcttttagatatttgatttgcagtgggattaccatgaaggtaacttaaccttctagaaaatgatagtaaaagtctttctgaagcacgttcttcaaacacttccatgattatatctataggaatattctctaaagctctaattgctaatttatttgcgattgcgtgcggaagaactgctctccaaatactcctttgctgaataagttctcttcttagtaattcactaacattcgcataaacttcccgaatatttaatcctgaaagataacttagcaactctagctctaaatcctctccctttttggacacactattaaatgaatatacgagagaacaagcttctgctgttcttagtaaattattatttgtttcatttctctgttgaaacaatctattaaacaattcgttatctcttaactctgaaatactttcaccacttttaacagtgtttgctaatgcgattgctattcgagcatttcctccagaaatttcagcgatacttcttgcatctatttcgttaatataactgaaccgattaagaactactttttgaataatttcttgactagctggttctagcctaaatacatttgtttcttcaggttgatcttctttaacatcatattctacagtaattaaactaaccaaactccccgctgaggagcatatagatgtcaatcttctatgtagatcaggtgggcagttatcaattactaaaatcactggtacttgaattgaaattagttcttcagcaaaatgacgaggatcgggattaggactatcacttatatctgtataaattaccttgaaattgtccaattgattttttccaattctttgatcaaataaagcttgaacaaatctagttttacccactcctgaaagccctactaacctaactgaagcaccaggtttttgaagaatattccgaatttcattgattccatcaatttgtgaaaaaccagatgaatcagggtatcgatcgtgctttaagtttatattttcatcaaaaacatattcttccttaatacctttaggagccttcgcccaattatcgtatggtttccacccttgaattggtcttcctattttatttctaacccataataccaatgatggatgattacgcacccaattagcgactctttcacggtcgtagaagtctactttcagttttgaagcgttgacctctccaatcgcatcaatcatcgcttgttttctattcttgagagctgaatccgacgttgatccttgactactaacaattatgtatgctccatttaactcaattaattctttaataacttgtctaagtttcccctcagggcacatttcagttagaatagctccacgtggcatatcaggttttttcacctgaatgccggtgcttgaacggggaataaaattatcaatatgaatttcagaggaaagctcaactctcacgtctatacctccatcagaagcattttgatgacctccccatgtaacaccggcagtggatagattattagaacgcaattctgcttcacataaaaaaccaataagagttcttaaatcactatcgttcagttccataatatggttaccttcaatatgtagcataaataccgttcccctctcctaaataatttggagttcagaatattatcaaattagattaataccaattatttcaattaaacctcattttgacaatgctaaattctattatcaggagaattaaaatggcaatggagcttaagagtgaataaactacataaaatttcctggagattaattttttgatttttccaagtacctgtaaaatgtcgctctacttatacctgtagcatctaatatctcctgaatactatattccttactatcatacatccgaaaggccatatccaacttggattggtctttttttggtcgtcctccttttctccctctcgctcttgctgcatccagacccgactttgttcgttctgaaatgatgtcacgctcaaattgcgcaagaccactaaagatcgtaaagacgagttttcccatcgcggtcgtcgtatcgatgttctcattgatcgaaacgaagttgatgcccttctcctggaagtcattgattaggtccaccaggtgtttggtactccgaccgattcgatcaagcttataaacaacaaccgtatcctcttctcgcaaatatttcagcatttccgtaaaagccggacggtcctttttagttccggtgattttttctgagtagatatttttctcttggaccccgtatttctttaacgcatcgaattgcatatgcaagttttggtccttcgtgctgactcgcgcatatccaaataacataatggtctcccccttttcgatttgtggtacttctatattatcaaaaaggttgcctagggtatatattgaaactttaattatgagatggtttttgaaactaattttagaggagttttgattcgttggaggtgagtttaatatctgttatcaaaaacgaacgtttggtacaacttcatttatcagtattcaacgaatcactcatagtataattataaatgattcgattcttttttaatcagttttaaaaagctatatcctttttcttctagaagaagaagtacgctttatgtattactcctgttcaaacttaaagaagtatattgtaaatctcatccatagatgttactatacggttaaataaaactgacggagtaaataaaggagactgcagaatatgctatccatgatgaccttaaccgaacacagtcaattaaaagccctaagcgatccacttagagctaaaatgatgattcgtctcttagaaaaaccctataccgggcaacaattatcagaggtttttgatctttctcgttccaaaattcattatcacttaaaagaacttgagaaaaataagctcataaaggttgttcgaagagaagagaaaaacgggattgttcaaaaattttatcggtctgtagcacgtggttttacaccatctgcggaattactcccacacatgactgatatcagtgaatcttcaaggcaactactattccaaatggctgaaaaaaccaaaagtgtaattttatctgctcctgaacatgcttttaatcaggatcacgccaccgaggtcccgtctgaatggaattatgtaggttcaatgtggcaggttagtgctacagaggagcagtttaaaacctggataaagaaatattttgcccttatggaagaacttcgctcgttaaacgaacagaaagagaaaacctcgaaacaaaaattgtattttgtttcgacgatggcatttgaaattgatgatgaaatttttaaagatgagaaggagtaagcactcctttttattttccattccagtcaaattaatttgactgagtaattttatttaactaagggaggaaactattcatgattgaaattcttaaggacaaaaatttcttgtttttatttctaggtcgaatcgtaacgaatattggggacagcctttattatgtcgctacaatgtggcttgtttacgaattaagtcaaagttctttttatgttggtttagcaggctttctagttttagcgccaaaagcgctgcagtttttaacaggtccattcgtagataaatgggatattaaaaaaatactagtgactacacaactccttcaatgccttcttttgatactaattccagtagcttatgcacttcattttctaacagtacccttcttattagtcctaatgccttgtattgccattatcgaggaatttgcttatcctactcaaacaaaagcccttccattaatactaaagaaaacggatttaattaaaggaaactctctattttcgttcgcctatcaaggcgttgacttagtttttaatgctctggcggggattcttgttgcactcattggagcgatcagtattttcattgtagattccatcacctttggtattgccgctatcctcttcagtttccttaagattcctaaaaagagggaagcacagttaacagctgatgttagagaggaagctgcttttgtctcctataaaagggatttgtccgagggcttctctattgtctttggatccttactttgggtatttttacttggttccgttgtggcgaactttgcaattggcataacgatggctatattaccctctttcgctaacaatattggtggtgtagaaatctatggttttttattaactgcagtttcggctggttcgttaatcggtgctctcttaggatcggtattaggaaagtttcgtgttggcgttatctccattgtctgtttcgcattaggtgctggatcatggacattatctgctctcatagggagtccaatcatttctaccattctatttggacttgcttggatacctatcggtgcggtcaacgtattatttgcggggattgatcaggcggtcataccaaatcaagttttaggtagagtcaactctgtcatgtatagcataagtgtggtagctatgccagttggttctttgttaggtggatatttagctacgacaatgagtagttcaacaatatttgcttttactggaatcggtgtgttttttatttcattggtatggcttgttcatccagatttaagaacgttacctaaagcacataacatagatgcaagcacctttaagatcaatacgcaatcttttgatcatgatacaggggaagctcccttcagataggatgtgaaacaggagatctactacttttagaaatcaacaataaaacgagccaaactctctgtgcataagaaagagaatttggctcgtttcgtttctcttttaaagctccgagattatgggataacattataggtaataatgacaaatccattatagcagtatatattctgcattatataataaattattatttcatatgtatcagttctaccagttaaagttccgagattgcagaattaaccagaagacataactgtaccagacggaacggcttcaccattttgaaaagcaatcagagtatcatattcttatctatagaagttgatgatgtaaatctttatttgaataatcctcagttttattctgggtgtaaaaaacctctaatgcatcgttctcatcaccgagaaagttttggtgtttattgaagagactgaagatttatttagcacgcacttgtatttttaacccatctaaatcattacatgcggacttctttgggctttccttctaataatgatcaaaaggaagaagtaagtatacactggaaccaatacgaaataaattgaatatggatcaaagccagagtcaaaggctaaacttaatccagctaatgtataaataacaaattgaatgatacttcgcaaagttgtagtgtattttgatataggttttaacttcactattccatcagctattaaggttgttggaattccaaaaataatgtagaagtaggcgaaaaaaaatgggattacaattaatgatggtactacatcagtgtaatttctttctatccctaatgcccagttaaatatcgtttcacaaaagaatgatatatatagcgatagaggagatgatattgcaattgccaatagaattattaatatgtacttcattgatttcactacaactttttttttcacctttataacatacccctttccctaaaagacttcaaaaaaaatcgtcctctttcagtaaagctccgagattgcttaagactcgtagtatctattgtatgcactaatagtaactccactgaaattgaaaaagctgctctcaattctatttttctttctttcggaaatatttccatttgtatgcggtacttaatgccaataaagcgataattagaaaggacttaagataagggtttgatactgtgaaatacacgaaaaaagtagatattactataaaaaagtaaacaagtaataaagataaaggtaaaggcttatctgacttcaaagtatcacctctttaaatgaattatttatagtctctttctaatacagtaacaaaggagtaagatgacttaattctcctaccaacattccagaatcatctcctaaacctacattgagagcttactttttattaagtaaacgctccgagtttatggaataccgttatgcttctaatatttggcgctgatgaacttttaaattcgattatagaaaatacactaaggcacaaccgaacccaatgacgaagtaagttattaatcctctgaccctatgtttcttttccacacctgttctcttctctaaccctcgtatgtagtcataaataaccataagacaaactagaatggcaataccaaaaaaatcatcaccttcaactattaacaccatagcaaaaacagtagatatagcaaaggcaatattggtaactattgttttaatggtaaccctcctcccaatcccacatagtccattttcttaatccgatctaagcacctacactttattaagtaaacgctccgatttaattgaacatctaaaatattgattcctatattgcctactatatgtaattaaaatagtagagtgaaaataagttccatagaaagtgaacgagtatacctggaacaatagatttagttaatttataaacaatcccaaaaacgattcctaatatgaccccgaataacggatactctgagtgcatcattccgaatattatagaggaaaccaatagtgcgaagatgaaatagaaacgtcttttcatccaaatagataatggtactctgaacattaactcttcaaaaactggagctattataagcttactaacaagaagtgatactagttcgaaggtgtctaaaaaaagtgtttgtgaataattactagtaagtaaattaaaggttgatgataaactacgcttgaagatgactagattcgcaaaaaatattgtcagaaatgctgttaaaatcagaaggtacgttgggaatttcttcaaaacgctaaaatcaaatgatttcttataaagctgccttgtctttgggaaaacatagattaaacctaaaagagcaccataaataataagtgcccagtataatgaataagttggtgtttgcacgattcctccttattgtcttttatttataacaggattactgcattcaaaaagagcagcgatcctgttgttatactgtatttgctccgagattatggaagacttgatttctacatattttcaaataaaagtatattatatgtactactttaaaagaagccatatcactactaagatgatagctattatcccccatgacaaaaattgtttatttctcaatctttcacctaccttcaaagtacgtgatcatctaaggtgatcgttgttttctttttttatttcgtccaattaaaatagcaatgaataggcatcctagccctactatattcataataatattacctaagttgcctaagtcattaattttcaacccgactaaaaaaccaccaattaaaataagtggaataactataaaaaatctcaaaattattcccccgaacctattattatgtttactacagaattgctccgattttattgaataaccctacactaattaaattagaacattagatttcgtacaaataaaacaccatatagtagagctcctccaataaaaactaacagtccgaccattacaaaaccatagatatatcctttccccattgcaaataagtctgaaataatattcttaaccgttttgagtagtatttgcatagtatcccctctaacataacagttgttactctagctatcttaattattaatacgaaacattctgttgaatggtttcatacatcttcaacggaaaacttccctaaacctacagttcattttttattaagcaaaagctccgagattgtttagtaagatatcatatctctaattgcatttactacttgtcctggattatcaatgtggatagcgtgtccagcttctttaacaatcaggtggctgcttatagttgaaagatatgacagttgtttttgaaactccatccattgagccattgattcctttgtatgatgtggttgtgttccccccgtcattactgtaagagggatattttgaagattagtccctcggacttgttctaaactttcttcaaattcatttagcgacgattctacagtaaactgtcctaaatattggtcctgaacttcttctgtaaacaaagggaccatcttattgttttggtcttcgtgtaccgaatctaacagaataacacccttcacttcttctggatattgactagcatacaaacggacatttacccctccaaaagagtgacctactaatatgtaaggaggattgacctctgctttttgaagtaaggatcttaggttatcaacaatttgcaaactatgtttaggtatattactcttctcactttttccaacaccatcacgatcataaaagaacatccttgcaaaactcgaaacctgctctctaatcggtttccaattctcaagtgcccaaccataaccagaatcaaacactactgttggcactgaatcacaatcctcaacatactcataatagagttctgtgcctttatcatccaaggtacaaaaatcacccatagtcttataccctccaagctacttctttaaattcagtgtaactatactatcgctccgatttaatggaacaagaaaagctaaaaacttcattcgtcctcttctacttcatcagaactgggtaggaagtcttttagaatagtgacaattgaaggtatgattattgaaatgactcaataatattctatatttcatctatttatctaaacctcttcatccactttcttcttatccacaaatttatcatacaatttcgcagacctgttttccttcagacgactttgatagaaatcgatctttgtattcaatagatctagatttttctggaagattttaatttgtttctccacattttctctatgtgcggtcaggatttcgatcatttcaacagtaccttcttcacctgattcccatagcttcgtatatttcttcaggtcttcgagagacattcccgtttctttcatgtgtaagatgaattccgtccatagtttattgtcttctgagtaggatcgcatattgtttttgtctcgatcaggtacgaccaagccctctttttcgtaatatcttaacgtatgttcactgataccaacgagttttgaaagttctcctatacgatacatcatggtctacacatccttggttagtgttttttagttattatcctatcattgcaaagccttgtttctatttacatatattttacaacctagagttaactttaagtcaaggatattcctaaatagtcaatctacatttgcacctcttgccttagagtctacacgaaggtctatactcttcagtgtatcgaataaaaaatggatggagggaaacaaaattgcctaaaaaacagacagccggacggaatctactaggagaattcgcgccaaaatttgctgaactaaacgatgagatcttatttggagaaatttggtcaagagaggaagaactatctcctcgcgatagaagtttggtaacagtatcttcattaatcgctggaggaaactatgagcaattaactccgcatcttcacggattaacaaaggattaagttgcagaaatgattacgcatttttcgttttatacgggctggccaaaagcgtggtccgcatctaacatcgctaaagaaatctataaagagtaaaggaaagtagggttatcagatggcaaacgaagagttacagaacagcacgatttttccattaggtgaaaaagttgaatcaaccaattttatcggtgatacctatttgcaaatggtattcacggatgagaaaccacttaatacagcaattggaaatgtaacctttgccccgggagcccgcaatagttggcactcccatacagtcggtcaagtcctgttagtgatgggtggcgaaggttggtatcaagaagaaggaaaaccggcaaagttactcgaaaagggagacgtagtgaatatccccccgaatgtgaaacactggcatggtgcaactaaagacagttggtttgtccacttggccatgaccccaggtgaaaccaagtggctagaacctgtcaacgatgaatggtatgacaatttgtaaagtgaaataaggaaattgaaaaaagccaatcttataaagcagattggcttttttctcgtctaaaaatgtaaagtggccttactctaatcatcctgtgaggcatgttttcattttcctatttgccttagagtcaactataagggttagaatgataataatgaatcttattattaaaataaggagaatgcatatggataccaacgaatttttagcccatttgaataaaggtgaacccgttgaaggaggatctgaggtacatcaagtcatgcacagggtttcacaggaagcattgaaaataacatccgagctaaacagggagtatcatccccctgcacaagtacgtgaattgttttcaaagttgattggaaaaccagtcgacagcagcttcgcgatcttccctcccttttctaccgattgtggcaagaacatcgaagtagggaagaatgttttcatcaattcgggctgccgcttccaagaccaaggaggcatttcgattggagatggggtcttagtaggacataacgttgtgttggctacgcttaatcatgacgtcgatcctaagaaacgcaatacgttgcatcccgcccccataaaaatcggcaacaatgtctggatcggcgcaaatgctacagtagtcccgggggtaaccattggagaaggtgcgattgtcgctgcaggttccgttgtaacaaaagacgtccctcccaacgtaattgtcggaggagtccctgcaaaggaattgaaaaaaatcgatacggaacagaaataatctttcaaaagacaggtgtttaaagcacctgtcttttttagcggtaaagaaaaaagaggccaacggcctcttttcactgttcagcgatcaattctattttttagtacccgactagtccaacttcccaccgaatacgggcatgacacttgcctcgccgtaatctttgatcgtttcgaaattcttcaatatatccatatcctcatcagaaatctcgaaattgatatccgcattattcttcatatgttctgggtttgccgttttaggcaaaggcaggagcccaagttgtaggacatagcgaatgctgagttgagggacggaaacattgtatttttctgcgagttctacaactttatcgtttttcaacaactctccgtgggcaatcggtgaataagcttccacgagaatgtcttgttcttccgtatatttaatcaattcaaacggtgtattgcttatatgagccaagatctgattgaccatcggtttgacggtacaagcacttagaatgttatcaaggtcttctttttggaaattcgataaaccgatggcacggagcttcccttcttgataagcttcctcaagagccgtccacgcttcaaggtttcctttgaagtaacggtcttcaccgccgaattccttccatggttgtggactgtggatgatcatcatatcgatatagtccagtcccatcgtctccaaagattgatcgatcgctgaaacggcttcttcatacgactttatttctgcagcaagttttgtagttataaacaaatcctctctgttcaccccacaagctctaatcccttctccaacaccactttcattagcataagcctgggctgtatcaatatggcgatatccaattttcacagcacctatcactgcctgtgtgacaacgtcattgtcaatcatccatgttccaagacctaatttaggaatgtcaattcctttcgatagcgtatacgtttccttcaatatcatagaaaacatctccttttttagttagtggcgaccggcacataatctctgtgccaaaaagcaatcaatgacattttataaatgtgtgatcgatttacatgcagtatattccctcgagttaactctaggtcaagaataaatccctgaatagacacttaattaccatatttatagacacatacttcttaaatacatttaataaaaagattatctcgaaactgagtcttccagataactgcccgattgttgaacattaatcatttcaaatatttgtattttccacaaggattttcttctctataaaaagtttaaatttgtttatcaacaatacacaccgaactataaagctagtcatttttgtcaataatgatgaagacaaattgcttttaaaattgaggtgtacattattttgaaaggctcgatcaaaaaaagagggaaaacctattctgttcgctatgatgccgggattaatcttgaaacagggaaaagaattcaaaaatccaaaggggggtttcaaaaccgaaaggatgcagagcgatttctgaccgagaaactttttgagctaaacagtgacaactttccccagcctaaaaaggaatatttcaagccatttttactggactggtttgaaaccaagtataagaagaatgtatcgatccgtacctgggaaggacgcgaatacatgcttcataagcatttgattcccaaatttgcacactacaaacttcaagatatcacgacatacgaattggatgccttctatgcaaataaagtggaatctggcctctctcctaaaacagtgaaggacttgcataacttaatgaatttatgcctttctcaggccgttaaatggggttatttaaaatataatcctgcaagagatgcttcgccgcctcggttggtcgagaaggaaattcaaacttgggattatgacacagcaagattgtttttacatgtggcgaaaaaagaaggaaaagatgcgttttataccgtggctgtattcacaggaatgcgaagaggtgaattattgggattgaaatgggcagatgtgaacttcaaacaaaagaaattatatattcaacgttctctttcctacactaaatcagaaggttatctattgaagaacactaaaacatctaaatctaaacggcaaatctccatttcaacacaaattgtcgatgcactgatggaacatcgaaaaaaacaaaacgaactaaaagaaatgttgcgggaaggatatgaagaccttgacctggtcttccctaatcaatttggtgggtttaaaaacccagataatcttcgaagagaattcaatggtttagtccaaaaagcgaaagtacaccgtattactattcacggtttacgccacacacatgcgacctggttgttgaaaaatggcataaaccccaaagtggtgtccgaacgtttagggcataatgacgtaagtattacgttgaagacttactcccacgtctcatctgatctccaagaagaagcagccgataaactggaggagtcgtataacgagtggacatctaagtaaatccgtatgcccaattcgtgaacattcgtgaacaactttttcattaacccaaaacagcgaaaaatgtacaaaagaaaaaacccttgttgggcaagggtttccatcgatggagcatagcgggctcgaaccgctgacctctacactgccagtgtagcgctctcccagctgagctaatgccccgtataatgacagcgatttcctgtcgacaagatttattttatcatagcttttattgtgagggcaacttattttttgaaatatgcgaaagtgcgctaatctcattttgaaatcgcatcccctgaatcaaaaacccctcaacaaactaccaatgtacacattcaactcttttataacttctcttcccctacttcctctgcttcttctttcagttccaacctcctcttttccaactccagtttcttttcttctacctctaattttttcttcttcaaatcaaaattcattacaaaatataaaaagaaaaacgtcattccaacgattacggatataaataaaaataggttcaaactcatctcctcctattagcttcgttctttaaatatacttatgtgtatccacatcaagttcatttttctttggctagtttgcttccattagttgattaaaccgccttacctcaatctattgagtgatgctatactaaaagttaaatacaatcatgataagggagatgaatacgatgaaagatgtccttatccagtatatgaaacggttttccgatctcagtgaatccgaattaagaaaactgacagtcgatattcctgtgggtacgtttaagaaaggaacgatccttttacatcaaggtgaagttcccgataaatgctattttgttttagaaggttgtttgcggctttacggtgtcgatagaaaaggaaatgagaatacgttcaatttctttacggaagaacagagtgtgacgatctttaatcagcatactcctgacaaagtttctccatactctcttagctgtttggaagactgtacgcttattgtaggtgatttatctactgaacaggaagcttacgacatgcatccggtgttagaagaactaactcgcaaaatgatcgaagaagatctaggggcgatgagggatgatttctccaccttcatttcctcgacgccagaagagcgttatcaaaacttgatggaaaaaagaccagatttaattaatcgggttccccagtaccaaatagcaagctacttgggaatcaagccagaatctctaagccggattaagaaacgatccgtagctaacctcataattgttgattagtccaccgttacttttcttccttttactaataaccagatcccaaaacctaattcaccgatgaccataggaaccataaggattaattctagtagcccaataacgtcaatttgggggataaaatggtacatgaaatgaataagagagtagctgaagcctgctagaacgacaagaaagctgatcacttttggtatctttgttgtattcattgctatcaggccgactgcgatcagatgaagcccaaaaatgattaatccaaatgaccagattgcttcaaaagctgtgatggaatccatcgcctgctgtgccacagtatccgatggcgtacctaactctgaattttgaacaacagaattggttatcacaagatgtgaaacggcaatggctagaatggctgtgtaaaggaaacgaagcccaccggctaataatgcgtaaccaggatagaacggctttaagaacagataaaaaccccatgatacaattaaatccagaatgataatgatgaaccatccaagtacctcaagacgaaacaagacttgagatgcttggatgatttttaatgtcgttgctgcatctccgtcaacgactaatgaactgtgaacatacccctgagcaaaagcggctaccaccgtcatgataagtaaggcaacaccagaaacgactgctgctttctgctgcatgttttgattcgttgttctccctaaccccatataagagcctcctcaactttgttgtcatcactattgtattttgtctgaggaagactttcattgacttaaatcaaggaaattgcgcttttagaaattcaagcaagcccattctccttcacaatgagctaacctgagtaagccatcttaatttcaatgaagatcacgactcactttttttattacatagctctatcctaccaagccaatggtgctataaaagggacaatgaagtcatttgtgaagatttgtttaggtcaaaatccttttgaatcaatttgtctgctttgaaataattggatggcgggtttgttggctctggatcttaaggaggcgacaggaaaagaactaaagtgaggttggtgatggatacaaatgttgaaaaagattagtcctgcaggatttttatcagtagccatgctgatagggtgctccgctgaaacggagaagaaaatggataaagcagaagaagtgacatggtcatatgaaggagaaacagggccatccaattggcataagttgcaccctgagtatgcggcgtgcggtgaaggagaaaagcagtctccaataaacattgacgtttcaactgttgaactgaacgatgatttagaagctcttgatatcacgtaccaatccactccattttcattagaaaacaacggacacactgttcaactgacggatccaactggggaaaacagcattgaattacaaggagaagaatatacgttacaacaactccacttccatattccaagtgaaaatacattgaacggtaaccatttcgaaatggaaggccaccttgttcataagaatgaagcgggtgaactggctgttctcgccttccttattgaagaaggtaaaaataatccagtcttagctgaagccttttcaaatctcccttcagaacacaataaagaagagttcacaagtaaaataaagctggattcattattgccggaagacatgtctacattccagtacagcggttcgttaacgactccgccttgttctgaaggtgttagctgggttgttctcgaagaaccaatcgagctctcagaacagcaaatagaggcattttccgaaagttttccgcatgggaatgcaagagaaccccaaccgataaataagagagaagtttacgcggaatagtctactctccatcaaagaaaccctcttgcggatgcaagagggtttcttcgtgttcaacaataaacgtcttaacaacaaaagaaacgccattcatcagcgtttctcctcttttatcttctctcccgactcgttaaccccatcgccacaaaccgtacgatcaatgacgccacaatactatacacaatcagtgcgaacaccgcagagaattcaacgacatactgtccggcgaattctgttgttggaaagatgtttcggaatggatataacagcggtgctgaaaagtcatagatccactgcacgaatggagctgttggatttgcgctgaatagtttcagcaatatgcgaattccgagaatcgcttcgatgatgccgaagatgaggcgtacgagcgatacgaggaatgatgatagtgctctcatatttcttcaccctttttgtcctgtcataacctttctttaccctgtcgcgatggatcacacacgtgtcgtttttttccagtgattgatgggcataatggaagtggagaaaggagcgttttgttttgagattacgtgacttagtttattatatatcgcggtatcctcctgtattacaactcggtgtgctaatcgtattcatcctgaccacgatgggctttattatgcatctggtagagccggagatgtttccgaccgtattcgatggggtgtggtttgcgattgtaacagcttctacgattgggtacggtgatacatcacctgagacggtgagaggaaaagcatttgcgatggtgtttattatgtttggcgctggatttatgaccttttatatggcgaagcttgcctcttcctttgtgatgacgcagggagcgcttggacgtggagagcgcagctacgatcgagccaatcacgttgtcgtcgttgggtggaattcacgcagcagacatacgataaaggcgcttttatcgaatcagcctgagcgatctattgtgcttattgatcattcgcttacggaaaatccactacaaaaagaaggggttcattttattcgaggtaatcccggtgaggatagtacactgcgaaaggcaaaggtaagcgatgcacacaccgtcctcattacagcggatcaatataaaagtgaaatggaagtggatatgcagacgattcttacccttttaacagtaaaaggaatcaatccttctgtgtatacgattgtagagattctatcaccagagcaaattgtgaatgccgagcgtgcgggggcggatgaaattattgaaagtgctcatctgcttagtaccgttatgaccaacagcgtcttttcacacgggatttcaacaacattgcttgaaatgctgactcatttaaagccgaatcagctagattttatgcgtgcagaggctttcaatgagagttccttttgtgatgtcgctcagcaattaaatgaaaaggatattctgatgattggtgtaaaaagagggagtgagcttgtcatgaacccctccccttcgtttcttattgagtctgatgatctcttactcgtcattcacacataagatgagagcgcggcgtcgagttctttcacgtaacgctctccgtatttcagccacttctcatcaatttcagcatctttatcagtaggttcctggaactgattaaacgatgctgagatgttgccaatattcccttcaggatccactcctgcctggtacatatgcgagagcatgaacggctgtccgatttctacaattgcgccatccgcatcaagctctttttttacagctttgattggtactcttagaaaaagatacccgtcttcatcgtcgattttatagtcaaaatagccgtgatcatactcccagccgcctccgtagctatagcctagttgacgaagtttgtcctccataatgctaagttcaattgttttcccttcgagcgcggaattcattggaatcatctgttgcttcctccctgtttacgtagtctacgcttatcgtgtccaaacaggaggatttcatgataaaaaagcgcaagcgggtaggcgctgaagctagactaaaaaaagagagcgccgcggcgctctctttagttcgttctattcgtttgtcttaaggcgatcctcaagctcagctttttctttttcgaatcctggtttaccaagaagcgcgaacatgttcgtcttataagcttctactcctggctgatcaaatggattcacgccaagtagataaccggaaacggcacatgctttttcaaagaaataagcaaggtaaccaaagtggtatggcgtcatttcagggatgttcacgatcaagttcggaacgtcaccatctgtatgagcaagcattgtaccttcaaatgctttctggttaacaaagtccattgtttccccagcaaggtagttcagcttgtcgagatttttgtcgtcttcttcgattgtgatctcatgacgagctgtctcaacgttcaatactgtttcaaacaggctacgtcggccgtcttgaacgtattgtcccatggagtgaagatcagttgagaagtcgactgatgcaggataaagacctttgttgtcttttccttcactttcgccaaagagctgcttccaccactcagagaaatagtgtagtgatggctcatagttcactagaagctcgatgttcttgcctttgttgtaaagagcattacgaaccgctgcatactgataagcttcgtttgaagcgatatcagatgtgttcaagtcatcttgcgcgtcctgagcacctttcatcatttcttcgatcgagattccgcttgctgcgattggaagaagtccaacagccgtaagaacagaataacgtccaccaacatcatcaggaatcacgaagctttcgtatccttcttcgtcagcaagtgttttaagtgcaccttttgacttgtctgttgttgcatagatgcgacgacgagcttcttctacgccgtatttctcttcaaggaacttacggaaaatacggaacgcgatcgcaggttctgttgttgtaccagattttgaaataacgttaacggaaacgtcttttccttcaagtacgctgaagagatccttcacgtaagttgagctaatgttgtttcctacgaagaaaacttgtggtgttttgcgctcttcttttgttagcacgttatagaaagaatggttcagcatttcaatcgctgcacgagcacctaaataagaaccaccgattccaacaacaagaagcacttcagaatctgatttaattttctcagctgatttctggatgcgtgagaattcttctttatcataatcatgcggaagcgttagccagccaagaaaatcgctgccagcccctgttccattatgtagcgcttcgtgtgcagccttcactgcatccgccatgtatgttacttcatgttcgccaacaaacgacaatgcttttgaataatcaaaacttactttcgaagtcatagttagcctccaattatcattttttgttcagtacccacattttactttagcccaagacctattcgaaatcaagaacgccgatctatgtaagcgattacttaaagagatttctttttaaagctacttaagctctttagaacttgaactttatttctcttggagcaataatgtgtgaggctcgatttttagatcattcgattgaaaccagagtttcaatcgcctttaagcggagcttaaaggtcgcaatgtgtgagggaggcggtggacaaattcatttgtactaaccgcctccctcacacattgcgaaaatgagctaaaaatcatccccagttaaacactataaaaaaagaaccgctccaaaacggaacggttcttatcatttcatcttatagagaagctttcaaaatcgccatcacgtcgtcgcgctcaagagacttgaaattaccgaacgcgccattagccatcgcacggtcagcaataagatcaagctggctatcgtcaatgtcgtaatcagcaagacggtttggtgcaccaaggctgctccagaacgcgcttagcttgtcgatcccttcaagagcgatatcgcggtcagatttaccttcttcgcttaccccaagaactttgacagcaagacgcttgaatttatcaacgttcacgtcaaggttgtgtttcatcaagttcgggaagagaatcgccaaaccaccagcgtgtggaatatcatacacagctgataccgcgtgctcaatgttgtgagaagcccagtcaccgcgaacacccatctgtagtgattggtttagtgctactgtaccactcaacatgattgttgcacggtggtcgtagttctgcatatcttcaatcaattttggagctgtgttcatcactgtttcaagtacagagaactgcatgttttcttgaagctctgtatttgattcagggtgaaggtattgttcaagtacgtgagacatcatatccaccatgccgtaaactgtatggttttttggcactgtgtacgtgttctcaggatctagaatagagaatttcgggtgtacaagtggatgtccccaaccgtatttctcttgcgtttcccagttagtgataacagaacctggattcatttctgaaccagttgctgctaacgttagaactgtaccgaatggaagagctgcttcagggaatgctttcttcgttacgaagtcccaaacgtctccatcatatttagctccagcagaaatagctttcgtgcagtcaattacactaccgccacctactgctaggatgaaatcaatatcgttttctttacaaatgtcgacacctttatgaacagtagttaggcgtgggtttggttcaacaccgctaagttcaaatacttcagcaccgatttcgtttaatgtgttcattacgctatcgtaaacaccgtttttcttgatgcttcctccgccataaacaacgaggactctttttccgtattgtggaacttccgttttgagcgcttcaagctgccctttaccgaagatcaactttgttggattttggaatgtaaaattattcattgttatgtcctcctttatttcaaatcacgtttatcccagccttaaggcgcattaaacactcacctttagcctttagtaaaaccagaggttaaggtgagaatgaactgcccctaaaggtccgattctttcaactaaccgtcagacgacggaagttccattttattatgcctcatcaaattttaaaaataaagcaatctgcttataggaagtaagtggagattcaatgtataatattgcggaatttttctcatcttataaatgaatcattatgtattctaataaaaggagggtgtcttttgagcacactacaacgagttgcacttgggttagttatcattggagcgatcaattggggactcattggatttttccaatttgaccttgtagcagcgattttcggaggacaaaatgctgcactagcacgcatcgtctatggtcttgttgggctgagtggactatactgcctaacgctactattcaaacctactgaagagctttcacatgatccagatcgtgcgacaacataaatcaaaaaaagaaggcagccgattggctgccttctttcgtcattacttacttcttaaggcgcttgttcaattgagcttgacggtcgttagattctttcaaccagtctttaagcttatcttcaagcgtgttgaagccttgtggagaagaagtttgttgtggtttcttgtttccgccgctcggtgctgccgggcgaggctttctttccggacgctcaggtttaggctgagtagcacggattgaaagagagattttaccggaaccttcttcaatgttaaggattttaaccttaacttcgtctcctacagtaagttgatcttcgatattttttacgtagccgtgagagatttcagaaatgtgaactagaccttgcttttggtcgtcaattgcaacgaaagcaccaaaaggcttaataccagttaccttcccttctacgatatcaccgacgttatattgctctgccatgaaaacactcctaacaaattttttcaacttaactagtataacatagatgtcgaatctagacaaaacatcatactggtcttttctatgaatcatacccttccagtgaaggaatagcaagacatgtgaatattataaagcatttgttttcaaattaaaataatcagatacctaagttaacatgtcaatgatagcaacgattgtagcaggtggtaaataaatacatgaatatttgatattgactgaattctttccgctcgctatagtgataaaatgccattcaattggacttactatattgtatgaggtgacaagatgaaatcaaatgatcaatggtcgtcaagattcgggtttattctggcttcagctgggtcagcaatcgggcttggtgcactgtggaaatttccatatatggcaggtacaaacggtggagcagcgtttttccttgtgtttcttcttttcactgttttagtcggagcgccaatgttacttgcggaatttgttgttggtcgacattcccagcaaaatgccgtttcatcttatcagtcgatttctggtagtgaaaaatggaaatggctcgggtacctcggcgtaacggcatccttcattatcttatccttctatagtgttattggtggatgggtgattacgtacttaacgagaagcttctcagggtctcttaccggacttccaaatagccgctatgaagagctgttcggagaaattatcggaagtccttcaacagcactcctgacgcaagcgctattcctagcgataactgtagcgatcgtgcaatttggggttcaaaaaggaatcgaaacagcaagccgttatatgatgccagccctttttattctttttatagtgcttgttgttcgttctctctctcttgacggtgcaatggaaggcgtttcattcttcctgaaacctgatttctccatgctatcagctgaaggtgttctagatgctcttggccaatcgttcttcgcgctcagtgtcggcatatccttaatggtaacgtacagctcttaccttgataaaaaagctgacctcaccggctccgttgtttcagtcgttagtctaaacgtattaatctcatttcttgctggacttgcaatcttccctgctgtcttcgcatttggctttgaaccaacagaaggacctggacttattttcaccgttcttcctgcagtgtttaaccaaatggcgtttggcggattgttttttaccgtctttctagcacttttgctctttgcaacgttaacttctgctttttctttaatggagattatcgtttctacggtaacgcacggtgaaggaaagcgtaaaaaagtatcctggatcgcaggattgtgcgtattcttacttggaattccatccgctttgtcattcggtgtcctcggagacgtttccgtttttggcagaagtatctttgatacgatggactttctggcaagtaacttattgatgccgattggcgccctcctgatttctgtctttgtttcacggaaaatgaagcgagagatcctgtcggatgaagtgatgatgtcttcaaagatagggcgcgtgatcttccccatctggtacggactcattcgttattttgtcccagcagccattacgattgtacttatcacatcgttactttcttattaatttaaaaaaagaggtatattcatcataagatatgggaataacagaagtagtaagctatctatattcccccttttgaaagacgaggccaacgcctcgtctctttttttgtcttcaaacaaacttctctcttacgtcacctaggataaacttcacctaagtaagccaaactttaaatagcgaatgaaggagaggagctgaagagtgtgttcaaaaccagaaaagaaaaagtacagctcgacaaagtaacattgtcttatgagtattacaaacacccaaatcaaaaagctcaaacgctggtcttcatccatgggtttctttcctcttcttatagtttccgcaaactttttcctcttcttcatgatcattacagcttgttgagttttgatttgccgggatttggtgagagtgaaaagaactgtgacatccattactccctccatgaatatgccgccctcaccaatcgccttttagaaaaaatgcaaatttctaaagttgtcttgatcggtcattcgatgggcggtcaaatcgcccttcgcacttgtattcaacacccggaacgcgttgagaagctgattcttttatgtagctcaagctatattaaatcatcatcgctaggactgagagtttgttcctatcttccttttttcccgtactgcctcagcttatcaatgaacgccgttaatttaagaaagaactttgaacacctcgtctatgatcgaaagcttcttactcaacaagtgattgacggctacacagccagttttaacgaaaaaggctttttccttgcgctatgtcgcctaattcgagatcgagaagaagatttagcttcaacaacgctaaacaagatcaatttccctattttgttaatttggggaagcgatgaccgtcttgttcctcttcgcgtcggagaacgcatgaaaaaagacctgccggacgcagatctccttgttttctctcataccggccatttaataccggaagaaagaccgcttgaaacgtcaaaagcaattcgacatttccttcatgaaaaataacggcgcctcgaagcgccgttatttatttggaaccaattgtggttcttcttttaataagatgcttaagaacccagaagttacgagaaaagcagctggtataatataaaaaatcgacaaaaatatgattccgcctgctgctgaaacaagcagactgaagcctcctataatcggtcttgttttcacaaaataacagcctaatacggcaaatgcgggaaaaataaatgcagttagaaatgaaatatctttgacttgaattagaggtatcacattaaaccttgagagcactgctgcgataatgccaagaacacatcctgcaacggccagtttaaacatgcgtttttgtttcattttattccctctctcattttaaaccttactcttcttaatctattcgagttaaaagcgcttcatccttctcttattctatactttccactaatcgtttccattttaacatgaaatttcagtcttaaggcggagtaaacttcaatcggaagcaactcccactgtccctcatcttgatatacactagagttaacaggctgccattatcgtaacagtgtttcatgatggaaactagtatcaaatgagaccagtctatctcaacattccctaaaaaggaaagtatttctttaagattatcgtagtataaagacttattcaggaatatggcaggaaatatacgaacaactgtcaaatatgttcactcataggagacagaatgaattggggagattacatgaaacgtattcaaacagggcgattcctcgcagcaactttctttgttggtctaggaatttttcttcttcttataaatctcggcattatttccatgaaaatgacggaagcgattgtcttcttttatccttttttgttgcttctgctcggagggaaatatcttttggaggcattaatgccctcaatgaaacgaaaaaaatggacaacagggaccttcctattcattattggacttctgctcgttcttgatcgttttaacgtgattcagtttagtctctggaacatctggaaactgtggccactcatttttgttttgattggttttaaaatactcggacagtttcggaaaagccagggatttagtctagtcagggaccattcttacaacaagccaaattgggaagttcgctcgatgaatgactggagctttgtttgcgactatgattttgatttttcgacgacgcttattccagaagaagaagtcgtcattaatctatccggttttgttggtgacattaatgtgattcttccggaagatcttccatttcgaattgatgggagtgcccacgttttatccgcaacaatcgataaacataatcaggacaacgtcggtaagggacatgcgatcacttatgaaacagatgattttgacgatgcgcttcagcgaatcgtattttatcttgatttttccgtgcttgatttacgagttgatcggatataaaggaaggtgcaatcaatgtgaacaaatccacgttaagatggaaattacttaaatcacttctttttacagctctttttactggaattctttatttcctttttattcaaatcgggttatttcttcagcccggattcgtatcgctttggtttagtttactttcaccctttttcgtcatgatgcttgtgattttcttggggagttacttcagctacaaagataccctctcgattcgaaatcgactcgaagatatttctactcaaatcattacgttatcgagaggaaaatttactgaaaagataaaacttacggaagaggatgaaattggacggattagcttcgagttaaatgaactcgctgacaaactccagaagcaggtaacgtctctccaaaatttagctaatcagaaagctgacttagccgaaaaagccagaggcgctgctattattgaagaacgtcagcgccttgctcgagaccttcatgatgctgttagtcaacagctgttcgccttaaatatgatgtcttctgcttctattaaaatgatggatcgcgatatcgaaacagccaaatcccaaatggtcgatgtggcagacctcgctagtaaagcacaagtcgaaatgagagcgcttctccttcaccttcgtccgattcatttatcagaagactctctttgtgtgggcatcaaaaagcttgtagatgagctcgaaaaaaaatctggcgtaactttccaccttacgcttgatgaactacctgaacttcctggtggaattgaagacaacttattccgtattgtacaagaaagtctcggaaatgctttacgccacgctgaagcttctgtgattcgaattacagtgaagctgaagaaaaagcagtttttattacatatcaaggataatggaaaagggtttgaaatgaatgaaaataaaaaaggcgcatacggtctcgattcaatgcaagaacgtagcaatgaaatcggtggacagtttcgtgtctcatctcgtccagatgaaggcacattagtcgaagtacgtgtgccattggagggataaccatgacagatgaaattaaaatgatgatagtcgatgatcatgatatggtacgtaaagggttaaaagcgtatcttctaacggaaccggattttcaaattattggcgaaggcgcaaatggcaaagaagctgtgacgctcgcaaatgagcttcatcctgacgtgattttaatggatctcattatgccggaaatgacgggcattgaagcgacaaaagaaattatggccactcttccaaacacaaaaattattattatcacgagcttctacgatgatgaacaagtttttcctgccattgaagcaggcgcttttagctacttgcttaaaacagcctcagcggatgaaatcatcgctacgattcgtaaggcgatccaagatgaaagcgtcatcgagcagaaagttgcgcaaaaaatgatgaatcaactacgttcgaaaccaaaaaaaccgctacacgaacaattaactaaaagagaaaaagaagttcttcttttaattggtgaaggaaaaacgaatagccaaattgcggaagaattatatattggattaaaaacggttaaaacccacgttagtaatatccttggaaaactcggtgtaaatgatcgcacccaggccgctgtatacgccatccgaaacggtatggttcggtaagcaaacctactgcttttgacacctctctcgatcgctacgcatttactataatgagtagcgatttaaggaggaaacaagcaatggcagacgattataagaaatggtcagaactcccttatgcaggtgaacagaagccccctcgtaatccagaagaaccctatgcgggatcgtggccagattactaccttcgtaatcaaccaccagggcgctttgctaccctgagtggaagaccaattcaacttgatatccaacacccttccaccattgattgggagaaggaattaaagaaagtaaagcaaaccagagagcatctcacaccaaaccaggtcactatcgctgaatattggggaactggagtagctagtaaacaatggacgccaattatcgataaattaattgacacatatggtctgacaccccctcgtgcggcaagaattctcgctgccgtttcagccggcatgaatgatgcttttacaacagcctggtatttaaagtaccgctggaacgttgcaagaccaaaccagctcgatcatgagttgaagacgctcctttgtacaccgagacatccgacgtatccatccgggcatgcaacgattagtggagcagcagccgagatcttaacttacttctttcctgctgagaaagaacgattaatcgagctcgctaaagagtgtgctgtctcaaggttgtacgccggcgttcatttccctgttgataatgaagaaggtcttcgcctcgggaagcaaattggttctatcgtagcgtcagagctaagaaaagaagagaataaccgtggtcaatccatcgacgtcccatatcgagaaaatcgtcacgcaaaattaactcctccgccatataaacaggttattgatttcgaatttgattcaacctgtgattcaactacagaaaatccatttgaaaatcagtatgtgaaacaaccaaaacctaaactctttttctaattgttcagttgaccatttaaatcgagtaaagctcgcaaaaagagctttactcgatttttctctatgttctttccgtacaaaatgagaaggattcgttataatagatggaagattagcagatgaaaggactttacatatgaaacgcatatttctcttgatcgcgttgaccatttcaggatgtcaatcgcctcaatcagagccagctagtataaccgttgccgcagctgcaagtttaagtgatgcgatgaacgagcttaataccctttatgaacaagaacatcctaacacagacatcacattaaatcttgcttcttccggagtactggccaaccaaatcaaacagggtgctccaattgatgtttttgtttctgcatccgaatctcattttcagtctgtgaaaaaggaagatttactaaaccctgactatcagactccattactgaagaataaactcgtacttattaaaagccgttcatctagtctcgcaaattttgaacaattagcttctggaagcttgaagcgagtagcgattggaatacctgaaactgttcctgcaggagcttatgcaaaacaagcactgcaattcgcgaacttatgggagcaattagaagaagagctgatcttcggtaaggatgttcgtcaggtattaacatacgttgaaacaggcaatgcagacgcgggaattgtgtatgaaacagattatcgttcttcaaaaaacgtagaccttgtagaagaagttcctgaacaagcgtattcatcgatcatttatccagctggcgtcgtccgtggtgctagtaaagaagcaacgaactattatactttcctacaaagtaaagaagcaaaagcgatttttgaaacatacggtttccaaagtgatgtgagttccgatgactgatttccttgatcccattctcatatctctaaaaatttcgcttgttgcaagcatcatcgtaacggtattaggtatttcggtaagtcgcctcatggctggaagaacgtttcgcggaaaaagcatcatcgatacggtcattatgcttccactcgttcttccaccatcggtcgttgggtttatcctactcgttctttttggcgcttcaagtccgatcggtcagtggattgaagcagtgtttcaacacccaattgttttcacatggcaagccggcgtaattgctgcaagcgtcgttgcgtttcctttgatgtatcaatctgctaaagtcggttttgaagcggtggatcgcgatatcgaagacgctgctcgtgtggatggcgcagggaattggaccgtattacgaatgatttctattccgctcgcttccaatgctcttatttctggcatcatcttaagctttgcccgcgctttaggggaatttggggcaacgttaatgttcgcgggaaaccttcctggaaaaacacaaacaatgccaacagcgatttatgtggccattgattcaggtcaaatgaaccttgcctgggcatgggttttggtcaccatcttcctttcaactgttatgcttttactttcttatcgtgttaccgttaaaatgtaaaaaactcgctcaggtgagcgagttttttcacaccgtatgaaagacttcatctaaccccacttgcgccgataattactcttccgcttcgacatcaccctctgtatctccttgcgtagagtagaattccttcctcaagtagatcttttcaatcaaggcttcctctccaccatcttccgtaccatagatcgtgacgtccgagaaaccttcgataaggtagagcgtaacaggcgtttcaaatggatttgaacctttacgtagctcttctacctcaaaccccaaactagcaagcaacaatcgattatcttctaagtattgtaacccttcaggaaagtacgtcatggacatagcgatattatctttaaatagcacttctccgttttcaaacgtcattttcagcgggtcctttttatctgcctcaatgttcttaggaaattgagaaacaaattcttctctggataaaccaagcaaggatttggcatcgacaattaactcaatcgaagcaggatcaaagtcaatctcttcttcaatctgtgcttcctcttcttttaccgcctcaggcgcttcatcttcatcttgctccgcctgttctgtcgttttattgtccgcagagctcgattcatctgatgaagaatcgacgaaagccggaatcccccacacaactatgtatagaagaagccagaaaccagcaaaaactgccgctcttttcctcgaagacgttacgaagggtttgactatgttagcgaccatcagcaaaaatgcgataatcaccactgctttcaaaaaatccatgttccttcacctcactgttaactataaaaccaatggtttcctaaaaacaatagtttcttctgtaaccatcaaaactttttcatgaaaacgaattattggtaaaatgaaggaaaagcgtttactctatctaaatacaaagagtagtcatatttaataaggaggttaatgatgacagccgatcgctacgttaacttaaccgttaaaaactatcaatctgtccgcagcgctattcaaacgggtgatcttctcctttgtagcggttcttatcctgttagtaaaatcattcaaaatgtatcgaattcgaaatttagtcacgttgccctcttatttcactggatggatcgcattatgttgcttgaaagcgttgaaagctttggggttcgaatggtgcctctatctcactatttcaatgattatcgtaattcaggtcagccttataaaggaaaactgtatctcattcgccatacccaagtagaaagtctagatgacatcaaacggaatgcgatgttaaaaagaggcgctgatttaacggggaaattttacgacattgaagaaatccttaaaattcttgctagcgtcgtaatcgatgacctggaatccatccctaataataaatacatttgttccgaatttattcaagaatgttatcaaaaagcaggtatctcattccaagatgatggtcgtggattcatttatccagagcatatcgccagcgatccggatgtgcgcccactatacgaacttgtcccttaaaacccatttttataaaatccctcccatttctatggtttgtccagaccaaatcatttggaataaatatactattactatccaaagatattggagggagcaacgtgactttaattgtcattgatccagggcacggcggttcagatccgggtgctacgtataaaaattttcaggaaaaaaattttaacctagtgatttctcgtatggtgagagatcgtcttgtttcgaagtacgaagttgatgtggtgttaacgcgtaatacagataaaacgttctcactaaaacaaagaacagattttgcgaatgcattaaaggcagatttcttcctaagcattcacaataacgcttctggtggaagtggatttgaaacgtttatttttaatgggaccgttccaaatgagacggttcaacttcagacgagcattcacaataaagtcgcaagagatattttaaagaaatacaacattttagaccggggtaagaaacgagcaaattttcacgtgttgcgtgaaacgaagatgaacgctttgcttattgaagttctctttgttgataatgaaaaagacctcaaccttctaacaaattctgcttttatcacggatgtatctacagttattggggacgctacggctgaagccttgaaacttccattaaaggccaagccaatagagggtacgttgtataaagtgattgctggctcctttagtgatcgagaaaatgctgaaatccatcttgctaaaatcatccaaaaaggatttggtgcgtttatatcaacaacggtcattgacaagaaaacattttatcgcgttcagacaggcgccttcagtgaaaaagaaaatgctgaagcattagttgaaaaactaacgaaagcgggatttgagtcctttattctcgttgaaggggctacgcctccacccccgccaactcctcctgtgccagacaaaggctataaaatccagggagatgctgtgttaaacgctaaacaaatggatgcttacgtaagaaccattaatccaggggcaccggaattagctgaactatacttgtcacatagtaaaatatataacattcgaggcgatatcgcttatgcgcaagcgcttcatgaaacaaatttctttcgttttacaggcgacgttaagcctgagcaaaataactttgctggaatcggtgcaactggaggaggagccaatggggcaacgttccctaatgcatcaaccggagttcttgctcatattcagcatctttatgcttatgcgtcgaagtcaccaattcctgcttttgaccaaaaagtggatccgcgctttgacctcgtaacacgtggatcagcaacaacgtggcaagcattgaatggaaaatgggctgttcctggaacaacctacggtcagcttattcttgctttgtacaaaaaaatgttagaatctgctctaatagaagttgaaaaagagcgtaacacgttgaagacgacgatcgaaaacttggaaatttaataagcaaaagaaagagcgcttcctcttcggaacgctctttttatctactatttttatatgtcgaaagagccgcctgaacatgaggatgataggttgtttttatgtaatccgtacctgatgatacccaccttagcgcagtctcaggcctaacgccagtaatcataatatccacaccgagaagatttaacgagccgcaaagctttgcaatcatctctgtaaagtcgtcatttaaatacgtaatagaagataagtccataataagcgtatcgaccttcatatcggctactttttgaagtccgatatcaagtagataatgaaagcccacttcttccacgacaggttgaatcggcaacagtccaagttgatccatgagcggaatgacgttgacggccatatcttccatgcgttcaatcaattcttcttgctttttataaacatgtgtcatatctcgaaattctaccattgcgccatacatcttgttcgaatcccttaacaccttcgtttgaaccgttaaatatagattgaactttccccactggtaaggcatcgcttcaataaaatactcttctcctgtttgaaccgtccgctccacatgacgcacttcttctggggcaaaaggaaagatatcgtacacactttcacctagtatctcgttccgtttcacttttaaaatattctctcccaaatcattcacctgaattacacgataattcaaatcaatcgccagaacaccacatgataaatgattcattatatgatcctgcaatttactcaattcaccactcctattaaatttcttcccatgatcgacaaggaaagcgcatcaacctatatgaccttctcgctcattgttcagctcctgctcttgcaaatttcattctaaaactatactttctacatttaaacgcatatccctgtttcttcaaatgaaacattttttcatttgaaaatatcggtttaagaggaattctttcaaaacaaaaaactgctggttcggcagtttttagtcccatgcaaagcgctgttctttccacgggtctccatacatatgataaccatttcgctcccaaaatccctgctggttttctgaacgaaatttaatggctcggatccactttgcgcttttccaaaagtacaaatgtggaataactagcctaaatggatatccgtgttctggggttaacacttctccgttatgtttgtaggcaagcaaacttgtttcggcaagaaagtcctcaagcggaaggttcgttgtccacccttcttctgcttcgaccataacgaattttgcttcctttcgaatacctacatgctccgcaattgtcctagtggcaatcccttcccactcgttatcaaacttagaccaccctgttacacagtggatgtcatttctttttgatgcttcaggtaaagtaagcaactccttaaacgaaaagacagtagggtgatctacaagtcctcctattcttaagtcccagttagacaaatctttctcataatacggaacgttacctacgtgaagaaccggccatcctgtcgtgacgcgctgattaggcggcgtgcgatgactgttcagttccttttcttttccaaagtacatgctccacctctttttcaacttcttttctattagtgtaacagaatgtctccattcattttttatagaatgcaccataatagggagtatgatcaaaaaaaacacgaagatcgctctccgtgttttcttacttaaaatatcatcgcagctatccagccaaataagatgagtggaatgttgtagtgtaaaaatgttggcactaccgtgtcccatatgtgattatgttggccgtcagcgtttagtcctgacgttggtccaagtgtactatcagatgcaggagaaccagcgtcaccgagtgctgcagctgttcctacaagcgcaatcgttgccattgggctaaacccaagttccattgcgagtggaacgtaaatggctgcgatgattggaatggtggagaacgatgacccgatccccattgtaataaacaatccaacgattaacattagaagtgcagctaaggctttattatctccaattaatcctgatgcctgtgtaacaagagattcaacttctcccgtttgtcttaacacttctgcaaaaccattcgcagcaagcataacaaatccgataaacgccatcattttcattccgtcggttaaaattgcctctgactcagataagcggatgcttcctgttacataaagaacgattatccctgataatgcgccaaggatcatagattcagtgggaatttgaactgctagtgtcacgagaacagctatagacgcaaaaatgatcgacctttttgaataggtatacgtttcaggcgaatcctcctgagcaatggaaagctgtttatatgtcctaggtttgcggtacgaaacgaatacagcaatcacgagacctacaacaagaccagccgttggcaaaagcattgcggttggaatcgaagagagttcaatatccatcccgctatcagccatatttgactgaaggatttcgtgaaatattttcccaaatccagcaggcaaaagaatatatggcgcagttaaaccaaatgttagtacggctgcaatggccctacgatctagtccaagttcatttaacacttgaagaattggtggaattagaatcgggatgaacgcaatgtgtacaggaacaaggttttgtgagaaacaagaaatcaaaagaatgataaaaagaataagtacttttgcgagccctttcttccgatccccgccctggcgattaacgagttttaacgcacgttctacgatcaattcaggtagtccggtgcgagtaagaccaacggcaaagcttccaagtaatgcatagctcaatgcgacggtagctccgcctccaaggccagaactaaacgctgtaatggtatcatcaagagataatcctccaagtagaccaccagcgattgcgccgacgacaagagcgacgacaacatgtatacgaaataggctaaggcctagcataattaaaacagcaagaataacggcattcatcgtgcaacaacctttcaacaaatcctttagtttggtaaatcactaataagttaacacgaaagagttttggtgtcaatggaagacgttgccgtttggagatgaacgccaactacaaatgcagtgtcatatggtataatagactgatcatttacatatcaaaatgtttgtttatctcgcattccacagtccgattcacaccttaatcagcctctttttcaccattcgttcgatttaacattcaattcttcgggtacaccattcataggaatcatgtagaaaggaagatgttgtcactcatggatattttgttaaactttccgctctgggcagcgctattcggcgttgtgtttgcgcagttcttaaaagtaccgatctactttattgctacaaaacaaattaattggtccttatttaatgccacaggtgggatgccaagctctcactccgctgccacaacagcgttagcgactggtgttggccttgaaacagggctagattcacctattttcgccgttgctgcaatgttcagtattatcgtcatgttcgattccacaggcgttcgtaggcaaacgggggaacaggcgattgtcttaaaccaacttgtgatgaattttaatagatttgtatctgaagccaaaaactggcagcaaaaacaggagcgagaaaagattgaagaattaaaagaattgcttggccataagcctattgaagttcttgtcggtggtttacttggtatcatctcaactttaattctctattacttttttcaacttgcttaaagaaggaggactttgatgcgcattgtttcgttatgtcctagcaatactgaattgtgtgcctatctcggcttaaccgatcagctcgtcggagttgatgacttttcggactggcccgagcaagtaacaagccttccaagacttggcccagatctttcaatagatttgaatcgtgtgaaagagctcgagccagatctgatccttgcttctctaagcgtaccagggatggaaaaaaacattgaaggtctcgacgaacttgggctttcatacactatcttaaatcccaattcgcttgaagacatttgcaatgatattgttacccttggggaacttacgaaaaaggcgcgcgaagccgcttctctctccaatcgttttagagaagtgatacaacactacaaagaaattagtgagcaaattccggacaaaccagaaatttattgggaatggtggcctaaaccgatttttaccccagggaatacaaactggctaactgaaataagcgagctagcaggtgcgaagaacctatttcgagatgtagagctcgcttctgtgcaaacagactgggcagacgtcgtgaatcgtaaacctgatcatatttgtcttgcatgggtaggtgttcgacagaacaaagtgaatccagctatcgtaaaaaaacgaccagactgggagcagcttcaggaccggccaattcatgtccttgaagaatggttatattgtcgcccatctcctcgtttattgactggccttgtgaaactagctgcgatccttcatcctgaacgctaccctgcttttgaaggtgaagacatgtttctagaaaaatagcacgatacaaaacgtcggagaagcgcttctccgacgttttgtttttcctattctttttcgctcattaactcttgtctaaacacttgcatcgattcttcttcattcaaggtttggagcatttcttctgttaacgtgccctctcctttttgaatgagataaacgtccagtgttttctttccccattctgtataaacatcatgaacagtgtcgtaataaagatcgatacgatctccaataatagcacttcctgtatctgcgactacaccaaaaccgtattctggaataaaaagaacacttccaattggaaatacagacgtatcagcagcaatcgtggaataaagatcacgcttcactttaacccctgaaaaggtaattccataagcaggatgatcaggcgttttccccgttgactcttctcccgctgtataaccagttgctgttactgtgtgaacgggatactgtgaccaatcctgggacttcgctagcgttaatcgatcctctttactgaatacgacctgttcaggaaacagccattttgacacatcattaatcgaaagaccagataataataaataagttgatagcaaagctgctgcaaaaagcccggtaaacgcgacaccttttgcgatcagcagaatgactcgcacatcttccactcctctcatggtctattcatttccagagaagtggaaagctattcattcagttacttggattctatgacgcaaaaaaagcttctgccaacaaatggcgaagcttttagaacatttgatatcctcttacacgaagcattctaattgcaacacctgcaaagactgctccaacaaggccagcggataaaataatcgcatcggcacttcctagagaaagaaggtcagttcctaacgctttaaaagaagaaccgggtgacgagaaatattgaaagaacgagacgttatcaataatcatgataacgattacaggataagcaactgccatgatccaagttgaacgaaggagcatattaagcagaaatccaatcccaaagaaaagaacaataaacaacagcatcgaaataatcagctgtggaatggccattgtttcacccccaagtaatcattgttagtttactggattgtccctttttagtcaatgaacggagagtgaacaaagaaaagcggaagcggcctggtaggtccgacaagcggtggaaggctttcaattgaacacgccctttgtgttcaactgaaagactgaagcgactcgaggacctgggcgctgaagctagatcaaagaaaagcgcaagcgccttgttcacctgcgacaagcttaagacgagtctcaatgtggcgctctttgccacaatgagacttggcttaagacctcgagcaggtaggcgctgaagctagatcaagaaaagcggaagcgccctgataggtccgacaagcggtggaaggctttcaattgaacacgccctttgtgttcaactgaaagcctgaagcgactcgaggacctgggcgctgaagctagatcaagaaaagcgcaagcgaccaggcccgacaagcccaaagctaaactcccctgcatgttataccttcttatttttgaacaaaaagaaaagctaagcgcctttgagcgcttagcttgttggattttgtttagctccactacctccacaattatcacatgtttccgatccaccaagaagcagttgaaagtacccctttccctggcaataaggacagtctgtagctttcgccttattttgttctcttctcatatcaaccactcctttgttgtaattttctgataatatatcaagaatcgttgaaaaagaaaaaccccaaatttctgcttgacagcctgtgtaagcggatacatcagttattattagattatttcgtcaattatcaaatcatttcagctattatgatagaatccgattttgcccacttttgttcacctacgctacttaggcgtatgatacatcaatttatatgtggtgtactgaaactgattaccaggattcatttctgtcataaactgatccattccatttaagaaagaggggatcattgaagaggtgcgtggatctgcaagaagctcttcctttgttagaaaggcacaagttgcaatttctgccgtctccattatttcggtccctcctgttctcttcatatgaaaaacaactaaattatcacttatatcgttattaatcacaccggagcgaatgccggcaattccaatcgtttcggctacaatacctgtttcttcgtaaacttctctcatagcagcttcatccacggtttctcctggatcaacaaacccagccggaaaagaccacattccttttaagccaccatatttcttcatcacgactagatattttgattcatactcaacgatgcctgcagcggcaagccacactttccctcgtttgctcaagacaacatcctcccaggtataaataaagtcgatcgctcataggctttaccatagcccctattcgattgaatagattagaaaaacgtggctagtcgtccattcctttaagacggcagccaccgtttttcttctaaacaatgattcatgctattgataaaaaaaacgacttaatgatacgaaaaaaggcaaagacatcatgtctttgccctctttatctgatgctcttaaaataacttaagctttccttttttccagacaagccctggtccaccaagcatgaacaggtagcgattatcaatcacttttttcatagcagacgctgtgctaccataaagtttcttgtttccaactttaccaattgcttcgccttttccaagtgatgcaactgtccctttaatgtccggtgtaaagctttcaagctctttaccacggacaaggtttaataagttcttagaaacagctccagcagcttgaatcgcaacttgagcggttggagggaacggacgatcaatttcttcgttaatcagaagcgcacagtctccaacaacgaaaacattatcgtaatccggtgtacgctgatctttacgaacaggtacgcgaccgcggtttgtttcgaaaccggaattagcaacgatggaatttccttgaacgccaccagtccaaacaactgtagcagctttcacttcttcattctcaccgaggatgacaccgtcttctgtaacttctttaatcatcgtactcgtacggaactctactccttttcgttcaagaaggttcatgccgtattcaacaagctcttcgtcgaatcctggaagaacagttggggacgcttccacattaataatcttaacgcgatcacgcgggatatcgaactctttacaaagttcaggtacacgctcggctaattcaccgacaaattcaattccagtgaatccagcgccaccaacgataatggttagaagatcatcacgacggtcagactcattgttgtagctcgcaaactgatattcaatatgctcacgaattttacgaacagagtttacgctacgaatactgaaggcgttttctttcaaacctttaataccaaacgtagctggctcaaaacctagtgctaacacgagataatcgtactcaagttcaccatttgaaaggataacgcgtttttcatccggcttaacttctacaactgtgtctttaataaatttaatcttgttcatatcaataacgtctttaatcataatacgcgttttgtcatgatgcattgtgcctgcagctggttcatgaagccacgtcgtttgatagtgatagtcatgcttattaacaagcgttacttccacttcgtttgatcccatctctttttgaagacgagctgctgtcataattccgccgtaccctgcacctagaattgctatttttggcctactcacttgaatcacatccaccttttatcggtatttttttcggacatatcgttgattttccctgcatagtcctatcgtgaaacgtcaataaacgctgattataaggaatctcttggttcaaaataaacaatccttcatatgatcaaaagagattgttaagtatttcacgttctagatcaaaaaaatgatgatccagcacgcactttgtcataaaattttcaaatctgacgctccattctaatcatattcttttttatttcctttttcaacctttataatgaaagttctaagggtgtttttgccttaggggtttagttccgtttttattatgattataataatgaaagcactgtaataaattttagggggactgactatgacagaccaacaagaactttatgatataacgattattggtggaggtcctgttggcttattcaccgcattctacggtggtatgcgccaacttaaggttaaaataattgaaagtatgcctcaacttggagggcagctctctgcgctctatcctgaaaaatacatttatgacgttgccggttttccaaaggtgctcgcacaagaccttgtggacaatcttgttgaacaggctaatcaatttaatccagacgttgtgttggaacagtctgttgaagaagtgtcaacgcaagaagacggcacactctatcttcgttcaaaaacgggtgacgagcactatacgcgcgcggttattattactgccggtgttggcgcattccaaccacgacgtcttaaagtagaaggcgccgatctttatgaagggaaaaaccttcactatttcgtgaatgatcttactgcgtttgctggtcaaaaggttctaattgctggtggtggagattccgctgttgattgggcgaacatgcttgagccaattgctgaagaggtaacgcttattcaccgtcgcgataaattcagagcacatgagcacagtgttgaacagcttatgaactcttctgttaacgttcaaacgccatataacattactgagtttatcggggacggagaacgtattaaacaagtcgttctcgagcaggttaaaggcgaagaatcaattacgaaagacgttgatgctgttattgtaaattatggcttcatctcttctcttggaccaattaaagaatggggtctagagatcgaaaagaattcaattgtggttaattccaagatggaaacaaacatacccggcatttacgctgctggtgatgtggctacatacgatggaaaagtaaagctcatcgcctctggatttggtgaagcaccaacagctgttaacaatgcaaagtcctacatggatccagatgcaaaggtccagccgctccacagcacaagcctattcgataagaaaaagtaaattctacgaaaggtaggatacacatggatgagattctttttatcattgttatgatagtaggtcttggctactctctttataacagtttgaaagagacgccgaaaccaaattggaaaacggttaaacaaaacctctttcattcttctcactaaaacgttaaaaaccccgtacaaagcgtacggggtctttaatatgtatgtgtttttaccatccaagcccaactttagtagacaaaatttcttcacctgaatcttctttcaacgaaatttcgtatcggcctgtttgatttgagtaagcgagcgttttttctttaaaagcgacatttgcctgatagcgaacatcaaacgtttcgacctccagatctccagacccctcttcatgtatcttaacagtaaacaattgaatccctccctatacagtcattttatcaccgtcagaaatcatgagatatgacaaatagtttacaccaaaaccatgtttttccataaaaattattttctatatagcacattgctaaagattatttttttcctgatgtgggtaaacacaaaatagacttaaatattctgtttgcaggaggaattaaccatgaatagattacaaaataaaacagccgtgatcacaggagctgcgactggtataggacaagcaacagtcgaacttttcgctaaagaaggcgcaaccgtattatgtgcggacgtgaatacggaagagatgaacaaaacagctgataagctgaatagcgacggtgcgaatgttaagacattccatgttgatgtttcaagcgaggatagcgtgacaagcttcgctaacaaagtgaaagaagaatatggcacgatcgatgtactctttaataacgcaggagtggatcaggaaggcggtaaagtacacgaatatccggtcgaattgtttgatcgtattatttctgttgatctgcgcggtacattcttaacaagcaaatacttacttcccctaatgatggataatggtggttcaatcattaatacatcatcgatgtcaggtcgagcggcagaccttgatcgctcaggctataatgcggctaaaggcgggattacgaactttacgaaagccatggcgatcgactatgcaagacagggaattcgcgtaaactcgctctctcctggtacgattgaaacacctttaatcgatgaacttgcaggtacaaaagaagaagaaatgggtcagaaatttagagatgccaacaagtggatcacaccgcttggaagacttggacgtcctgacgaaatggcaaaggttgctcttttcttagcatcggacgatagctcttatgtaacaggtgaagatattacagctgatggtggcattatggcatatacttggccaggtaaaatgcttattgatgaacagtggaaaaaagaaacggaataagtgagcaaaaccccgatgctgtatgcatcggggtttctttgtaaatgaatttaagcccaccacatctccgttggctgttcaacaattaagacagactgaaggttcttaaccgcggtttggaacccttcgttaatcgacatgagtggatcttcatgttcaatgctaacgacatggtcatagccatatgtacgtagtgcactcatcatatgtgaccattcttgattgctatgtccgcagccgacagaacggaacgtccatgcgcgcgttttcacttcgccgtacggctgcatgtcggttaagccgtgcatattcacattatcctgatcaatatacgtatccttcgcatggaaatgatggatcgcattttcttttccaagaattttaatcgctgcgactggatcgattccctgccaccacatatgacttggatcaaggtttgcaccaacagcatcgcaagttaactcacgaagcttcaacattgtgtaaggcgtatggactaggaaaccgccgtgaagttcaagaccaattttcacattatgatccttcgcgaattgcccccactctttccaataaggcactagcttctcttcccactgccacttcaatatatctgagtactcagcaggccatggcgtgacaggccagtttgggtttttcgcgtcttcactatctccaggcgttcctgagaatgtattcacaactggaacgttcattgccgatgctaatttcacagtcttaacgaacgtatcatggcactcctcagcaaatttcttatcaggagaaatcgggtttccgtgacagctaaacgcactaatctcaagacctcttgaatgaactttatcaagatattcggagcgcttttcttcactttcgagcaattcatctagattgcaatgcgcatcacctggatagccccccgtaccaatttcgaccgctttcagtccagacgctttcgcatgatcgagcatttcttcaaatgacttatctgagaatagaacagtaaatacacctagtttcataggatcactcctcttaagtttttaatcaagtcgaatgcttctaccagtggaacagctttcatagatcgcttcaattacttgtgagacgcgtctcgcttcttctgatttcacgatcggttgttcgaggccaaggcagctgttaacgaagtttgctgcttgaggcaaacctggatcttcatctccaggtgtccactggctactcgtgtttaaaagcataccgtgctgtgctttatttaattgaaatggaaagacatcaattcctccatcgcttccagaaatgctcaccgtttctttgtcctctgcaatgttagcggaccaggatgtttcaaaaagcatggagacgttgttatcaaatcgaatgtatgccgttacatgatcatctacattaaatgtttcatgatcaaacgtcccccactgatttacttgcgcaggcgttttgctgagacgattataggttgtgccagtcacttcaactggcttcgcattccccatcaaccacatgcttaaatccaggaagtgacagccgtagtcaattaaacttccaccaccctgaagctgtttattcgtaaacacgccccagcctggcacttttcgacgacggagagcctgtactcttgcgaccattggatcaccgatttcattctcttgaatgagttgacgtacggcacgcggttctttcataaaacgataatgatatgcaatggatagaattttgccagacgttttctcagctgcgatcatgcgatcacattcttctacagtcatggccattggtttctcacatagaacatgaacaccagcagtaagagcctgttcagcaaggtcagcatgaaatttattcggtgtgcaaatcgttacagcatctacttctttaaatagagcttgaacgtcatcatagacattcggaatcgcaaacaccagagccgcttgcttcgctttctcataatcgacatcataaacaccaaacaactctacttgttcagagagctgttggtacgctgggatatggcgggactgagcgatgccgccagacccgataatccccatacgtaatttattcacttgatcacctcaggttaatgatttgctttgtttcatttgattctagtgctgcgagaacaacttgtagtgaattcattccttctgtaccgcttacaggaacttctttatcaactaaaatgctgtctacaaattgatcaataaccttggaactcgattgtcctccgctatcattcgtttgaatgccaccaagttcatatttcaccacttcacctgtctgatactgaacaactagtgaattcaccggatcgtcttcaagtcttaggatcgctttctcagcatagataatcgttgaattatcttcactcgctgtgtaagcccagcttgcagctagtgttccaataataccgctctcagactttaagatacagaccgcattatcatcaacagtcgcaaactccttcgcgctcgtttcaacaaatgaaccgacctctacgatttcttcatttaacaaatagcggatgagatctgtcttatgaacgcccagatctcccattgctccaataaatgctttatccttctcaaagaaccagctctctttgccatccacactccaaccttcaggcccaggatggccaaaagcggttcggaagctatacactttgccgatttcaccgctggctagtatctcccttgctttgacatgagatggaacgaatcgttgattgtgcgcaatcattaacttttttccactcgtgctagccgtttcgatcatctcttctgcatctgcccgtgacgttgccattggtttttcgcaaagaacatgctttcctgcttttaatgcagcaatagaaatcggggcatgaaggtagtttggtgtacaaacgcttactgcatcaacctcactattttgaagcaactcttcataactttcataggacttcgccccataaagtacggcggtttcatccgctcttgatttaacaatgtcacaaaccgcaataatttttatttgtgtgtttgccgcgtattctggtaaatgacggtgtttcgcaatactcccacatccgataacaccaatttttaattcattcatggtttctcctcctcaattcctctcttatttagacgcgatggtttcaagcggttttgcatttccatagacaggctttggtatcgttgtaggcttggcccaggcaaccgcatttttcattacgcgttgaatatctttgtggtaataggttgggtacgtttcgtgccctggtctgaaataaaagaccttcccttgaccacgcttatatgtacagccgcttctgaagacctctccgccttcaaaccagcttacaaacacaagctcatcaggtgccgggatatcgaaatgctctccatacatttcttctcgatcaagttcaattttctccccaagaccttctgcaatcggatgcgttggatccacaacccacattctttctttttcatctgcttcacgccatttcaaatcgcagcctgttcccatcaattttttgaaaattttagaaaagtgaccggaatgaagcacaataaggcccatgccatctagaactcgctgatgaacgcgatttacgatttcatctgatacttcttcatgggcgatgtgaccccaccagagaagaacgtccgtgttgtttagcacctcttcagataagccatgttcaggctcgtccaaagttgccgtttttacttcaaagtcctcttttagaaattctgcaatagcaccgtgaatcccatttggatacacgcttcttacttcttcactagtttgttcgtgacgattttcattccatactgtaacattaagcattcaaatccactcctattttatctattcttttactgaacctgatgttaaacctgatacaattcttctttggaaaatcagaaccataatgacaagcggaaccgttacaacaactgtcgctgcagaaatctcgccccatgggatcgtatactgtccctggaaaagggcaattccgactggtacagttttaaacttatctgccgtgttaattgtaagggcgaacaaaaactcattccacgccgcaataaatacgagaatagctgtggtaaaaatacctggcacggcaagtggcatgatcactttccaatacgtttgccatagggaagcgccatcaattttcgctgcttcttcaagatcgaacggaattttgcggaagaacgtaacgagaagccagatcgataatggtagcgtgatcgtcgtgtacgggataattagcccaagataactatttgtaagacctaagttctttagaaaaatgtaaattggtgaaatcgtcgccacttgtggaaacatcgaaacagatagcaccacacctagaataatcggtttccctttaaaattcagacgcgcgatggaatacgccgcaaatgatgcaactagcacggtgtaaacggttgtgaccgtagcaacaacggtactattccatagatagcgaggaaacggatagtctacgaaaacggatacatagttttgtagagtagggttattcgtaaacggattgaacgctttttcaccaaagagctctgttagcggtttaatcgaacttgcgagcatccataagaacggaaacatgacaacaaagacaaacacaactaggaaaacgtaaaacatcggtcccgctttcttattcatctggctggccctccttcttcatgataaaatacattctcatttctttccagttccatcgtttattaattctgcaccaagtaatttaatgaagattccagagatgatggcaacacagatgaacacaacaactgaaatcgctgaaccttcaccgaaattcgtttgcgtaaacatcaacgtataagcaagcattgagatcgtttcggttgagttcgctggacctccaccagttaatacgtaaattaaatcaaacacacggaacgcatctagcgttcggaataagagtgcaacgagaagacttgttttcaaaagtggtaaggtaattgttacgaactgcttccacttattcgctccatcaatcgatgccgcttcataaagagaagacgggatcgtttgcagtcctgctagtaatagcaatgccatataaggtgtcgttttccatacatcggcaaaaataacagagaacatggcaccagtatcagttgtaagaagcatggccatgcgatcaattaaaccaacatcttcaaacagctttgctacaataccgttttgaccatcataaaggaacttccacatcagggccgcaacagctgttgggatcgcccatgggattagaatacttgctcgaatcaaccctcggcctaagaaagctttgttaataagtagggcaatcgctagacctagaatgagttcagctagaacagaaataaatgtaaatacactcgtgttccaaagagatttccacatccgctgatcagttaaattttctttgtagtgttcaaatccaataaagttcggttcaacaacaatttcagttagtgcggatgataaaccaacaattttatcgcctttttccaaacttccattttcattgatcgtcattaaatcattattgatcgctttaacggaagaggtaaaatcctctgctacgctttcatcaatttcaacgtacttcatatcgtcaggaatattttcaaacttgtctagcttttcattaatcacatcataattttctgctgcttgagggttttctttaatactggcatcgagattttctaatgttgttttcatctcggtcagctcttcacttgaattcccattatcaatttcagagttaattgcgccaactagaaatggatagttttgcaagtagcggtctagatcaatttgataatcgagatgaacttctgatttcgttggttcattaagacgaaggtcgaaaagactaaaataaaatgactggaaaactggccaaatagaaatcgctagaattaggatcagtgctggggcaagaagtaaataacctacaaccgcatcgttgtttttctttttcttctttttgggttgtttatccactttaataggctcttttggatcgatatctgtttgcataccaacgctcctctctttaagaaaaaggtgtcttattgttccgttacattgctagacaccgcttttgatacttcaaattttcttatagcccttttttccaaaaaatatgtaggaaagacattagccttcttgtggaaggctaatgaacttttctattatttttctagcttttcattcatttctttttccatcgcagctgctgcttcttcaggagtttcttctcctgcaattgctttagaaatgtggatttgaatgatttcagagatttcagggtagtttggagctacaggacgggaaacagctgcttcaagtgctgtttggaatccttcttccccaaagaatgggttcgcttcgataatttcttcatcttcaaaaagagctggtagcgttggagcatgagagccttcaatcgcatcgatcttctgtccttcttcaccagtcataaacttcaagaactcccaagcttcttgaggatgttcagtgaaattattgatggctgccatccaaccgccaagcgctgatgctgatcctgcatcaccttcaggaagtggagcgacttcaacattccctacaattttagactgctcttcatcatttgctagagagtactggtatggccagttacgaataaacggagactgcccttcaataaatgctgtgtgagattctacttcagtgaacgtattgatgttacctggaacgaaatcagagtttgcgatttcaaccatcttggaaatacctttaatcgcttcaggactattgatgacaacttctccattctcatcaataaatgccccaccgtaagaaccgacaaattcaactgcgtttgtcacaagaccttcatactgcttcgcttgcattaagtaaccaaacttcgtgccatcttgacctttgagctcagaagcttgtgtcattaagtcatcccacgttttcggagcttcagaaaccatgtcagagcggtagaaaagcattccagtatcaatgaatttcggcattgcccactgctttccattaaatgttgctgccgttaccggtccctggttgtagtcatccatgttaatgccgtctttttcaataaagcggtctagaggaagaacataccctgcttgagcaaattctgcaggccagataacatcgatatcaaacacatcgatctcagatgattcagcgttcagcattgtcacatatgcgtcatgctgtgcccccgtatctgttggcatttcgcggaattcaatttcaatattcgggttttgcttttcgaattcctcaaccattacatcggttgcacctgttgcatctttaccacgagcataaacgagcgtaactttttctccgtcacctgaactcgcattttcatcacctgaattgttgctagtattacttgaagaattatttgaagaactacaagctgaaagaacaaggataagggccaaaacgataaaaagtagtttactattcttcaatattcgcataatacgaaatcccccttaagttttgttgaaatcgatatcaatttttgaaatcgatttcaaaattaaagataacgcttacaaaaatcgtaagttaagtcgactttcgaataataagcgataatggcagctccattacactttgtctgacacgttcacgctttccttttaaacaatcaataaaaatggtcatagcacgactaccaatttcggcacctggttgataaattgtcgttagctctggttcaatcatacttgcaatcggctgatcatcaaatccgagaatcgccatatctcccggaacatctagcccatttcgcttcgcttccttcaccattgcagctgctacttcgtctccaccagtaaaaatggccgttggtcgttctgctaacgttagaattttgttaaatgtttttacaccgtcttccatcgtatatgtatcatggaagatccattctgatttcacttcaagaccagcttcatccactgcttgaaagaatcctttgcggcgatcattggatagtccacttgttgaacccatgcagtaagcgagtcgccgatgccctcgttcaatcagatgctttgtccctaaataactcccctgaacttgattcaatcgaaccattggtactgtcgcatcgtgatgatactcgttgcatagaataatcggtccatgatcggtatatggctgaatttgctcccaatcattttctattgaagtgaagatcacaccatcaacctgcttcgtttgcaagagattgaggaattcaagttccttcttcttacttgattttgtttgacaaataataagctgaaagccattttcctcagcaactttctcaatgccatctaatatcaaagtgaagaagggattggttaaccttgggatcaaaaccgctacaagatttgttctacgattgcgcagatttcgagcagacgtgtttggaaaatacccgagttccttcatcgcctcatgaactaattgacgcttgtctttcgatacgtgcggataatcattaatgacacgtgatacagtcgctcgtgataatccggtatagtctgcgacgtcagcaattgttgccatgttacatcctcctctgaaagtacaaaagaccctcccttcttttgtaatcgatttcatgaaatcgattacaaacatcataacgcaagttcacagaatgttcaacgttattttcaaaatattataacgcttttatttttttagctgaatttcacgtaaatatttgtaactctgcgtcacactttcaatcggatcgaagtcacagtcatcttgttcaacaacccaccactgcacaccacaagcgtgtccctgctcgatcacttcttcaatagcgatgtttcctgtcccaaggataaccgttgcttctctttcatcatctgatcggtccttcaaatggatgactggtgatcttcctgcaaatttttgcatccattcaacagggtcatgcccaacttgattgagccagtaaatatcaaattcagcctgaatggcatcatgtgcatctaaaatgcgatatagatcactaccttcaatactacgaccaagttcaaaatcatgatgatgataagcgatttccattccctgtttactacaaacgagcgctgcatatttcatgatctctgctactttcttatagtcttcagcgcttcttctttcaggaggtaaccatggacaaacaattcgggtattccctaacactttttgttcctcaatcaccgcttctaactcattttcaattcgttcaattggcacatgatgtgcgatgacagacagaccaagctcatctaacttgctcttcacttcttgcggtttgtgaccatgaagtccagcaagctcaacaccttcataaccgatggcttctacccttactaacgtttcaaaaaaatctttttcgcattcgtttcgcagcgtgtaaagttgtaatcctacgccaatttcaatcatttgtgacactcctttttgtttaaagaataaatcagaagtttaaccccatcgttataatataaaaacaattggttcactttctccttctgagatgaaacttctccaccattcactaattttcgataaaacgacggaaaacccttttttgtgacaaaaaacaatttcttttatctttcttgaaaattcaagtgctccttcagttcttgatcgagtaaatgcaaggcggttcgtgatccatatgtaccgtgactcacatcattttcgtctcgtttcctttcctttagtggtaaaaaagataacattttagctgttttcatagagagattccctaaaacatatcataaaaaaacttctctattcgttctataaaaatagaacaatagagaagtttcaatttcatgcttaacaattctccggcgaaccagcattcgtcgctgttttaaacgaagaaccacagccgcatgatgcgatcgcgttcgggttgtcgattgtgaacccgccgcccatcatgttttgtttataatcaatcttcacaccatctaaaactggtgcgctttcgttgtccataataatcgtgacgccatgctgaggatctagcgcttgatcatcggctttcatttcagtatcaaaacccataccgtaacttaaaccagtacagccgccaccttttacgccaacacgcaagtaaaggttgtcaccttcttcttgcttcatcatttcttttacctgtgctgctgcagcttcagataaatggatcattaaaatccctccaatcaccgtaatgctacttctagtataccgcgcgagcgaactaagctcaacaattgaacctcagccgctcgctatatttcaagtgtaagattatattatgcttctcatcaagcttttgactatatgctagtacttgaggatggtttcattcgagagcgatggaagttagcataatatctcgctattgtatcgctgcatttttctattttacaagctctacgtccatctaaaccttctatcattctacatgaacatccttttattgacaaacaacctatttcacgaagtatactcctgttgaaatggtgacagccggccccgtcatccacacgtggtcatcaatatcccaggtaatgtccaggtcaccaccagcaagatgaaccgttacctttgttcctttaggcgttttttcatttaatacacctgctactacagcggcgcacgctcccgttccgcatgcttgtgtgatacctgaacctcgttcccatacacgaaaatgatactcactgcttgatacaacctcaacgaattcaacattaatactctctggaaatagctcatgatcagtaaaataaggtcccgccgtcgtaagaggtgcagaatgaatatcttcgacaaacatcaccatatgaggatttcccatcgaaactcccgtcatacgtagggattgactttcaaaatcaatgggttcattaatcactttttcttccgcattccctttcatcggaagactccctctcgtccattggggttttcccatatcaattgttacagtttcaaccacatcattaacgagatgaacttctgcttgcacgagccctgctagcgtttcaatcgcaaatttcgtttcagaaacaagcttattttcataagcgtatttggctacacagcgtaatccattcccacagtttttaccttctgatccatctctattaaaaatcctcattttcacttcagctttatctgatggacaaatcaagatcatgccgtctgatccgatgcccgtgtatacatctgacacttcttttgcatattgaggaaggttaccttcgtttaatggttgctcaagtgtgttgatgtaaatgtagttattgccaaggccatgcatttttgtataagtaatttcctgcaatgctgtcactctttctatctttttatttggtttttccgaacggcttctgtcgtccaaaaataatcgctatcaattttttcaatcacgagcttgccgttacaacaaggcatcacgagtcttgttttaatttcttcacagccctgcttataatctcgttctgtcatcggtgttaatacattctccgtctgacaaaatgggcattctgggacgtaaacgtcgcccatcatacgatcatacggcaatgtatgttcaaagctactcatcagtgatccctcctgccttttaattaaacaagtatatcgtaaaattataaaaatacaacaatgctttgcttgaattatcatcacaaaaggataaaacacccataaaaaaaagcccctttaaaagaggctttcaacttagaaaataagcatacccgcaattgctgcgtttaacagatttgcaagcgtaccagctaagatcgcgcgcattccaaactttgcaatttccggacgacgtttcggtgcaagaccacctagtccacctagtaggatggcaagagatgagaagtttgcaaatccacatagagcgaagctgataatcgcaactgatttatcagataggttaccagcactgatttccggaccgaaagaagagaaagccacaaattcgttcaggatcaacttttgtccaatgtagttacctgcttggacagcatcttgccatggaacaccaattacaaacgcaagtggtgagaacacataaccaagaatttgttgaatcgttaagccaccagcaccaaaccaaccgccaactgcaccaagtaagccatttagaagcgcaattaaggcgataaatgcaagaagcatggctccaacgtttaaagcaagtttcagaccgtctgatgcaccgtgtgctgcagcgtcaatcacattaacgtgatcttcatttctttccattttaatttctttagctgtttctggtgtttctgtttcaggcataatcagcttggccattaataaaccacctggcgctgccatgaaacttgccgctaggagatactcaagcggtacaccgagcaaagaataaccaattaaaacagaaccggcgacggaagcaagtccacctgtcataacggcaaataactcagatttcgtcattttatccaggtaaggtttaatcacaagcggtgcttctgtttgaccaacaaagatattcgctgttgctgataaagattctgctttacttgttccaagtgcccatgagatcgctccaccaaggatacgaataacccattgcataatacctaggtaataaagaacagaaataagagacgagaagaagataataatggttagaacttgaaaagcaaagatcatcccaatgtcttcattcccaattaagccaccgaataggaaaccaattccttcattagcgtatccaataatatcttgaacgaataaggatagttgttttaaagctgccttacccgcttcccatttaagtacaacaaatgcaaatgcgacctgaatcgcaagtgctcctaacaccgtacgaaggttaatcgctttacggtttgttgaaaagattagggcaatggcaaaaagtacagccataccaccaaatccccatagtatttgcatattttacacccctcgttaaatattgtatccgtttataagcctaggctaccccattaccagatttaaaatagaaatattatagcactcagccaaatacagcgcttacaaacagtgtttttcatcgtctgaaaattcgacatttttcgcagttaagcggaaaataaaaagtctgctctctctctatcagacttcaatgaacctttgtcattataacacagaatatgagcaatgaaagcccttaattgtcctcatttagtttttgcgtgatttttttaattagagcttcagacgtatcagcattgattaagcgaccctcaacaatcgcaaacgcctcactatagcagttcccacaataaccaagacaaccataatcgatcaactcaactcctggtaccttttcgaatacttcccatacctttttgttatcccttaaatttccagcgcaaaattcaattgttttcatttaaatgccactccccagttacgcatttcagaaatgttattgtacataagtctcagtttcgctatacttttaactgtcataaaaaattcaaatgtataagtatagtatagcgcgtgtcgcttccttatttcttcctaaatcttaacttcttctttagcttctctactttatataggaagacggcgttattgaattttatcaaaggggacctcttatcatgaaaaggctagtgctattaggcggcggatacggtggtatgcgcattctacagaaattattttcatctgatttaccagaagacctcacgattacgcttgttgaccgaaatccttatcatagtatgaaaacggaatattacgcgcttgctgccggaacagcaagtgatcatcacatacgcgttcaatttccagttcatcaaaagcttgaaatcaaatatggtgaaattagtggcatcgacttaaactcaaatgtgattcacttaaaagatgatgacgacctcgcttacgacaccctcgtcattggtcttggttgtgaagacaaatatcataatgtaccaggcgctgatattcatacactaagcatccaaaccattgattcttcaagaagaacgtatgaaaccttaaacaaccttggtgctaactcaatcgttggcatcgtcggtgctggcctgagtggcgttgagctcgccagtgaacttcacgaaagcagaccagaccttcaagtcaaattgtttgatcgtggtcatacgatcctttctgcctttcctgaaagactcggaaaatatgtacagtcttggtttgaagaacgtgatgtcgaggttgtgagtgaatccaatataacaaaagtagaaccgaataccctttttaatcatggggaacccgttcactgtgactcaattgtttggacagccggcattcagccaaacaaaatcgttcgtgagctagacgtagaaaaagatccacagcagcggattatccttaatgattaccactctattccaaatcacgacaatgcatttgttgttggcgactgcgcaagtttgccacatgcaccaagtgctcagcttgctgaagaacaggctgaacaaattgcccttgtgctacaaaagcaatggaaaaacgaaacaccaccagcacttccaccgattaagatcaaaggaacgcttggctcactcggaagcaaacatggctttggcgtcatggcgaatcgaccactcaccggtcgggtaccgcgtctacttaagtcagggatcttatggatgtataagaatcataatggttaaagagataaaaggaacccagcgcacatcgtcgcgggttccttttattatgccgtagctgattgatcttccaatacagcatagagatctttcaaccttggatttccttctgagacaatttcattttgaacgacaatgacgggataaaatagatcttcatcaattacttttgcggcaaaaatcgcttctgctcctgaaagttgactatgaatatcaatatatcgaacggcaatttgtcgatccggatatttccgatcaagggcagcttttagccattcagccgtttcttctgaagaaggcaggttcacacagcttgcacaacgttcgcctgctccatagacaagtacttcctccatgatgaaaaacgtcctttctattcaatccatttacctttattgtaccttattccattgagacagaaaagaaccattcgccttttttaattctagcaatcatttccctagatgttccatcttgaatctgatttcataccatgataaagtaagatgagaataataatcattccacaataacacatagatttttcacatcatcattagtataatggaagtatgaagggagtcgatgaatgatgcaagagcaagtacaagatgtattgaataaactgcgtccattcctcctgcgtgacggcggagacgtagagcttgtagacatcgaagatggcgtagttaaagtacgtctaatgggagcgtgcggcagctgccctagttccacaattacacttaaagcaggaatcgaacgcgcactacttgaagaagtccctggtgtaacagaactcgagcaagtattttaaaccaaacacatccatcccctctagactagaggggattttttatgttttaacttaaccaatccacacgtctcatttggctcccgtaatctcccattaactcctgaaataacaaacgataaacttcctctcgctcgccttctcttctcacaaatttctttaagtttaggaagctccgttctttctctttcaaattgccatcactataataatgctcaaccgtctccacataaggtagcggaaaaagcaaacgtgcatataagagattccagtccatttgattcagcgtacgacgttcatgataatcccacaagaactgcctgattgtttcaaagttcccttcgccttctaccaactcatatcgaatccattcggcaaggtctctagctggatggtctaatataaaatcatttggaaacagtccttctgaattccgacgatatttcgctgtataccggttaaacgcaagcgttctaacttgaaatggattcgttcctgtatcaatcccgcagtctacgatgtactgaatcgcattttctgctaaaccagagtaatatggaaatgtttcaataaaccatttatcaaattctcgatgaggctgcgcctgatttttcaattcttctcgaaacgattcaagttgatccattctgaactgccatctcatttgccatggttgaatttccggtaattcattgtaagcgactagaagattacctgcttttcgatgaaacagtgctagccgactgccgtcactatgacgggtgtgacgttgatacggtttttgataaagaacatgagcttcattttgtatcgtttcaatatactttcctcttcttgaagcaattggcaacatcgtcggttcgttctgttgattaaaatagttcgcaaccatgacataccacgggaattcactttcctgctccagttgcgcccgttttaatataaattctgattgatctgaacccctaagtaagtagccaccgttttcctcattctgctgatcaacaacaatcccatattgatgaaaaatctcccgctccagcatgctaaccctccgacatttcgtctttgtatttgtactatatgcctaaggcgcccaatcggtgtaatcgattcaactgaacatcactgtcatatttctccgcccttcaccatatactaatataatcaactctatccaataccaatttactataaagttaggtgggacaagaatgggccaagaacctatggaccttgtagaaaaagcagcgagaagtaaattaaaagaacgtggagtcgagatcaaagatatcgcagacctcgtcttttaccttcaagaaaaatatcaccctaaccttgaaatagaaacatgtatccagaacgtagaacgtgtgttatcaaaaagagaagttcaaaatgcagtattaacaggcatccaacttgatgaattaacggagagaaaactacttgatcaaccgctccaagatattttaatgaaagatgaaggtttatatggcgtagatgaaattattgctttatcaatcgtcaacgtgtatggttcgattggatttactaattatggctttatcgataaacaaaagccagggatacttgaacgattaaatgataagacgacaggagaatgtcacacgtatcttgatgatattgtcggtgcaatagctgcggcggcctcaagccgcttagcacatcgagctcagaaaactgaataatgatcaaacgaaaaaacgccccgcggggcgtttttatattttccactcatctaatgtttggatcgtatacgttgggagcttttctactgactccaagtgttcttttgtcgtgacacccgtatgcacaagcagggtatctaaccctgcgttaatgcctgcaagaatatctgtccggtaattatccccaaccatcaacgtctcttccttagatgtgccgagctgtgccaaagcttgttccataataatgggttcaggctttccaataaaaatcggatccgtttctgttgaaacagaaaccactgaagtcaatgaaccattaccaggtagcaatccacgttctgttggaatcgcaatatcgccattagtcgatataaacgtagctccgtttcgaacggcaatacaagctttagcaaatttttcataagtaatcgagcggtcaatgccaacgacaacgtaatctggatgatcgtcttgaagggttagtccctcatccgttaacgcatcacgaatcccttcttcaccgattacatacaccgatgcatcactcttctcatgtgagatatagcttgctgtcgccatgcttgttgtaaacacatgatctggcgtacaaggaacaccaaatgcctcaagcttctcagacacttgttctttccgttttgatgaattgttcgtcacaaataaataaggaatattcgcttcctttaaacgcttcacgaattcaactgcctcatgaatcttttcagtgccacggtacatcgtgccatctagatcaattaaataacctttatagtttttcattttttacttcctccttctatattatccaatccataagaaaaccgctttcatttatcgaaagcggttcttcggtcgtgtttttgaatgcataacgttagctgcttttcacgttttttactacctctcatcaaaaacacccttctttctttacatgcttcgattaatcaagttttaactatgattgtctggaagaaaagctgataccgctcccaattcttgcgttaagtactttcttatatcagcaggaaattgctcaagtgcactgagatttttctgtaggttttgctccaatgctccatgctgaaggttaacatactcctgcattagcggttttctcatgccgactacttcttttaaccgaacggcattatcagtggaaatcactttttcatcagacaaaatttcaataatatcttcataactacccggatctcgcataataaaaccatcaatcatgctgtttccgacatcaatcatgctttcaataaaaacatggtgaagtctctctaatccaagcatttgaagttccgtctgaaaagaactttctttcaatattccaatcattttatcaaaataaatgagctgttcttcaattttcttacgatctacaaagtacataggaatacacctgcctctaatccaatcgatataaatacttttctttagtgtatcatatcctaaaatgcaaaagcttacattttctaacgaaagcttgtatgacaccgcttcataagatggtatgatagcattaactaaaaaaggagggtgctatgatggaagatgaacgactcatctacgacgaacaagaggccactgaagccaggttcgtgtgctttatgggaagcaatcatcggtttgacctttgtattgtaaaatcagatcgcttttatggaaaatccttagtcctcgatattcaaggaggcaaatttgcaattatcggtcacgatgatctaaatgagcctggaaacctcgagcatgcctactctctcaatgaggaagatgccgaagaacttcgcaacttcttgagagaaattctaagtcactaatattttagatggcaatgaatacactacctcctaaggtggtgtttattcatgttcgatgatgaagattatcaagactttgctaacgtagaaaagggtagaaattacgtcctgccagaagatacaccggagggtccatacggttcacctgtgaataaaaagctcggtaaaacgaatgcatggcgagaaggccagcgatcttacagtgcgtttaactacgaaaataaaaaccttcaccagcatttaccacgtcaggatcctggctcacatccaccacacgatgatccagaaaaggactctgaaaaaccatacaaagcataagccctatgtgggcttatgcttcttgttgttgcttcttaggattttctttcttttgcttctttaatacaaagtaaggacagccaaaattgcagtattcatataaataatccagcaccgtgctgaattttgtatcaaatgtcgctttctgattgcgatcatcaaaaaatccttttaatctaagctgaccgtatccccagtctccgacaatatagtcgtatttatctagaatctcactatatcgagcaagaaaagcttcttcgttccagccttctctttcatctttcatcaactcaaatgtatgttgattcacttttatcatcattctacttccctcatttcaaatgggctcattagtctaatgataccttttttattggaattgtccaagtaataccaggaaaaaagaagcttagttcggtcatgataacagtatggaggtgaagacatttgaaaaaacacatactgcttatcctgccacttgcaatcggaattacggcatgtcagggagaaaatgcgactgactcctttgatcatgcagatttaacaccggtcaaaaccgatcctgaagagtacggaatgaataccgcaaactcacaggaaaaggccaagaaaggcggatttggctatattcgccacacacgaaatacaaacaacatgaattctcaaaagcaacctgaaaacattgcttacctcgatcgtgatcgtatgtctgatatgatcggttcaatggctatcgtgcttccttatgtgaatgatgtggcaacgctagtgacagatgaagaagtgttaatcgcctataaatccacttcgaaagaccgtgatgcaaccgctgatcaagttaagaaaacagccctctccgttatcccaaggtattaccatgtgtatgtttcagacgaagaaggaatgattgcggaagtcgaacggtaccaaaatgcctctgcggcaacaggtgatttagataaaagcattgaagataccattgctaaaatgaaaaaagcaccacagggcaaaaaagtgagtgatggagagaatgaaaacggtgaaatgaaaggcgaaatgaatgaggatttaaacgatacaggcggaaaagaaatgatctcgaagtaaaaaatcggccctcagcaggccgattttcttttatttaagtgttgggttggcttcttagtttgttgcttgttttgcagcattgacttgttcatcagcatgataagaagaacgtaccattggacccgattcacagtgcttaaatcctttttccaatgcgatatcctttaactcaagaaattcttgtggtgtccaatatttttcaacttttaaatgctttttcgaaggttgtaagtattggccaagcgtaacgatatcaacgtcgtgtgcgcgaagatcgtccaatgtttgaatgatttcctcttttgtttcacctagtcccagcataatgcttgattttgtcggaatctcaggattcatttccttggcacgctgaagaaactcgagagtacgacgatattttgcacgtgcacgcactcttggcgttaaacgctccactgtttcaatattatgattcatgatgtccggttttgcatccataagcgtttcaagcgcttcgtattgaccacccatatcagaaggaagaacttcaattgagcagaatggattttttctacgaatggctcgaaccgtttcagcaaatacagctgcgccgccatctttcaaatcatctcgcgctactgccgtaataacgacatgctttaagcccatttgttcaaccgaatctgcaacacgctctggttctgcccaatccagttctgttggaagacctgttttaaccgcacagaaacggcatgcgcgcgtacaaacatcgccaagaatcataaatgtcgctgttttacgtacagcccagcactcatgaatattaggacaacgcgcttcttcacagaccgtatgtagtttcttctcacgcatcatctttttaagacctttatagttctcattcgtatttaattttattttcaaccattcgggttttcttagatactcttctttcttactcaatacattcacctcacctatcgcttttctgtattaaagaataccatagataacccttcgatttccataaaaagtgcgaatctcatgacgattaagactttagaccttccattatttagatctaatgttttgcgatttgaaatgcaaactaagtgtaatgacaaataaagaaaggagaagaaacgcttgaaaaaatacagttttcttatccttgttcttttctttctcataccagctactgttttttctgctgaagtagatgaagataaattaaggaacgaacgcatgatgttgtttcataaaatggaagccgtaacgcacgttccgtggtatctttacgccggaatagatcaatatgaacgaagcattaggcgatctcaaaaagatattcctcgtgaaaaaggagctgtagccatttacattactccagaaaaatggacgggcgcagcaaatccgaataaagaagatacgagcacagagtcgatttcgttttttggcggcattggacttgatgggaacggagacggaaaagcagaacgaacgaatgctgaagatcttctttatacaattggtgacttcttgcaaaaatacggcacttcgttcgaagacttacaaattggattatgggacttttatcaccgcgatcaggcggttcgaaccatttcaagcaatagtgctgtttacaaacgattcgaaacgctaaagcttgataaacatgcctttccagtccctctgcacgctaactacagctaccgaagcacgtggggtgaccgacgtggttggggaggccttcgcattcatgaaggaacagatatttttgcttcctatggtgttggcgttaaagccacaagttatggaaccgttgaaacaaaaggatggaatgaatacggtggttggcggattggtatccgggacattgatgggaattaccactactatgcacacctaaacggttttgaaaaaggaattgagaagggaagcgttgttcagcctggtgaaatcattggctacgttggtagctcaggatatggccctaaaggaacagccgggaaatttccaccgcacctgcattacggcatttataaagataatggaaggacagaatggtcatatgatccatatccttctttacgactttgggaacgccaggaaagagcgcgaaaaaaatcctaaaaaaagaagaactagcgcgctagttcttcttttaattttattgtttttttgagactctaacagcatttagaatacttgctgcaagaccaccccagataatgaccattccaacaatcatcataaagatcgcgctaccacccatattagcttacctccttatacttttgctgctctactttcgcatcccatttctttaggctgaatagaattccaaccagaatggcgaatcctgcgacagcccagccgctataaaggatgaagccgtttgagtaaccttcatagtttccagtaggcgtatcaaattgacgaagaagattcgttttaaacagatcaaacatcatgtatccaagtactagcggagtaatgacgcctagacaagctttccaccagtacttcagcgaaatatctgaaatgccgtttgcatgtgtttcaagcgtattaagctcacgaagcacccaagcaactacgactacttcaacaagaccaacaaacgcaataccgaactggttaatgaagtaatccgctgcatctaggaagaacaatccgccttgagtcgcaaataaaatggagataatggaagaaattcctccaccgattaaaacagcttttgtacgagagatcccgaacttctcagaaacccctgcaacgtacgtttctgaaatggaaataagtgaagacaatccagcaagtacaagtgatgcaaagaacaggaatccaaacaaaccgttcaatgctgggaactcattaataatttgcgggaagacaacgaaagctagtcctacgccaccgctcactacttcaccaacgctaagtccttgctgttgtgccataaaacctagcgcagagaatacaccaataccagcaagaagttcgaatgccgagttaccgaaaccagtaataaaggcgttattcgtaatatctgacttcttaggtaagtaactagaataagtaatcataatagcaaaagcaatcgataaactaaagaagatttgtccatatgctgcaacccaaacactaccagacgtaatgctgtcaaaattcggtgtaaagaaagcatttagtccttcagcagcaccaggaagtgtcactgctcggatgacaataattaagaaaagaacaattaaagtaggaataaaaattttgtttgcacgctcaattcctttttttacaccggcaagaagaacgcctaatgtgataatccatacagcaattaacggaagaaacacgcctggtacaatactacctgtttgtccaggatcaaccgtcaatttcaaatagtcattaaaaaggaacgcttctgtatctgaaccccagctctggttaaaagcaaaatagctatacgagatcgcccacgcaataataacggcgtagtatgtcgagataacaaaggcaacaataacgccccaccagccaagccattccatctttttattcattctaaagaacgaaagtggcgctgatccacggaacttatgccctattgtaaattcaagaattaaaattgggattccagctgttagtaatgcaaataaataaggtataaaaaatgccccgccaccattgtcataagcaacagccggaaatctccaaatgtttcctagacctattgctgatccaactgcggctaaaataaatccagccctcgttccccattgcgcacgattttccaaatgaattacccccttgaacaaaattaaacccttttcactataagcccccttccagaaaaaggttaagacttttaagtaaattcagattattttgtttatagtatatctagtacgtatgtccttgtcaaaacaatcttttttcttttttggtatgaatcgttcaatttttcatggaaatctctctatttttgtgtaaaaacataaaaaaacaggaggaaatacctcctgttccattactattttgctgcttcaaccggtctgttggcatattttgctttcagcataaaagcgagaattccaaagaaaatggctgttacaatgaatccaataattgcactacctgtaaatcctaaaacaaggtagccaagcaatgatattcctgctacgagcaaggcataaggcaactgagtcatcacatgatcgatatggtgacttcctgcacctgtagaagaaagaatggttgtatctgaaatcggtgaacaatgatcaccgaatacagctccggcaaggacagctgcaagaactggcagcatgtaagtaggatcggttgccgcagcaatctcacccgcgattggaagcatgatgccaaatgttccccatgacgtacctgttgcaaaggccattactcctgcaagcaagaataaaatggcgggcaagaagccgatcataatgtggtcatttactagacctgcaagatactttcctgttccaagacttccaataatctcaattagcgtccacgcaaagaaaagaatgtataccgccggaagcattgacttaattccttcccatattcctttaccaagcacggaaccgcccattcgtttcataaagaagaaaatgagagaggttgcaaacccaattaatccaccatatagaagcgatgcggcaacatccgtgttttcaaaaatcgacagagcggttactgctgtatctgttccgctcaccgcctgaatgcctgtaataatcataaacgccacagttcctgcaatcagcataatgatcggccatgcaagatctgctactttacctttttcactctcaggaagacccgttgtttgaccaggtacggctccttggtcgggatcaagaacctctccagttttctgggcacgatcttcatgaaccttcattgcttttaaattgatatcaaaataactcacaaagaaaaccatggctagagcaaagagggcgtataggttcattggaatcattctgataaacgcttctaatgcgccaacgcctgtaatactatgtgtcgctagtacgccaccaataagtgcgataatgtaagcaccccagcttgaaatcggggagataatacacatcggtgctgcagtggagtcaataatataagcaagttttgcccttgatacattatgcctgtccgtaatcggtcgactcacattaccaacggctagcgaattaaagtaatcatcaataaaaataataataccaaatacggctgttacaagctgtgcgccaactcttgttttgacgcgtttcatcgcccattcaccaaaggcacgactaccacctgagatcgagataaaggctgtcatcattcctaataaaagtaagaagaaaataatgtacatgttccaagtatttaagccaccgctctcagaatcaataaaaatccctttcacgattgtataaatctcgtttaatgatcctggcacactccaattgttgatcataagtgcaccaagaataatgcccactccaagtgaaggaagcactttccttgtcaccactaccattagcaaagctatgagcggtggaataatggatagaattgaattctccatgaatatcctcctaataaataaatgattgtcatgcaaaccggaatggacgcctacccctcagccgcttgtttctgaacgcaaaaaaagcgagcaatgataggattggtcctatcattgctcgcttcaccgagtcaatgttaagtgtccaccccgatcagtagttctccattacaagttagactcataatgacagttcgacactttttcaatgccgccccaacataaataatgtgaccgttatttatgcttcggcagatctccctttcgatgctgatcattggtgtcattctcccaacacgtactcatgaggatctgctcctctacctcatcgtataagataaggaacaatattaagttcagttttaaagtataccttactttctctcattctgcaattgtagattattccatatcatcaatttgaatagatggagtaggtaacccaccttctgaaccattgttatagaaatttggtacttcacctggaataatcgttaataaaacgggaatatccgtcgtcaccacatcagaatccgtagcaaatgggataacgatttttactttcacttcaatgtgaacccgaatgtcgacagaaatattattaataccaactggttcaattgtacttttatagtcagacttcacttcaccgatcgctgtgaaacgtacaggaacttttggtcccatattggcaagtaacgtgttatcaaacgcctgaccaattggaatataatgaatgatcccattatccaacgatgtttgatcatccacttcaagctccacaccattttgttcagcccagtaatctaacgttccgtcttccacactttttagaaatcgctgtactttttcagttgattgggcaagcacctgagtaactgccctttgattaatctgaactcgcaccaactttccttcattgtcagttacttcttttattaacgaatcttgataattatctacttcttcagccatcttctgattaatggcttcgttaatcgctattgttgcgatccgattcgtctctgtacgggcaatttcaatcagtgtaggctttattcctttctcaacaatccatagcccttggaccgtcataaaaatgaatagtaggaaggagatgacaaacacataacgaaagggaagcggcccctttctaaagaattttctacgagttcgaaacaacatgaaccctcccttctcttcctcatgtatatgccatgaaagagagaagtatggacaatttctccagaattctgcttccctagtaagtgatttttagtaaaaaagaaaaaagcctaagcaaggatgctacggcttttttcacatcatcttcagcatggcatctttgccctttgtgccgactttaatgcctcgcgcttctgcttcaagcgtaacagattcaagtggggcatcaagcagctgatcaatcgatcttacgcctacagctcttcctgcaataatcttccggtcacttaacttctcattaagtaaggcaacatccagtgcgccacacatgatatagccattttcgttcatgaccgctagaaaatttgtttttggaagctgcatactaactgctgtaaacggatgaccgtcaatcatgattggtgtcatagtgatcacgtcattcccgcctcctgacctgaatgaatatcactatatctatatgaaaccaacagcatgtttgacaatcatacgtacaaagttttaatgcctattctcaagacgccaggcaagaagatcacgaagcatttcaggaagataatacttcttctttgcgtgcttcatttgtggatagaatttaccaaacgtgaacatatcagctgtggccacggcatattcttgatcagatatgagtggatgaccattatgaagaacgtcagtgacatgacgaagcccgtcttccatctcaaccgtcgtcacttccagaccgtcgaatgccatgatgcccatcacttctcctctgaatcctagtcctttaaaacttaatttcacgatttcatctgacatggcgtgggaaatgatttcgcgtaactcacttcctcttaagatcactttacaaggatttacgggatgaggacaaatacggtggagatcttctcgtgagacgtgaccttctgataacccatcaaggagcattcctgcattaatcatgccaatatctgcatgacaccattctcgaagggcagcggctaattcatccgctaaaaccgaccgttgaaaccactcagattcaagaggctggtcaagtcgacagacaacttcttctagcatcgactgtgcttctgtacttaatcgctgaatcatttcaaaagttgggcgatcttctttccgatttcgaacagaaatcgcataagcctctttatccgtaatctcccttgtgtccatatcgatgcaaacggtcacttctccaacgtaattcccgtttttccctgcctgtgtaatgagcgtgtcctctacaagcatcccatgctttaatacatgatgggtatgagcaccgataataatatcaatgccattcatttctcgggccatttgttcgtcattgcctagtcccatatgagacatcagcacgacaacatctgattgttgacgtacttcatcgatcatggcttgcagaaaatcatatggcgaatcgattttccaacctaatagcgagtaaaattgctcatacggaatcgtaatgccaataatccccactttcacaccatttaactcatgaattttatacggggccacccatgcgggtcttgtgccatcttgatgatagaggttcgccacaatcacctcaaagctagcctcagtataaagcgcttcaagctctttttttgaaaacgtaatgccttcattattgccaattgtagcgtaatcgtattgaagatcatttaacagctgaacgttgccttttccaaccattccctcagtcattggatgaaccttgtcagagtggtcccctaaatcgagaaggagatagggtgtgccttgaagctcgtgcatgcgcttcttctctttgagataggacgacaccttggaccagttctcgaaatgactgtgaagatcgttcgtataataaaattgtaatgttctagaagtcaagacactcttcctttcttaccccatcgttccctgccagataagccggacaccgacaataattaacatccatcttaaaatcacaacgatggttttgtccgaaagtttctggttaataaacgagccgcactttgctccaatccaggcccctggaattaatccgagtagtaaaaaccactgaatgttaccaagcgctaaatgcgtcagggtacctgttatacttgaaagaaaaatcataaacatagaggtcgcaaccgcaactgttgtcggaaatccaaataagagaatcatcgccggtaccatgagagacccgccacctattccaaaaagaccggaaatgaccccaacaacgaacgaaaccatcacagctgcaagagcagaaaaggtatagtttacttgcactccatctgaatccgtatacgagcgttgaaattgtccattcaacttcatcggacgtaaacggttccttaccattaataatatggaaacaagcaccataaataccccaaaataaatggaaaaataatctacctgtataaatttattcagccatgcccccagaatcgctcctggaccactgcctagaaaaaaaagagcgccacttttataatccacgcttttctttttcatatatgcgagggtagaagagagcccaatagcgacgaggacaacgattgagctcccgacaattttttgtggtgataatactggaagccaatttgtgtactggtcaatgataagaagcacagggacgataataatgcccccgccaagacccactaggctaccaatcgtaccagcagctagaccaatgataaataacagtatccacatcagcattgtatagctccttacagatcaaagagatcaagttgcttaggatttaaattcgtatactcaattccaagcatttgaatcatccactttgcattatttgcagcgtgaccacctgagttattgttaaataaaacaaacacatctttgcattctttttctaattctaggattcgctctttccattcaagcaattcttcttcattataatcatacaggtaacgcacttctcgccagttatgacgattccctgggttcgtccatccattcgtatttcttccgtgaagacgcacgagaacgtgatccttatgtatggtttccatcactaatggaacggatccttctcctgcctgaggttcatcgcatatggtatgaataaatccttgtgcttctagaaagctcagcgtcttctcacgaaatgcttcatgataccaagactgatgccgaaattcgacagcacatggaacgtctcccatccgctctttgcagtctctcaagatgttcacatgatctttgttcacgtcaaaccatggtggaaattgaaaaagcaccatcgcaagctttcctgctttttgaagcgggcgaagcgattccttatacgcttgaaacatttcatcacgtgactcaaaaggaatatctcctctttgatgacccgtcattccctgataagctttgaccacaaaacgaaagccctctggcgtttcatcagcccatttttgaaaatttcgagccggttgcaccgcataaaaagacgaatcgacttcaacagtaggaaagtgtgaaccatatatcgaaagtttttcattgctttttacacctggtgggtatagatcatcatgatcgccccatcctgttacacctatgtaaatcatgcaatacttcctctcttcattgattctcttactttattctcatatcattacccgaaaatagcaagggaaaatcccctctactatttcaagataacgtcaatcgtgcccactttgaagccggcctaatagaaaaaaacgaaccggataatccggttcgttaggaatggaaatttaaccgattgaaccttccatctcaaacttgatgagacggttcatttcaaccgcatattccataggtagttctttcgtaaatggctcgatgaagcccattacgatcatttcagttgcttcttcttcagatacaccacgactcataagatagaagagctgctcttcagaaaccttcgatactttcgcttcgtgttcaagtgaaatgttatcgtttaggatttcattataaggaattgtatcagaagtcgactcgttatccatgatgagcgtatcgcactcaacgtttgaacgagcgccttccgctttacggccaaagtgtacgataccacggtacgtaactttaccaccctgcttcgaaatcgacttcgacacgatcgttgaagacgtgttaggtgctaaatgaatcattttagcgcccgcatcctgatgctgccctttacctgcaagagcaatggaaagtgtcataccgcgagcaccttcacccttcaagattacagctggatacttcattgtaagcttagatccgatattaccatcgatccattccattgttgcattttcttccgcaacggcacgcttcgtcactaggttaaacacgttgttcgcccagttttgaatcgttgtataacggcagtatgcatctttcttaacgataatctcaacaaccgcactgtgtagagagtttgttgtataaacaggtgctgtacacccttcaacgtaatgcacagaagagccttcatccgcaataataagcgtacgctcaaactgtcccatgttctcagagttaatacggaaataggcttgtagcggtgtatcaacttttacgccttttggtacgtaaataaacgatccacctgaccatacagccgagttaagtgcagaaaacttgttatccgttggaggaattgttttcgcaaagtactctctgaaaagatcttcgttttctttaagagccgtatcggtatctttaaagacaatccccatgttctctaggtcttcttgcatgttgtgatacacaacttcagattcgtactgtgcagaaacacccgcaaggtatttttgctcagcttcaggaataccaagcttatcaaatgttgctttgatttcttccggtacttcatcccatgaacgttcagacttctcagaaggctttacgtagtacgtaatttcatcaaaatcaagatcagcaaggtttccgccccattgaggcattggcatgctgtagaaatgctcgagtgatttcaagcggaaatcaagcatccactgaggttcatccttcatgcgagaaatttctttcacaatttcaggagtcagcccgcgctctgagcggaaaatcgaaacgtctttatcactaaaaccatattgatattcgccaacttcaggcatttttttagccattctatttccctccttgacattacacatgtcagtgtttggctgttgttctctttccatcattctagtatgaaaaagaagcgatgacaacacctggaagtgggttaagcctcatcctgttccttgaaacccttctccattgccttccaagagagtgttgcacatttgatacgagccgggaacttcgaaacaccttgaagtgcttcaatgtcaccaagatcgaaatcctcttcatcatattctttcccctgcatcatatctgagaaaattcccgatagttttaaggcctgatcaacttcaagtcctttgactgactgtgtcatcatcgacgctgatgccaggcttatagagcaaccttctccaataaacttcgcatccgaaatcttcccatcatctactttcagctgtagctgaatagcgtcaccgcatgtagggttattcatatttattttaaggtcgccttcttcaagctcccctttgtttcttgggtttttataatgatccataatcacctgtcggtacaactgatctagattattaaaagacattaccgaaaaactcctttgcttttcgtaatccggctacaaatgtatccacgtcttcttctgtattgtataaatagaagcttgcacgtgcagtagccgtcacctcaagccacttcattagcggctgagcacaatggtgtccagcgcggacagcgatgccttctgtgtcgagtacggttgccacatcatgtgggtgtacgtcattactattaaaggtgacaaccccagcacgtttttctgggccgtaaatagatacgccttcgattgtagataactgctgcattgcatattttgcaaggtgagtctcatgctgttggatgttatccatgccaatttcatttaggaaatcaatcgcagctccaagaccaaccgcacctgcaatgattggtgtgccaccttcaaatttccaagggagatctttccatgtcgaatcatacagaccaacaaaatcgatcatttctccaccgaattcaaacgggtccatgttttcgagcagctttttcttcccgtagaggacgcctatcccagtaggtccgcacatcttatgaccagaaaatgcaaagaaatcgcagtcgagatcctgaacgtcaatgttcatatgaggggtgctttgtgctccatcgacaaccataacagcaccattttggtgtgcaatcgcagcaatttctttaatcgggttaattgttccgagtacgttcgaaacttgcataacagaaacaattttcgtgtttgctgttattgttttctcgacgtcttcaagcgcaattgttccgtctggttgaagtggaatgtatttaagtgtagcgccagttgctttcacaacttgttgccacggaataatgttgctgtgatgttccatcggtgtgatgacaacttcatcaccttctcgaagatttgcacgtccatagcttgatgcgaccatattaagcgctgtagtcgttccgcgagtaaaaatcacttcttctgtggaagaagcatgaataaattcacgaaccttttcacgtgcgccttcataagcatctgttgcatgtgttccaagcgtatgaacaccacggtgaacgtttgagttaatttccttgtagtaacgctccactgcgtcaattacttgagttggtttctgagacgttgctgcactatcaaggtaaacaagaggtttcccatttacctcttgatgtaaaatgggaaactgcttgcgaatgtcctggacattcatcatttaattaactttcccttcagtaacctctaccgcacgtttacgaacgccttcgatcggaagttcgttaatgactggagcaaggaaaccgtggatgatcaaacgttcagcttcttgacgggaaatcccgcggctttgcaagtaataaagctgaattggatcaactttaccaactgatgcagcatggcctgccataacatcatcttcgtcaataagaaggattgggtttgcatccccacgcgctttctcgttcatcatgagaacacgctgtgtttgctcaccatttgatttcttcgcaccatgttcaatcttagttacgccgttaaagatggcgctcgcactatctttttgaacaccgtgcacaagaagaacaccttcagaattttgaccatgatggaaaatctgattcgtgaagttctggctctggcttccgcgaccaatcgttacggtcttagaatcagcataagaaccatcaccaataaggtgtgttgtatttgtagaaaccgtgttgccgtcgttcatttgagcaagagcccagtcgactttaccatcacgtgccacattcgcacggcggttcacgtaagttgtcacaccttttgcaaggttatcaacagaaccaaacgtaacgcgcgcattctgtccaacatgaacttcagcaataatgtttgcaacggactccacatcgtgtccatatgataagaagttctcaacatatgtcactgagctgttgtcttccgcaacaatgatcacgtggttgaacaaaccagcttcagggtcttcttgccaatagagagcttgaattggcacttcaacttctacattacgaggaacgtacaagaaagtaccgctattaagaagagctgcgtgaacggcagttaagcggttctcatcaaccttcataacatctttcataaaatacttctcaactagatccccgtgattctgaagagctgtttgaatatctgtgaaaatcacaccttgttcttttagctcgtttgatagctgactaaaaacaggtgttgtattacggtgcacaagaagatttcctgactcttgatctttagcaacaagatcgcgcacatcttcaggaagatcatcaagtgatgaaatcgcttctccagctacatcatgtttaaatgaagtgaagttccacttatcaatctttgttttatcaggttttggcatcggaaggttctcagacttctctaatgccttcaaacgtagggcagccatccatttcggctcctgacgcttttctgaataagctttaatgtattcttgatcgaatgcaattttcgtatccactgacattgtcatcctccttactgcttacgcttcttgaccaactgtttcgtctttaattccaagttcttctttaatccaatcataaccttctgcttcaaggcgctgtgctagttctgcgccgccagattttacaatacggccttgcatcataacgtgtactttgtcaggtgtaatgtagttcaatagacgctgatagtgagtgataatcaagcaaccgaagttctcattgcgcattgcgttaacacctttagaaacaactttaagtgcatcgatatcaagaccagagtcaatctcatctaaaacagcaattttcggttcaagcatcataagctgaagaatttcgttacgtttcttctcaccaccagagaaaccttcgttcaggtaacgctgtgcgaattcttcacccatatcaagttcagccattttgccgtctaactttttgatgaatttcattagagaaatttcatcgccttcttcacgacgagcattgattgcagagcgaaggaaatcagcgtttgttacgccgcttacttcacttgggtattgcattgcaaggaagagtccagcttttgcacgctcatcaacttccatttcaagtacatcttcattatcaaggaagacactgccttcagtgatttcatatttcggatggcccataattgctgaagcgagggtagatttacctgtaccgttcggccccattactgcgtgaatttctccaccatttatttcaaggtttaatcctttgataatctcttttccctcaatggaaacatgaagattctcaatctttagagttgatgctgccatttgtgaatacctccaataacgtttatactattccttccttattgtagtacctataaggtgtatgtcaaggaatgtgtgctgagtcattctcaatctattttcattcttattttataacaaatccaaactaatatcaaggaacgcagggatcatactttatagcgttcgctacgaattcgattgctattcaaaatgagaatgaatcgttgattttttcgtttcgtactcttcctagcctaccatttaatccgtacacctacaacggaatcctcatacaaaaaaccagtcacattggactggtttttcattatatctggttattttggatgctgattcatctagatagtttacggtcgaattcactaaccattttgagactccgacggtgatccatctcacgctctttttcgacttgcatacgcttgttgaaattttggctatattctgcataacctactccgtgagactggtacatcgccttttccatttcaggtgtgtggtttaaccgcatggggctaataatgaatcaatcctttcaatatcgttttacttacaagtgatactttaccacgttacattaacagtccacaaacagcatattaagggatgagagcgagtgaaagaggatgaaccttgttctgaatagttaaaaaacatcggttcttatcttttcttccaaatccaccctcattcaaaagttgtaaagaaacagtttatataggaagaaacttaacttatttagtgcttcggttgatccaaatcttttatgcattcttgcacgagtgtaacggcctgactcatggcagcaccaccgccaaaagctgcagtaacccctaccgtttcaagaatttcttgctcggagcatccttgatctaggcaccctttcgtatgataaataatacaatattcatcttgagaaaaaatcgaaatgccaagcgcaatcatctgcttctctttctggctcacttccccctctttaaagcatgcttctgtaaaagcggaatactttttagcaagctggggcatcttctcggtaaatgttcctaatccttctttataatcatgtaacgctgcttctgtgaaattgttaaattcctgttcctgtttcaaaacacaggcctccttttatctttattgtccatactagtatgagaagcggttaaccatgctatccattcttttctatagaaatgttttttgtatcacttacatgtgatgtatgtcacactaataacgatagggatgcgttatgatgcttatgaagacaatatctactagcagaggtgaagatgatgtacgaaggaaaaacaacacgcgttgcattaattggaacaggatttgtcgggacaagctacgccttctcgttattgaatcaagaactagtaaatgaacttgtattaattgatgtaaacaaagaaaaagcagaaggagaagcacgtgatttaaatcacggtctaccttttggcgctcctatgaaaatttgggccggcgactaccaggactgtaaaacggctgatatcgtcgtgatcgctgcaggtgcgaatcaggcgcccggcgaaacacgcttagaccttatagataaaaatacagccatttttaaaacgatcgtatcaagcgttatggagagtgaatttgatgggatttttatcgtcgcaacaaatccagtagacgtacttacttacgcaacatggaagttctccggcttaccgaaagaacgcgtaatcggctcaggtacaattcttgatacagctcgattccgttatttactaagtgactattttaatgtcgattctagaaatgtacatggatatattctcggtgaacacggcgataccgaacttccagtttggagtcatgcaactattggtagtcgtcccatcatgtcacttattaaagataaaccagaggcgaaagaagacctcgaggaactctttgtcaatgtgcgcgatgccgcttatcatattattaatcgtaagggagcgacgtactacggcattgcaatggggctcgtaaggttaacgcgagcgattattcgaaatgaaaactcaatccttactgtttctacgctacttgaaggtgagtatggtttagatgatttgtatatcggcgtacctgcgattgtgaacaacaacggtatacgtgaaattattgaacttgatcttgatcaaactgagctagatcaattgcaccactctgccaaaacgttaaaagaagcaatgaagccagtattccagcattaaaaaaaaagttctccgtcaaatgacggagaaccttttttcttattcgtctactggtacgacagcaccatcatattcttcttcaataaagctctgaatttcatcagaatgtagaacctcaactaatgcttgaatcgcttcgttatcttcatcacctttatttacagtaatcacgttcacgtaaggtgagtcggaatcttcaagagcaatcgcatcttcttgagggtttagacccgcatcgatcgcatagtttgtgttgatcataaccgcatcgccttcaccttgctgatagatctgcggaagaagtgaagcttctacgtctgtcttgaattcaatgttcttagggttttctgcaatatcttctactgttgcatcagaagccttcacgccttcttttagtgtgataagtccttgtgcttcaagtaaagaaagcatacgtccatggtcagaaacagagttactcataatgatctgagcaccatctggaagctcatctaagctcttgtaatcttgtgaataaacaccgattggctcaatgtgaatgcctccagcgttaacgaaatcataattatcgttttcttccatttgcaactccatataaggaattgtttggaagtagtttgcatctaattcaccattcgctagcgtcttattcggtagaatataatcctggaacgttttaacttctagctccacgcctttttcttcaagcatcggttttgcctcttcaagaatttcagcatgtggaatgtttgaagcacctactacgattttctttgaatcttcgccttctccagacccttcactgtttccaccattgttgccacaagctgcaagtactgcaagagtaagtattgcaaatagggataaaaatttcttcatgttattctctccttttccttatcgtttatctataactcgcgttgctaaatctccagcaatctgaagaatcgcaacaataaccaaaattaatacggtcgcaacaagcgtcacgtcaggattgtttctttggaagccttcaagataagcgaggttcccaagtccacctgccccaaccacaccagccattgcggtgtagcttacaagtgcaatcgccgttacggtaatacctgaaatgagtgctggcattgcttcaggaaggagaactttaaaaatgatctctccgtttgatgcccccattgactgagaagcttcaatcactcctttatccacttcacgaagagcaatttcaaccattcgcgcataaaatggtgccgcacctgcaataagtgctggaagagctgcattcgctccaagcatcgttccaataatgtaaacagaaagcggaatgagtagaatgattaaaatgataaacgggatcgagcggaataagtttacgattccagcaataatgctatttacaaacttgttctcccatatgtttccccttccggttagaaataacagtagtccaagaagaataccgagaataaacgttgctagcacggaaattgccgtcatgtatgctgtttgaatagtagcttcccacatcgattcccagttcacattaggaaatagtgattcaatcattcgtaatcacctccgcttctacaccttgctcacgaacatacttcagtgcactttcaacgacagtcggttcacctttaagaaagacagatagtttaccataaggaccatcttgcgtatgagagattttcccttgaataatgtttacttcaatgtcaaactgacgaatcaactcggttacaagtggtgaccctgttttccctttgaggaacgtaaactggacgagttccccctcctggcttgctgctagatgtgcaatcgattccttcatttcttcaggctcacttaactgattcacgaaatcttttgttatttcttcttgcggatgatgaaagacttcaagtactgaaccgttctcaactactctaccgttctccatcactgccactcggtgacaaatttttcgaataacgtgcatttcatgggtaatcaagacaatagttaaaccaagtttctggttaatttctgtcagaagttcgagaatgctatccgttgttttaggatctagagcagatgttgcttcatcacaaagcaataccttagggttattcgcaagcgctcgcgcaattccaacccgctgcttttgtcccccacttagctgtgatggataagcggcttctcgtccttcaagtccaacaagcttgattaactcatcgacacgcttcattcgtttctctttggaaacacctgatatttcgagtggaaacgcgatgttgtcacgtaccgtccttgaccaaagaatattaaagtgctggaagatcattccgatttcctgtcttgccgcacgtagatcttttcctttaagagaggataaattatttcctgccaccgtgaccgtaccgtccgtcggtctctcaagcaggttgagcatccgaattagcgtacttttaccggcaccgctgtatccaataacaccgaatatttccccttttttcactgaaaggttaacatccttaacggcctctacctttccagacttcgaaaagaaggttttattaatgcctttaagctcaatcacatgtctcacatcctttatgcatttgcatgttgtaccagcttcctgaaaaaggactttagtcccatgcttttattctttacctttaagcacttaaaaaaatgatttaaaaaatgccctcctactttgagtagaaaggcatgtaatcaatcaatgtcttcctctcatttctcaaagcaatcgctttgcaggaattggcaccttttcaaacgagtcgtttgacggttgccgggcttcatagggccagtccctccacctctctgaataagagattataaaattaaaattactttactgtggttaagtgctaaattgaattctagcatggtactttatgagtgtcaattactgagcaaaaagtcacaataatcaaacatatccactatgattagccaagagaaaaccatcagctgattcgcctgatggtttttgctcgctgagaaagttgtttgtagagagataatttctcaagatcagcatttcctccacttacaacagcgccaattttgctaccttccaaccggtttgatttgcacaaggcagcagcgacagatgccgcaccggcgccttcaacaagtgttttatgtctttcaagcataaagacaattgcagcggcaatttcttcttcagaaacagtcatcatatcgtcaacgagttcttcgataatcggatacgttcgttttcccgcttcctttacagaaatgccatccgcaattgattttactgattgaagaacgtgaggaccagtacctttaaatcgattccatgtcgcagatgcttccgaagcctggactccaataattttgacgtgaggaaagaacgactttattgccagcgccatcccagctaataatcctccacctccaacgggaacaagaatcgtatctaagtcaggacattgttgcatcatttcaagtgcaaccgttccttgtcctgccataacaacagggtcgtcaaacgcatgaacaaatgttgcccctttttcaacacgctctcgatctgctccattaaacgcttcgttataggattcgccttcaaggacaacctctgctccataagatcgcgtcgcttcaattttacttgttggcgtatgaatcggcatatagatcttcgccttgatgcctcgctctttagcagagagcgctacgccctgagcatgattacctgctgaagcggcaacaattcctcgagcggcttcaatatccgttagtgaagcaaccttgttgtaagcaccacgcagtttaaaggagcccgttcgctggaggttctccatcttcaaaaagacatctttatttgtaaatccattaagcgttgtggattgctgaagtggggtacggtgaaccgcctccagcaaattctccattgcttctacgacatgaacgttatatttctcctggtaattcccaacgtcattcactctcctacaagttgtttttcttcatacaatttaatcttatcttcgagggacaacgtacgagatacttcatcccatccatttaacagcatttctttccaataaggatcaatattgaaagatgcatgaatgctttctccatcacgaacttcctgtccacgcaggtcaacttgaagttcatatccgtcttttgccttttgaaaaagctcagcgataacttcttgatcaagcgcaatcggaaggataccattttttacgcagttgttataaaaaatatcagcaaaacttgtcgctatgatgacacgaaagccataatcaagcagagcccatggtgcgtgttctcttgaagatccacacccaaagttttttccagctacgagaatagaggcatgctggtattgcgcttcgtttaagctaaaatcttcacgaggctttccatcattatcaaagcgccagttatagaaaagaaattgaccgaagccttttcgctcaatccttttcaaaaactgctttgggataatttgatcggtatcaacgttcacttgctcaaggggataaacaatccctttgtattcattaatcggttccagggcgtctcactcctttttacatcacaagtggttttatttttctagcatcagtaaatcgtccttcaatagcagctgctgcagccattgctgggcttacaaggtgtgttctggaaccattcccctggcgtccttcaaaattgcgattagacgtagacgcacagcgctctcccggaggaacaatatcatcattcatcgcgagacacatgctgcaacctgcttctcgccactcaaatccagcttcttgaaacacctgatctagcccttccgcttcagctgcgtccttgaccgatttagagccaggtacgactaacgctgtaacattttcatgtacttttcgaccacgaacaatttcagccgcagctcgcaaatcacttaatcgtgaattcgtacacgatccgataaagacatattgaatcgcaatgttttgaatctgggtacccggtttaagatccatataagcaagggcctgtttgattgctttttggtcacctggatctttgtaatcttcagggaaaggtacccgagcatagacagaagagcccatcgaaggattcgttccccacgtcacttgtggttcaatttcttcagcgccaatttccagcacttcatcataagttgcacctggatcagttgcaagctctttccactcagcgactgcttcattgaacgcttcgtttgctggaacatgtctcttcccttttaaataggaaaaagtcgtttcatcaggactaataagtcccgcttttgcaccagcttcaatggacatattacaaacggtcatccgctcttccattgacatgtttcgaatcgcttcacccgtatactcaacaactgctcctgttcctgcattcacaccaaacttggcaataacggcaagaattaagtctttagccgttactccagcaccaagacggccgtttacgcgtatttcaatggttttcggacgcgattgccagagcgtttgtgttgaaagaacatgctctacttcgctcgttccgatcccaaaggctagagcaccaaacgcgccatgtgttgaagtatggctatctccacaaacaatggtttttcctggctgagttaagccaagctcaggaccgatgacatgcactattccctgatcagggtgattaatatctgcaatttccacaccgaactcgttgcaattctcttctagcttctccatttgcactttggataccgggtcattaataatatgacgtgcaatcgtaggcacgttatggtccatcgtcgcaaaggttaaatccggtcttctgacacgtctattgttcatccgcagaccttcaaaggcctgcggagaagtgacttcatgaacaagatgtaaatcaatatacaggagatccgggctaccttcttcttcatgcacaacgtgtttatcccaaatcttctcaataattgttttcggctccacacccatcccccttttacctatttgccattaagcgtatgcttccatgatgcctgccgtagcacccgcttcttctaattgataaatcactttcttcaccatcgcgtctgttccaagtgccttcgttccactacttgctaaatcactcgtataatagcctgcatcaagtacttccttcacggccttttcgatggcatccgcttcttcagtcatatcgaatgaatacttcagcatcatcgctcccgataacatcatcgcaagtggattcgcaatgttcttcccagcaatatccggtgctgaaccgtgaacgggctcatacatgccaaatccatcactgcgaagacttgcggatggtagcataccaagtgatcctgtaatcatggatgcttcatcgcttaaaatatcgccaaatagattttctgttacaatcacatcaaaatgagctgggttttgaaccatcttcattgctgccgcatcgaccagcatatgttccacttcaacatccggataagcgagtgctttttcttctacaacttctctccacattcggcttgattctagaacgttcgctttatcgacgcttgttagcttcttatttcgcttccgtgctgcctcgaacccctgatcaacaattcgctcaatttcatcccttgtataatgaagggtatcgaccacttctttcccattgttacgacgctcgcttggtgtaccaaaatacaatccacctgttaattcacgaacaatcaacatatccacgcccttgattcgatcgggtttaagaggagaagcatcgattaaactgtcaaatgctgttacaggacgaaggtttgcaaacaagcctagctctttacgaattccaagaagacctcgttcaggacgaagatgaccgggaaggttttcccacttaggcccaccgactgcaccaagaagaacagcatcactctttttacagatgcttaacgtttcttcgggtaaaggcataccttcttgatcaatggccgcccctccgattcttgcaaagtgaaattcaaacgtatggccaaatcgatctgccacggcattcagaactttcatcgttccttccattacttctttgccaatgccatcacctggtaataccgcaacttttctcttcatccttctaacctccctgttagacgtgcgcttgttttttaacttgatagctttctcgagccagaacgcgattcactgcgtttaagtaagcaattgctgaggactccaaaacatcttgagcagtgcctcgaccattcgattcaattccgttatacataacacgaacatgaacttcagcaagagcatctctgccaccgccaaccgaattaatacgataatcttgaagttgaagcgtccctgggatcatttcttcaagcgtgttgtaaatggcttccacactacctgaacccgttccagcttgctgaatcatcgttccatcaggcttctcgattgaaattgtggccgtcgggatatttgctgtcccatattgcacttgaatactatgaatctcatatttatcaacaaattcatctgtttgaatatccgttaatagtgcgaacagatcatcttctgttacttgctttttcttgtcagccaagtctttaaaatcagcaaatgcttcattaatctttgcttcatctaattcaaaaccaagttctttcactttatctctgaatgcatgtcgaccagaatgttttccaagaacgaggctgttggactgtactccgatcagctgtggactaataatttcataggttgttttctcttttaatacaccatcctggtgaataccagattcatgagcaaatgcgttggcgccaacaaccgctttattgcctggcactgccatgccagtaagtttgctgacaagattgcttgtgcgcttaatttcatctagttttaagctggtttctgccttgtaaaagtcattccggattcgaagtgcaacagctacttcctcaatggcggcattacctgcccgctctccaataccattaatcgttccttcaatttgagttgctccacattcaattgcagctaaggaatttgctaccgccatgccaaggtcgttatggcaatgagccgataaatcaacgccttcaatgttcggaacattgtttcgcaaatacgtgaaaagctccccatattcctgtggacttctatatccgaccgtgtctgggatattaatgacagatgcaccagcatcgataacttctttaataattctagctagaaaagttcgatcagatcgacaagcatcttcagccgaccactgcactttcggaaagaatttcttcgcgtatttcactgcaccaacagccgtttctacgacttcttctggcgtcttcttaagcttatgagtcatatggataggggaagtggctagaaaaacatgaagtcttgggtcggcaccgcctttaagggcttcccaagctgcatcaatgtctttcatgtttgctcttgcaagacctgtaacagaaacatttcttacggtttcagcaatatttttcacaccttgaaagtcacctttggaagcagcaggaaagcctgcttccatgatgtctaccccaagacgctcaagttgctttgcgatttccagtttttctaatgcattcagattgactccggctgactgttctccgtcacgaagcgttgtatcgaatacattaatcttttgcactggtaaccacttccttctttgattttggtttcacaaatggcatcatcgcacgaagctcttttcctacttgttcgattggatgaatcttctctttctcattgatcgcgtggaattctggacggtttagtttattttctaggatccagcccttcgcgaatttacccgtctggatatcttcaaggatatctttcatgcgtgcttttgtatcagcatcaacgacacgcggacctgatacaaagtcaccccactgagctgtgtcagagatggaataacgcattcctgcaataccatcttcatacatcaaatcaacaatgagctttagttcgtgtaaacattcaaagtacgccacttccggttgatagccagcttctgtcaatgtttcgaatccagctttcacgagtgaagacaatccaccgcaaagaacggcctgttcaccgaagagatctgtttcggtttcttctttaaaggatgtttcaagaacacctgcacgagcaccgccaattccttttgcgtaagcaagggctagttcttttgcgtcaccagatacgtcctgatatacaccgaatagagctggaacgcctgcaccatcttcaaatgttcttcttacaaggtgtcctggccctttaggagcaacaaggaaaacatctacatcggaaggaggaacaacctggttgaaatgaacgttaaagccatgagcaaaaacaagtgcattaccagcacggagacccggctcgatttcctctttgtacacttccggctgatactcatccggaagaagaatcatgattacatcggcttcatcacttgcgtcttttactgtttttactgcaaagccatcttcttctgcttgattccaggagcgtccttttcttaacccaaccgttacatcaaatccgctttcacgaagatttaaagcatgagcgtgaccttgagatccataaccgattaccgcgatttttttcccttttagcgtgccctcgttgatatcaccgttataatatacttttgccattttcattcatcccttcataattaggtttatttttttaatttaagatggaatactgcttcaaatctgttacagatttttgacttcctcgagggaaagccgtgattcctgttcgaaccatttcctttatgccatatggcctgagaagatctaagattgcttcaatcttatcggaattacctgttacctgaaccgtgatgctttcacggcttacatcaataattgaagcccgaaacggttcaattattcctgaaatttcacttcttatttgagcattactaatgaccttaattaaggctaactcccggaccacaatggcctggtccgttatatcagttactttcaacacatcgatttgcttattgagttgcttgatgagctgctcaattttggcattgtcatcgacattaacgacaaaggtcattttcgaaactccctctttttcggtatgaccaaccgtgatgctttcaatgttaaattgccgctttgtcatgaggcctgtgatgcgatttagcaccccactttggttaatgaccgttgcggttacgattcgtttcatggtttcaccccaatcatctgatgaagccctttaccaggggcaatcattggatatacattttcctttccactcacgcgacaatcgattaagactggctcgcggtgagaaaaagcttcttcaaaaacagctttcgcttcttcttcattcgtaactttaaatgatttaattccatacgcctcacctaactttacaaaatcaggctgtacagggattagtgactgggaatagcgttcctcgtagaaagcttcctgccactgtctcaccattccaagcgtctggttattcataatgacgacttttaccggaagatttagttcttgaagtgtggaaagctcctgtaacgtcatttggaatccaccatcacctgttagtgaaacaactgtttgttccggaaaagcaagctgggctcctatagcagaagggaaaccaaatcccattgtgccaagtcctccagatgttacccatcgatttgcatccgcaaatgcataatattgggctgcccacatctgatgctgaccgacatcggtcgtaataatcgcatcacccttcgtatattcgtgtacgagctctacgacgcgctgtgggagaaattcagtagttgacactttcttccaaagcggaaaatcttcactattttgtgttagcttcttacgccattcttctgtatcaggaagtggtgattcaatctctagaagcttcttcaacgcctctctagcatcagatacaattggtatttgtgttgaaacgtttttcccgatttcggcaggatcaacgtcgatatgagccacggttgcatggatagcaaaatgatcaaggttgccggttaatcgatcatcaaaccgtgccccaatactaattaacaagtcacattcataaagagccatgttcgctgtgtacgttccgtgcatgccccccatccccaggaatagtggatgattgccaggataacttccaaggccaagcaatgtattaatcaccggaatgcgatgtttctcagaaaaagcgacgagttcttttcccgcattcgcatggaggacaccagctccggctaagatcaccggtttttttgctgcaccaacagcatctgctagtttcttaatttgcaaaatgttaggcgaaaaggttggctggtaacctggtaaatggacagtagaatcatagttgggtgaaatggttttgttcgccacatctttagggatatcaacgagaacgggaccgggacgccccgttgttgcaatatggaacgcttctttaataattctcggtaggtcctgaacatcacgcacctggtaattatgtttggtgattggtgcagtaatccccataatatccgcttcttgaaaagcatcggttccgattaccgtactggccacctgccctgtgaagatcacaagtggcagcgaatccatcattgcatccgtaattcctgttacgagatttgtcgcacccggtcctgaagtggcaatgacaacgcccggctttccactcactcttgcgtagccttcagccgcatgaattgagccctgttcatgcttcgaaagaatgtgcttaatcggtgatcgatataatgcatcataaattggaagtactgctcctcctggatacccgaagagaacttcaacattttctttttttaaagaatgaatcaatacatctgccccggtcatttccgctgttaccgcttcggcttctggttttgccttcgcccgcatattcataccctccaatgcttatttgcccgcttccgtcttaacagtgaagcgttactaacttttaataaaaaaaagccttctcatccctacgccgctttttacggtccataggggcgaaaagacttcacggtaccaccctacttttacgacaataaactgccgccttatgagcaaattgctcgttttgataacaagtgtttaaagaacacttggttgatcctatattactaagttcagatcaacactcggaggggatgtcgatacagggggtaataccggcttccaccactaccggctctctggttattaccaattcctgtttcttttgcctcgtcatcgattataaatatttatttttttaccctgcctgcacatcacgttttgaaggataaacagtgacaccatccactgtgacaatatctctgaacgcttcaagaaggttatttgtcgttttacctggcttcccttctccaatctcacgaccgtctactttcacaacggcaatgacttcagcagcagttccagttaaaaagacttcatctgcaacataaacgtcgtgacgcgtaaacgtttcttcgcgcatgtcataccctttttgtctcgcgagttccataatggcatttcgcgtaatgccttctagtgcaccgacatagccaggcggtgttttaatgacgttacctttcacgataaatatattatcagccgaaccttcagcgacgtatccctgatcatttaacatcagtgcttcactgacaccggctaaattggcttcaattttgacaagaatattatttaagtagttcaacgattttaccttgggacttaatacatccgagcggttccgtctgcttgctaccgtgacaatttcaattcctgtttcatataatcgcttagggaacaaggccagtgattctgcaataacgatcacttgtggttccttacatgtgaatggatcgagtcctagattccctacaccgcgagatacaacgatgcgaatataggcatcctgaaggttgttttttttcagcgtttgcacaataatgtcagtcatttcctccatcgtgtgcgttatttttagcataattgaatgagctgaatcatagaggcgctgtagatgatgttctaacctgaagacattcccatcatacatgcgaattccttcgaacaccccatcgccatagaggaaaccatgatcgtataccgatactttggcatcttcttttttcacaaattctccgttaaggtagatccactgttcactcaccttgttcactcctttctatgtgttaagtagacgcagtaaagcgttagtgtctaatgataggaccaatcattttcaaggtacctgttgtcgtttttgtttgatttattagaatactttgtttgtttaattgaggattatattacgccggtttggacgtaaggtcaacacctaaaagctaagttttttgataattatgatatatcagtttatttgtaaacgcttacaatcctatcgtgcgtgagatttggtcacacgaaattttttattgtaaaattaataaaagcgcttacattgaatcattcacttaactaagcattacgttggtgaatttcatacctttctcaataaagtgaaagagttccctttacaactgctaattgtcagctcatatctagctgaccacgatagacagctacctttgcataattatttaacccctcttgtttttctacttaaaccattgcacttgaatcatgccgagcataaattgatcgattttatattgcctccattgaaaatatgagctttgttccaactctatcaactatcgattttttctttctatagaaaacctacgaattttgttcatttatgcagaagcatatttatcaaatttcattattaaagttgcatacttactagcgtacgttattgttaaagatgtttatgaacatttacagttgtcgtgtaatcggcaactgtaacttaaacaaaagatagtaaacatacaaaaagccctcttctgaatgagaaaagggctttccactaatattccttatacgctagcttcgacttttgcttttgcgatcgcttgatctaaatcatcaattaaatcatcaatatgttcaattccgacagagagtcgaatcagatcgtctcgtacaccagatgctacaagttcatcggcacttagctgctgatgagtggtgcttgctggatggataattaagcttttcgcatcaccaacatttgcaacatgagaccagagatcaacggcattgataatgcctgcacctgtttcacgacctcccttaataccgaatacaacaacagccccggcgccttttggaagatatttgtgaacaagttgatgtgatggatgatccgcttcctcaggatagctaacccattcaacggccggattttctttaagataagagactagctttcgcgtgttagcgatatgctctttcatgcgaacgtgcagcgtttcaacaccaagagcaatttgaaaagcgttaaatggactaagcgcagcacccgtatctcttagcagctgcactcttgcttttacaatgtacgcagcttctgggagtgcttcagcaaaaatgatcccatgatacgtatgatctggctcagtgaacccaggaaatttagaggagttccaatcgaactttcctccatcaacgatgatgcctcccaaagttgatccgtttccaccaagccattttgtagcagagtgaacgacgatatctgctccgtgttcaattggtcgacatagataaggcgttgcaaacgtattgtcgatgatcagtggtatacccgcttcatgtgcaatttcagcaactttctcaatatctaatacgtgaagacctggattgccaattgtttcagcaaaaatggcttttgtgtttggtgtaatggcagctctgaaagattccaaattttccgggtctacaaagttggttttgattccgtattttggaagcgttgcagaaaagagattgtacgttccaccgtataaagtcgaagctgaaacaatttcatctccgctatttgcaacatttaatatcgctgtggtaattgctgccataccacttgctagtgcaagagctccaacgccaccttcaagctgagcaattcgttcttcaagtgctccaacagttggatttccaatccttgaatagataaacccttcttcttttaatgcaaataaatcagcggcatggtcagtattgttaaattgataagcattggattgatagattggtagtgctctagctcccgttgcagaatcagcttgtaaccctccatgaatgccaatcgtctctaaatgatattttttatctgccatttcacttcactccttcgattttgtttatcattgtaatttgttcttttataagtggtccccatttatcaaactcaacgagaaacccatcatgaccaaattttgtatcgacaagataaaactgagaggatgaaccttgttgaaaaagcttttctaattcatctggtgggtaaatcagatcccctttgaacccaattgctaggatgtttgctttgaatcttttgtttactaaggtaagattgcctctttcaatgccaatatcgtggttatccatcgcctttaacaaatataagtagctgtttgcatcaaagcggcttacaagtttattgccttgataatgaagataggattcgacatcgtattgtggttctttatggctagctgaagcccctttaacgccacgaccgaattttttttggaacatttcatccgttcgataggagatcatcccaatcattcttgcggttgctagcccagatgttggagcttgatcactactgtagtaaccatccctccagttcggatcattcgtaatcgcaaatcgagaaatggcattataagcaattccataggcatttagggttggtgtgacggcaagtgggataagatgatccatccaatctggatagaggaggccccattcaagtacctgcatccctccaagagatccaccaatgacagcatggagatggtggataccaagttcctcaagtgcttttttctgggaatgtaccatgtctcttacagaaacaaacggaaaatcggcttggtaacgcttttgcgtatctgggttgatcgattgtggtcctgtcgagccattacatcctccgaggatattgaatgtaataacttgaaaatcagaagtatcgatataagcatcttccccgattaatcctttccaccatcctgcttccttatgaccgactgtatactgatttcccgttaaagcatgacagacaagaactaccggcgctcccctaggacccacacgttcataggcaagttcgacgtcatgaagttcattgccagattcgagcattaacgaaccaatcgataccgtctgatcttcgtatatcgtctctctatccaaacccctatcactcctttcaaacaaatgctgcttgtttttacttaaaataaaaagcctctctgaaagacagagaggcttgatttattcatcagctccgcttatctttcaggatttctcctgcaggatttggcaccttttcaaaccagaattggtttgacggttgccgggcttcatagggccagtccctccgcctctctagataagtaagaatatttcgtttttaattaattgtgtttattttagcaaggtggcgcattagtgtcaaacattttcgggaatttttattcttttgaaccaaaggataagacagtctatgaccagaattgtttcgttagaatgaactttttgataaggtaacgatagaccatttaaaagaggtgaacaactatggaagcacccttctttgcattagaggatatgaatagtggcgacgtcattcgtctttctgactttgttggaaaaccagtgatgattacattctggacatcctggtgtcctgactgtatgaaagatatgccgatgaaagaacaattttatcaccatgctgatcttgaaaagctggccttcttaaccataaatgtaacaggacgagaacgatcagaggaagccgggagagaatttacgataaaaaacgaccttccttttcctgtattacgtgacaatggtcgagagacgtatgatgattacgggtgcactggagttcctacaacggttctactcgataaagatcatcaaattgttaacgtttttaatgatcaatcttctttcctcgatattgcgaaatcacttccatcaatcatgaagtaaaaacgcatagaaaaaagccagaggaattcctctggcttaaataatggatataaaatgaataatagcatgatgcttcactaatcttttttcttttcttcagacttgcctttattgtctttgggatcttctttctttggagctttttcgctcttcttttcttctttgtcttgcgctttttcgtttttcttctcagacttttcttgcgccttctcgcttttcttttcagctttttcgtgtgctttatctgctttactattttgtttttcaacctgctttttttctttctcttgttctttttctattttagtttccgtttttttttccgctttttcttgtttatctttttctttttgatcttctttgtcatctttttgaggctgcgtcccactagatgaattgtttttctttgattcattggaattaacgtttttatttgtttgattgtcttttgtttcaggaacagacttttgttcggattgtttgaggataagttctccgttttcatcatcttgatcaggtacttttttgtcgtttaattggacaacagaatcttcaatcggtgttggtgtatctttcactttggattcatcaggctcttccgattccttcgcctcaacagcggtcatactttcggattgcatttcatccatttttttcacagatagattacgtacttcgtccattgacaaagaagctcctcgatcaatggctgcgaggtatgtcatatatttcccttgagatacaccatgttctattgctttttcacgcgtactgtaatcagcatcaagaatggttgtaatggcaaccgcttgattaacaagtgcgttattctgttctatacctcggataacggcttctaaatctccgctaatccctttactttcttttgcttcaacgttcgaagcgacaatgagtaatttccgatcttcttctagatagccttctttatcgagtttcgagacaagtagtcctccaaattcgctaagtggcatattcattgtatcccgttctaagttcaacccttcaccgtctgaattccatgcttgatattgaacaacttcaagatcagaattaactccaacctcaatacttggattgatatcaaagcttacataggctgcaactacatcattctgtctaacaggaataacgcctgttacgatgacgactaacaatagaattgctgccataccggccagggtgggcatagagggggtaaaataaccttttttcttatttagtggttttggtgcaagtttaatttcagagccgattgttaacgcatgatttcgcttcagatggatcgttgaaaattctccatcaggagttagtacaactgcctttcttccgcgaatgtccataatgaccccttttttcatcccctggccccctttatccaactactgtatataagatttcagagcattaaatccacccaaatgaattaatgcaactgctattatatactttcgattacgttcaatcgttttgcgactgcatgtaacgagcgccagcaaatcttttatagggagctgctttttctctaataaatatcctgaaagaacgtgatcatccgcgatcaattttgcaatcatcttggcattttctcttgcatcaatatgtttcggacagtttttgctaagaaccttaaacgtaatgctaaatttcttaagcaactgctcatattcctcaatttcaaacattcgtacttcacgttgtttatcaatctcatatacatcaagagcagctttttgttctgcaaagctatcttctaaccgaccttcctcatcaagttcttcaggttcaaggtaaatatacttattttgtcgtgcttcttttcgaatataatcgatcactcttcttctaatcaccatatcagcaaatgttaagaatctgcttccctggcctttacgatactgatccatagcttcattaaaagccgatagccctatactgaattcatccatcgaatgatttatatagcgattgcacactttagacgtgattttcttaataaaaggttgatagtcttctaaaagctgattgcgtaacgcctgatttccattctgtatacgatcaactttatcttctaaagtaatagtctcttcttttttgttttcatttttattagcgaaatttcccattgcgctgattgaaatggttgtcatgttatacacctctcatattgcagtcaatctcaaatagaccgcttttcgggttgaattcttagatgtttttaagttttggaaattctataatagtttagaaaatgaaatgtgccaccatccgtatgaaacagtggaatggtgactctattcagttataccactcaatcagcatcaacgaaaatacaattttatgacaatgttactgtttctttacttcctgttatattatcttatcattattaatcttgcttaattttcagcaaattaaacattcattttttcctttgtagacagggtttttcgcaacttaaaaaaacgagtgaatggtcaaaattaatcaaacgaatttactttgattaagaaatttatcgatcgttaccacggattcaaatgcaaaaagggtccgattttcatcatatccaccaataactgttaatgcaggaacactttgtattccaagcacttctgcaacccaaggaaaataattcaagttgcacatatatacaactgcgttcatctcttttgcttctgtaacaatatgtaacattcgctctgctattttacatgtctgacaaaagggagtgtagaagaatatgatgctaccttccttttgtaaaagctcttttatagaaacttcgtcagtaatctcttgcatttagtatgcctcaattcctttaagagcagaaaggaagctacttaaagcttcccttcgttgacctttttcttacattatacagttaatactttaaacttagctgctcttaaaattcttgttaaataatttagcggtgtctctgctacctcacgatgaagcattgtgatataaagatgttctgcgtggggaatttcctgcgttaactgccgccttaatttctcacctgcatcatctgcatcaactagaacaaacacatctttctcttcaagttcttcacttaattcctcaagtcgctcaaagctaattgttccgtatgtgcaaataatatgaacaggttcatccaacactctcattagctgttgtttatcagtttttccttcgacaataattactttatcattcatggcacaacgctccatttcaagctgtcgtatcaatgcattgctatagcatatggtggttggaagcaaatcgtttcactttacaattagattagctaacaagacatgattacacaacagctactgagccaggtaaccgtctattactccgtttctttatccggatctttttcttctaaatacgtttctgaagtcgaattaccgtgttctctttgaagatcatcaactgtacgaagacgatcatcttctctattacctgaagtctcaaaagtagcttcatcatctggacggctatcttctttcgcctcttctaagttatcctgtgcttctttcgtacgaattgcataaggaatggcttcaaggcgttccttatcaatctcttctccagtatccacacaaatgccatagtttccttcacgaatacgatcaagtgctgtattaattaaactcaatcgttctcttgctgcatcttccaaagtaatatccttctcacgttgatccaactcagaagccatatcagcaaaatgattatcgtacgatgttaattctccagtttcatcggataatgcggcattttcatcacgatgactagcaccactatctagaagctctttctttaaatcaagtaactgttttttaaattgctgtaattcttccttcgacaaagccattatcattacctccataggtcattttcttttccaatacctattttcccttaaccaccgtgcagttaaaccatgcaattatgttttatcatgctcaactcgtggaaataaatcaatatgattaaagaatggagtggtaaaaatggctaaattaaaacttggagaccaggcaccctctttttcactaattaatacagaaggtgagctgttccaatttgagcagcaccaacaagaagatacccgctggcatatgctcgtcttttttagaggtgaatggtgtcctgtctgtaacgaacagctagaagaactacaagaacatttgggtgcatttcaaaaattagacgtacaccctatcgcgattgcgaaagacgaattagaatcacttcgaaaaatgaaagaaaaacacggccttgagttccctgttctaagtgacaacgaaaatgcagcaattgactcttacggtgttatgatgcatcgcgaagatgacccttacgaagatcatggtgagcatggcgaaccagccattttcctaatcgacgagaacggtaaacttatggcacagtttctccagtccagtccattcggacgcccgtcaccagatgggttaattacgacaataaaatatattcgtaaaaacaaagcataaaaaaaccggccaatttggccggttttttatgtggcattaagcttgtcggggataaacaggcgcattcgcttttcttgtccagctactgcacctatcccctcgaggtcttaagtcaatcctaattgtgaccaaaaccgccacatttaggctcgccttaagcttgtcggggataaacaggcacattcacttttcttactaacaccagccgaggtcgcagtcttcgacatactttgccttttgctctaagacttgttcatagtggtaaattttatcttgatcaaattcgtaaccgtctgataattcgtagcgattgccctgatcagagaataaaatacggccgattttttctttgttcagatataaattcatcgctttttgatcaaatttaccatgaatcttgttcgtgacatcaattcttaccataggacgagaagtattaatcatttggatcatctcctctatatcgtttctctccataaagcctctatgtgactaacagatgactaaaacaaaaaagaaccactaattagagtgtatgatgaaccgttccatctcatcattcatttttgaacggatgatgccacaaaccattaagtttattattcgtcttcacttaccattttttcgtaagcttctgcagtcataagctcttcaatttgagaaggctcagaaggttctacaacaaccatccatgctttttcatatggagaatcattaacaaattcagggctgtcttctaaatcttcattgacagaaagaactttgcctgagattggggcatacagctcggataccgtctttacagactcaacgctaccaaacggctcgtcagattcgattgtgtcgccttcttctggaagttcaacaaatacgatgtctccaagttctgattgtgcgaaatctgtaataccgattcggatgtttccgtcttcttgtacttgcacccattcatgttcttctgagtagcgaaaatcttttggtaagttcattggtaattcctccctgaaataattcctcttaattaaggtcaattatattaattacaataactatcgtataatagttattattaattaagcaactattttatcgtttccacatttcctcaaaaacatcttctttaaatccgactgtcacattctgtccatctgttactaatgggcgcttaattaacatcccatcagatgaaaggatatcgagcaattcatcttgagaagatgagacaactttatcttttaaaccaagctctcgatacttctgaccacttgtgttaaagaatttcttgattggtaatccactctgatcaaccatagtagctaattcttctttagacggcggattttctacgatatgaatttcatttacttttacatcgttttgctcaaaccactttttggctttacgacatgtcccgcatttaggataggcataaaatgtaatgggcaaatctgttcctccttaaaggcatcatgtgattctatggatagtttaccacatgacaggatgaggacaaatacagacgcttctctaaaagtagctttcggcatgaaaaagtaaaatcctttaataaatccactctttatatttcctaataaggagaaaaaaatccccccattgttggagggataaaaagagagtttggtttggaagtgattttaaatctttgaattacataaccttagacaattaaacagtaaagcgttgttgctcaagaacggtagcagcaatttcgcgtttcttggcaattacgttaattggcgtgtagcgggaaagtttacgaagtgcagaaatcatcattcttagagaatcgccagtttcaacagcaaccaatgtttctttcgcatgtgcctcaatgcgattgaatgcttcctgacagaaaacttgtgtaagaagaagcttttggttctgcttttctgcactcgttttgttgatcgctttttcagtgcgtaggacagctgattccattgagtagatttcactcacgatatctgcaatgtttgataaaacttcttgctccttatcaagcgctttgccatacttttgcaccgctgttccagcagccaacaacatgattttcttcgccatcgcaacaaggtgcttttcttgttcaagtggcgcatccccaatttcttgaggtgtaagcatcataagttcttcttgaagagctgttgctttttcaagtagtggtaattcacctttcatcgttttgcgaattagcgttccaggaacaagaaggcggttaatttcattcgttccttcaaaaatacgattgattcgagaatcacgatacattttctcaacttcatattcagacataaacccataaccaccgtgaatttgaacggcttcatcagcaacgtaatcaagtgattcagaagcaaacactttatttagcgagcattcaattgcatattcagcgatcgattcagctactttcgcgccatctttctgctcttcatccgagagttttccaagcttctgttcgaaaagcccacctgtacgataagtcgaactttccgttgcgtatgttgcaacagccatgttcgctagcttctcttggatgagagagaattttgcaatcggcgtattaaattgtttacgctcaagagcatatttagctgaaagctcaatgccccgcttcatcgctcctattgtccctacggcaagcttatagcggcccacattcaggatgttaaaagcaatgatatgccctttccctggttctccaagaagattttctttcggaactgcgacatcatctagaataagcgttctcgtagaagaacctttaattcccattttcttttcttctggtccagtggaaaggcctttcgaatctttttctacaataaaggctgagaagtgctcaccatcaatttttgcataaacaacaaacacatctgcaaacgctgagtttgtaatccattgcttctcaccgcttaaaagatagtgagtaccttctgcattaagcttagccgttgtttttgcaccaagagcatctgatcctgaaccaggctctgttagagcatacgcagcaatcttggctcctgaagcaagcccaggcagatactttttcttttgttcttcgtttccgaaaaagacaatcggtagcgagccaataccaacatgggcaccgtagcttaatgaaaatgaacgggcacgagcgaacttttcagtaatgacggatgagctgattttatctagcccaaggccaccgtactcttctggaacgtctgcaccgagtagaccgagatctccagctttttcaagaagcttacgagagatgtcaaactcatggttttcaatcttatcaagctctggaacaacttcttttacgacgaagtcttccgttgttttccccatcatgacatgctcatcggaaaaatcctccggtgtaaaaatatcttcagctgtttgatcctctactagaaagctcgcacctttgattgttttattcattgtattcgacatgctgatcattcctccattttcattctttataggatttcaaacacaccagcagcacccatgccgcctccgatacacattgtcacaacaccaaactgctcaccgcgacgcttcatctcatgaattaaactaagggttagtttcgttcctgtgcaaccaagagggtgccctagagcgatggcgcctccgttcacattcactttatcttcatcaagaccaagcttacgaataacgcgcagcgactgagaagcaaaagcctcgttcagttcaaacaatccaatatctgaaagctcaagacctgcaaggcgcagtgctttaggaatggcttcaattgggccaactcccatgatttctggtgctacacctgccactgcaaacgatcggaattttgccattggcgctaatccttcgctctccgctttttcacgatccatgacgaggacgctcgccgctccgtcacttgtttgtgaagagttccctgctgtaacagaacctcttacattaaagaccggtcgcaattttcctagaacgtctagagatgtatccgcacgtactccttcatcctgagaaaaaagaaatttcttttcttgtagcttgtttttctcatcaatccactttttcgtcacttcaaccgggacaatttcatcctggaatttaccgtctttgattgcttgagcagcacgctgatgacttcttagtgcaaaagcatcctgatcttctcggctaatttcaaagcgacgagccacttcttcagcagtgtgacccattcccataatgtattccggcttttcttctacaagtgccgggttaggcttgatgacgtgtcctcccattggtacaagactcatagactctacgccgccagctagaattgcacctgattgcccgagcataattcgctcagctgcataggcaatactttgcaagccagaagagcaatagcgattgatcgtaatcgctggaaccgtttctgaaagtcccgctcttgcaccgaccattctcgctacgtttagcccctgttccgcttcaggtatggcacatccaataatcacgtcatctatttcaccatcataaccgcctgctcgcttaagcgtttccgcaacggtgatcgccccaagatcatcaggacgcatacttgcaagcgtgccacgattagcttttcctacaggtgttctagctccagatacaataactgcttctctcatcaaacttccctcctccatactagttacgcagcggctttccttttactaacatgtgctgcattcttgcttgcgtttttggctctcctagcaggctgaggaacgcttcacgctcaagatcaagtagatactgttcatcaacaagtgttccttcttttacttttccgcctgcaatgacgtgagcaagcttcgttgcaatcgtcaaatcatgatcggacaagtagccgctccacttcatcgtttttgctcccattagcattgcagcataacctgcttctcctgcaactgggatctttttagagacaggcggctgatagccctgttcagcaaggaataacaccttttctttcgcatcatgaaggacatgatctgcattcgcactgatcccatcctgagggcgaataaatcctcgttccattgcttcatgtgccgatgttgacaccttcgccattgcaattgtttcaaacacattcgccgcaatatcggtaagattcacattaactccaggaggtgtttgttctaactgccgaagataaagctctttgtttccgcctccgcctggaatcaagccaacccctacttctacaagacccatataggtttcaaatgaagattgaatggaagcggccggcatacatacttccgctccaccacctagtgtcatttggaaaggcgctgcaacaacaggtttctttgaataacggatacgccccatcgactgctggaactttctcgcaaccatttcaatttcaaagaaattatcatcctgcgcttccattaacatgtaagcaacattggcaccaacacagaaatttttaccctggtttccaatcacaagaccttcaaaatttttctctgtttcatcaacagcttcattaatcatctggaggatatccatcccgatcgcattgttttgggaatgaaactcaagccccgccaccccatcacctagatcaagaagcgttgcgccagtgtttttcttaatcacgcgattctgagcttttagtcctttaagatggataattttcttgctttcttcaactactttctgatcacctttatgatagaaagattgagtggcgccttcctgcttatagaaagacgtttgccctgaggcaagcatctgatcaacccactcaggaatcgtttcaccttcttctttcattcgagcgactgacttctctactccaagtgcatcccacgtttcgaacggacccatttcccagccaaagccccatttcatcgcgcggtcgacggcatcaatatcgtctgcaatttcataggctttctcagcagaataaagaaggacaggtttcataatgttccagattaactcaccagcacgatcattcgcataagcaagcgctttcagtttatccgcttttgattttgcttgtttgcttgcctcaacagaagcggtttttaatttctgtctaggctcataatcaagcgttttagggtttagctctaaaatttcgctaccttttgcacctttttgctttacgaaaaagccctggcctgcttttgctccaatccagcctttttctttcatctgctgcataaattcagggatgcggaaaacttctttttcatcgccttcaacctgttcaaaaacgttgtttgctacgtgaataaacgtatcaaggcccacaacgtcaagtgttctgaatgttgcgcttttcggacggccaattgctggacccgttacagaatctacttcaccaactgaaaagccgcggtttagcatttctctcactgttacaagaagtccataagttccgatgcgattcgcaataaagtttggtgtatcttttgtttccactacacctttaccaagagtatcctcaccaaatgtcttcatataggagagaacttctggatcagtatcttttgttggaattacttcaagaagctttaagtatcttggtgggttaaagaaatgagtaccaaggaagtgttttctaaaatcgtctgatcttccttcagccatcgcttctactgaaatacccgacgtattcgagctaacaattgtcccaggtcgtctaaattgatctactttttcatatacttttttcttaatttcaaggttctcaacgaccacttcaatgatccaatcaacttcctccaagcgttccatatcatcttccatatttcctgcttcaattaattgaatgtgatcttttttcgaaagtggtgcaggcttttgtttctttaacttctcaatcgcttctgatgcaagtctatttctgaccgagcgatcagctagtgtaagtccttttgctttttctttctcatttggttcttttggtgcaatatccaataacaaacttggaattcctacattcgccaggtgggcggcaatgcctgatcccattactcctgctcctaatacagctactttatgaatgctacgtgtcatagcgaacctcccctgttgaatgaatgctcattcatttttgtctcaaaaaaaagagcgagatcatttcctctgtctatactataaaatatattctgaaatttagcaatataccacgtgtatttttttaacaaatttttatgaatttaattacaactattgaaagcggacgattgtccgctttcttctatttcatcattccttttaacacaaaagccacgtttgccggccgctctgcaagtcttctcataaagtagccgtaccagtccttaccataaggtacatagacgcgcatcttataaccttctttaagaagctcttcttgtttttccacgcagatcccatagagcatttgaaactcaaattgtgtgtgtggaatagtgtattcttcaactagtttctttgtgtattcaataatctggttatcgtgagtggcaatagcggtataatttccattcaataaatgcattttaataatctttttaaaattttcatcgacgtcttttttgtctgggaatgctactttatgggactctttataagcccctttcacaagtctaagattaggagacagctcatttaacttctcaatatcctcagctacccggtacaaataggcttgaagaacagtaccgatgtttgcgaattctttcttaagttcagtgaaaatttcaatggttttcccgcacctctcgaaatcttccatatcgattgtgacaaaaacgtcgtggcgatcagcggcttcgagaatgcgacgcatattctttattgtcatctgttcatcaatatcgagacccattgatgttagtttaagagaaagctgagaatcaaggttttctgctgcaattcgctcaatcgcttcaatacaatgattagtcatttcatcagcctcagcggcattatcaacaaattcaccgagatgatcgattgtaacggacaatcctttttgatttaacttttttatcgcgttcacggaactatcaagagacgcaccggctacaaagcggcttgctccaaaacgcataccataccgcttcgctactttcgttgctaccctattcttccccatgtataaaaagaaattacgcattacttgttccatcataacccctccatgaaagcgcatacaaagcgctataaaaaatatattctggagaaaatcggcatatagtatcaaataccgccatatttcgcctttaatgctattttaccatgacatgctatagattagtctagttttgatagattttctctcgaattaatcctgttaaattttaactatctccttactctatacccctctaaacagaaagtaaaagtcatacactagtatatttccgatcgtctcttttggatactttacttttgttcctttgttgctacacttatcaaaatttgtctatgcaaaaaaaaatgaaaccagaagaaatcctggtttcattaatcagtgtctttatttgacgcttgagcttttcggtgctcttcgttcatggttttaatttcagctactaactctttcatggcatcttttgcatcaggatatgtttggttccagtgcttcgctagtggaggcatcgtttttgagagatgcgtgtacatggcccacagctttactttctccttgagctcagggcttgtatctccaaggagaagctcggtgtatttatccatcaacccatcaacttgttcctgaagtgtttcaagactcattttactcactccaatcacacgcagaataccccaattatagcatatttaatacgatacccgaccattcatctgtacatctcttaatcttccataatcgatgcgttcctggttttctttgatcgcttttattaactcgtctatcagtaccttttcatccgtcacaataaagaaacgacaggatatcatggcaaagtcgccaaaaaatgctcgacaaccctcataacgttttgcatcacgaagtggctgatatggaaaaataaaatttccgctttcttcaaaagctggatcaagaggatgttcttcaagcttcttaataagctctcgaatcgtcagctctcgtccatgctcattttttccgatttcgattatttcaagcaaggctaattcccccttctttacaaggttcgaacacaaacggctctgatagagggccgtagaaagaaacaacccatttactgaaacaaaaaaaagagtcagaataaattctgactcaaacttatgggtcacaaagagtgagtatttaccaaggggggggacctgacctcactctttaccttatcttatgccgatttactctagttggctggacaagtaccacggtacaaacatggaattttccttcgcttatatgacgaacgacacactcatacatgatttggacttcgatcaccattataatagaaagaaatggcattcggagcatcatggagggaataagatggagatcattgtaattggtggcgggattggcggtctgacgactggtgccctactcacaaaagacggctatcatgtaacaattctagaagcttcgaatgaatggggaggatctgctggaaaattcagcagaggaaaatttctttttccagttggtgcaacgatgggaatgggctttgaggaaggcggcctacaccacagaatttttaaagagttaggactatcgtttccgactatagcaatggatgaaattatgcgagtataccagggaagtcgggtaatgccgtactattctgatcgaagccgtcatttatcagagtgtgccacccaattccccgatcatgcaacaaaaatcgtttccttctataaagagatatggaaaatcggggcagaaattcgaaagttaattgaacctcttccgattgttccaccggtaagtttatcggaatggaaagggctacttctatctctaaaacccggtacacctttacttctcccttatttaagaaaaacaatgggagacctccttatgaaacatcaccttgcagaagcaacagattttaagcattttatagatggacaattaatcgatagtatgcaaacaactagtgaaaattgttcagcgttaatgggctccctcgctctcgatatttatcatgaaggtgcttactatacggaaggcggattatatcgtattgctgaaatacttcagcaatatattgaggagaacggtggaaaaacctacctcagaaaacaagtccaaacgattcgccgcgaaaataaccgctgggtagccattgatcaaaaaggagagcggtggaaagcagatcaccttgttagtaacctacctgtccagggatttgtgccacttttaccagaaccgctacaaaaacaacttcctccaaaattaagaagcagaagtcaacttgtacagtggggagcgtttacgatgtatcttgctttagatgaaaagatgattcctgactataccgcgctgtttagccaggtcctctcctcggatggggacatgacggaggggaatcacctcttcttatccctttcgaaatccaacgatcttaatcgcgcacctgctggctttcgcacgttaaccgttagtacacatacagaactccatcactgggatacaaaagagaaatacgatcaatataaaaaggaacttactgaaaaaatgctaacaggcatcgaacgcgtcattccaaatttaagaagcggaattaaaatacaggtgactggagctcctcgagcatgggaacgctttacgaaaagaccaaaaggcatggtaggcggctttccccaaacaaacgaatatagtctttttaacagcctttcccatcgcactggtctagatggactatggctttgtggtgacagcgtatttccaggtgctggtacgattggggtatcgacgagcggttaccatgtctaccgatctattttgaaagataacaagaaaccaaagcttttttagaataaattcagctttcttaggcagaatgatactatcatttatgttgaaggagcgaatggctatgaacgaaaagaataaattagtaacttccgatagtgaaaaacttctcacttctatgcgagaagaaatcgccgaagaattccttgtgatggaagctgtcaccgagcaagtagaggaaaaagatttttatacgtatcatcttttaaaagaagctgaaaaacttcgaaatcaaaagaaatagtactttctcaacaatgacgtgtggagaatcctgtagtatacttctagtaattgatttaaaggaatggtgcttatgacaactcatacgtttacggttggtgaagaacgcgcaaattatatcacccatggaattggagctattatcagtcttgctgctctcgtcatattaattgtctttgcatctctttacggaacggcatggcatattgttagctttacactttttggcgcaacgatgcttctgctttatacagcttctacccttgtgcatagctttcccgctggaaaagcaaaagacttttttgaaatacttgatcactcttccatctatttttttatcgcaggaacgtacacccccttcttatttatagtcattgagggctggcttggctggacactatttgggattgtatggggcctcgcgattattggaacagttttcaaagcttattttgtcaaaaaatttctctttatctcaacgattctttacgttttaatgggctggctcatcgttctcgcctggaatccacttacccagaacctgcatccaaacggaatgatgctactggtgattggcggaatcctctatacaataggtgctgtgttctatgtatggagagcttttaaataccatcatgctgtttggcatttatttgttgtaggtggaacgctcgctcactttttctgtgttctgttatacgttttaccgttgtaaagccattcctctgcacaagtcgtgcagaggttttttattttaaaccgaggcgaaaactttttatgaacaccattcgtcatagcagtagaataatgttaaaaggatgaacatttgtgattgaagtatctcatcttacaaaacaatttaagaaaaagaaagttctccatgatctcaatttatctgttgagggtggaatggttggactaatagggcctaacggtgctggaaaaacgacgtttatgagaatgctggctgctgtatcgaaaccttctactggagatattatcgttaatgggtattccattcaaaaagaagcttcaagcgttcgcaaagaaattggctatctccctcagcactttcagctttatccgcagcttactgcatcagagtttctcgattatatcggacagcttaagcaagatcgacactatgatcatgaaatggaaaagaaccgcttgcttgatgctcttaacttaagaggtcaacaaaatcagaaaatcaagaccttctctaatgggatgaaacagcgccttggtattgcacaggcactctacggggaaccctcccttatgatctttgatgaaccttctgcaggattggaccctgaagaacgcttacgctttcgaaatatcatggcagatgtatcaagtagaaggacggtcattctatccacacacattgtagaagatattgaatcaagctgtgacacgttaatcgttttaaacaacggcgagattttatttatcggaacgccttttgatctacaatgcaaaggaaacgggcttgtttgggaatttgatcttaaagatgatgactggaatcaacttgctggactgcaaatgacgctaacaaaaagaaaggccaatggattacattgtcgtgcaatctcacctgtagctccgtttgacttcgcagaagccgtcaatcccacacttgaagagggctacatggctctgattgggcgtgatggtacatgagaaaatggctcgttcaatttaaacttgaattatcgtttttgtttaaaagctggatttttacgccgcttccgtttctttacttgatttggttactttttagcatgaatacgaatcaggatgggattcatgggaatctctatcgaacgacgtatgaaaccacccactcgcttattttcattcttgttaccggcttatgtattcttatcggagtttatctcatacgccgtgatgttggaaatgagtcttttgaatggcatcaatccttccctgtgtctaatttcatttttatttcggctaaatttggttcggctcttctctatatgacgatctttacaattctcatgtcgactacttactttatatttgctacaaatgagaacattgccatacctgaaacgctgacgattttacggttttttttcgttcaatatgaagtaaccttcttgattagcttatcccttggcatgcttttatctgtgttaataaaaaatcgatttgtctatttaatcgcgttctgcgcctggatgtttggaacgcttttcatggaaattttcattattaatcaaggcgaacttttttatttaaaagcgtttcacctcacctacttatttgttgattcagtgttgattaacgggacgtggggcattcaattgatgaaagaagaaatagcattgcagcgtctttttgttacgacagtttccggctttcttcttgtcctcattatctttattcttaatattcgtagacctcaccaatacgacaaactttggagaggtatgctgattctaagtgctgggatcgttattctttcttaccttccatacgcttctttttggagtgaacgaatgagagaatttagcgagataaaagaacagtcgccttttatcacaagtggacaagacggtgaacatcgctacatgacatttccacctcttcctcacccagatggacttttggatggcgaaggtgagctctatcaaccagaacgctttaacattgaacagtacgacatttcgatcgatcaacaaaaagagaattctctttcagttgaagccagcctcacgcttccggaagatgaattttcaacgaacgaggtgatcaaattcacactgaatcaaacgtttactgtaaaagatgtgataatcgatcatcagacggttccgtttacaagagaaaatgattttataacgatttcattacctgatcatactcactcacccgttattcagtttaactatgagggaacttatgaactctgggcatctaattacgggcaagaatactttccaggatacgttggtggagatcagatgatcatgccttctcaatcagcatggtacccgttgcctggccatcaatatctttacgatatgaatggccagtctcagacaaatgtagaactagacaatcgagcgctctttaacgttacggtgaacatgtcttcacccatatatggaacaattgaagaacatcagttatcgaacggctcttataaacttaaaggaaaaacttccaagctcgacctatattcaggggatcttgtagaagttccgtcagattattttccattttcgattgtcacaaatagctataatcatacacgcgctcaaacgttaatgtccgaattggacaaacgacttctttataccgatcgataccttacgaaagagatagaaccaatgagtcacctctttctattgcctgtcgaaaatattcgctgggcaaattatatgaggcaacaagggtttattgaccaaaattatcttctaagtgagtcgtccttctatcaactagatgaggcatacttattgaagctgtttcttcaaattaaccttttgcatgacagtacagaaatatatggctacgaagaaggtgagttagtaacaagcgccattctaagtgcttacgcttacctctatgaaatagaaaatggaaatgaagaaaaagcctccgctactagaagattagtcattacacttaatgacgagattccaattgagaactatagcgaagaagagattaaagcaaaagtgatgcaagaaagtcagaaacgaaaggagaaggtttcatgacagatgaagaattagtactggcaatggctcgtggaaatcaagctgcttttgaagctttcgttcatcgctaccacgcaccgcttcttggctaccttgagcgaatgttgcgcgatcgaaaaaaggcagaagatgtcgtccaggaaacttttctaaagttaatcaaacagctgaaatcaaataaaattcctaaaaaaataaagccgtggctctatcaagtagccacaaaccaatgcagagactactggaaaagcgcagggtttaaatcggaaaaacaaatcctcgactttatacctgatcagcctgataaagagccatcagtcgttgagttatttgagcgtcaggaatcacgagtagaatttcttaaaaagcttgatacattatcagaaacccaaagagaaattgtttatttacgtttttatcaggagttaaaatatcaagagattgcagaaacattagaactgccgcttggcacggtgaaatcaaacttatttcatgccttaaagaaactaaaagcatctttagctcgaaaggaggaagttaaccatgcaaaacattgatcttgagttagaaaagctagaagaagatttagagcagccactcaaatcctatctggctacgtcaccccgttcagaggatacgcagaaacttcttttgtcattacaggattcttttgacgaactaaaaccgtctcaggtcgaatttcaattcgatcaagatgcggaaccagcaaagccttcactcgcaaaacaatgtctcaatcaattcagctcttatcactgggcttactggttaataagctttctcatttttgccatgctaacggttatctcttctggcagtatggaatcagatagtttattcccgattgttgtaccgatttatttactttttggcgttctttatagttacaaaacatggaataaggaaatgcgcatggtcgaatcaattaccccattcccaccagctcttttactattaagcaaattacttgtggttctcgtagtgaacatcggcctttccctgttatcaacgctttatattgtcaaagataataccatgattaatcctggtacttttctgttgcattggttcgcaccgcttctcttcctaaccggcttgcttgccttcgtaatgtttcataaaggggtcatcgcaggatttatcgcagcgttgctcggatgggttttgacattccttgttttaccttatacggtgtttgccatttcgggtgaggcgtttcaacagaacttcttatttgttgtctcttatctcgttattctaggtctaggtgtaggaatgcttttcttatcatatcggaaaagtttacgcctttcctacttatgaggtggagggaatgatccaagtaaagaacgtcaaacatgaccgaaaacacttttctctttccattccagaattagcgttgggtagaggcatcaccattttagttggcaagaacgggtctggtaaatcaacgttacttcaactaatcgcaaccgcgttaaagcctcacagaggtaccattcaatatggaggaaaaacaatggatgacgccctccccttcattcgtaaaaatatcggatttctcccaaccggtattgaactctatgaagaaatgagagtaaaacgatttctgcgctacatgagtgaattaaaaggtgttgttaatgaagatgctgttgaacaatcgcttgttggcctgcaccttcaagacgtgaaacgtgccaaaattaaaaccctctcacaggggatgaaacaaagagttggaattgcgcaggcgattctggactgtccccctatcttgctacttgatgaaccattaaactacctggatagtcgtgaacgaaaaaacgtcgtctcgcttttaacaaggtatgccaaatcaagacttgtcctcattgccacacatgagttaaatgaatgggaagatatggcggacgatgtcatttggcttcaagaaggaaaagttctttttaaaggaccaatcaacctctggaaaacacatcttcctttacgtgtgtacaagggtcaaatcccgatctctaaaatcaaagatcttgaccaagaacgaatcattcatatgaagcgaggacatgattattatttgattaaatatataggtaaaacaaaaccatttgagcattttaaagaagccgaagttacgattgaagatgcttactttatacgaaagaaatctagagatcacggaaccatccctcctcataatttgatattctaaaaaagtagcccatatttatcgtgggctactttttagcaggtgctttcctctctatagcgaactaatggttaaccgagtaaagaaggtgatttccttgcaaaagcaatctctaggtatgatctatgaatttattctcgccctactccttatctattcactcgtcattgatttgccagatcctgaaggggccgcactcgatttctttatttggatcctatttttgattgattatgcgacacggcttttcttaagcgaaaacaagtgggctttcattaaacagcatccgcttgatttaatcgccattattcctcttgatcagttgtttcgaactgctagacttgttcgattcatacgcgttattcgtttagtggcccttatcaatcaccgcacttctatgtttgaactatttttcacaaaatacaagattgatcgcgcctttgtctatgtgatctcgcttctatttatttctgctctttcaatgaaatggatcgaaccggagtttgaaacctatggtgatgcactctggtgggcagttgtcacaacgacgactgtcggctatggtgacttatatcctgaaacagcggccgggaaaatcgttgcagccgttttaatgatcgtcggcattgggacgattggggtgattacagggaccgttgccgcgatgttttctaataataacagcaaagatcttccgtctgaattagaagaaataagaaaaaagattaacagctatccaaacattagccagctcgactacaagcatatgattgaaaaacttgaagaaatccaaaaaagagaagcgagaaaggataatgatgaacagaggggaacgaaacatcaaacatcttaatacgcttaaccaaataaaatccccctaaaaggcgtttgaaagaacaaacgccttttaggggaatgagccaaaacattccgttcaaatcaacttacccgttactatagtttcttactttcttgaagaagtttcgattctccagtacgttcccattcttccacgacttcgtatgctttctcaggtgaataaccctttccaactagcactcccattaaaatgaattcttgcaaaatgtgcgtcgcatttatacctcttttcacatcttccagtccttcattcacaagatattccgtatactccacccactcgtctggcgttttaccaaacaccttttcagctcgattattctccgcttcttccgccgctatggcatctgctttggtttcatgaaccgttccaaacggatggtttggtggcgcatagatggaataaagctttattggtacatcaccagtatttgttaggttatgccatgttcctgcaggaatgaaaatcgcaaaatcgtcataaacctctctctgataattcaaagcatcttttcgtttccccatctgaacctttccctgaccttgttcaatccgtaaaaactgatctaaattaggatgattctcaaggccaatgtcgtcaccaacgtcaatattcattaacgttaactgtaagtagtctcccgtccataaagcagttcgaaacgtatcgttttgtaatgtagctgcattaatatttgctacaaaagggttcggtccataatctttgaattctctacttcccttactaccttgtgatccaaaagaattagcattcgtgtacattattttcaatcccttcacaaatcataaaatatcctatgcatttgtgctgggtgtgtacgtcaaaaataatattaaagcctattttttcctattataaaacggcaatcgcactgaaactattcagtgcgattgccaataactagagcgctttttttaaacgctactcctatttaaccactttttctgcttttacttcagtttggctccatgctgttgtataaacattgaaaagcgattccagctgattgaccaaatcaagggcaaggagcccatttccctcagcttgcttcgaacatccaatcggaacggtcctctttatcaactgtgaataaatttcggcctcactgagcgttcgcttaaattccttttctgccacgttcattagaagagcaagtgctcctgatacgtgcggagcagccatagacgtgccagaaagtacggcatactctccacctggataagttgatagaatatcgactcctggtgcaattaaatcaatttcgttattcgtattcgaaaacggtgcaagcgtacgttggaaagaggctgctcctacttcaataacctcattatacgcgcctggataagcgtattctgacgtatcttctctaccgtcaccttcatttccagctgcgcacacgaccgaaatattttgactcaccgcatctttaattgcttcgtaaagttcaggaacattagacgggccaccgagagacatcgaaatcacgtttactcgctcaccatctggtcccttccaatcgatcgcatagcggataccattaatgatcgattgataagaaccgcttcccgcttcattcagtacttttacaattaataacttcgaatctggcgccacaccttgaacacctttttctccgttcgtcgccgcaattgttccggctacatgcgtgccgtgcccattattatcatcgtaacgatccgcatctccaccgaaatcttgcgtgaaattcttaccaccgatgatgcgggattggagatcaggatgatcaatctgacaaccggtgtctactacggcaatgatccttccctttcctttttctgatttatcccatattgctggagcttgaaccatttccactccgtccggcagaattcccgcttcttgaacaaccgcatttacttcgaatggtattagtctaacttcgctcatgtacagcgcccctctcttttacctgaattatctgataaatacacaagggttgtctagttccatatggtctattttcccattttattttatagagaaatcattctttcgtactagagaagccgtgccgctatttccgcaagcttacttcgctctgtactcgttaaatgaataatgccaacttcatcctcttgctttaaccgctcaactgcataagttaagccattgtttacagaatcaaggtaaggatgatcaatttgttcaggatcaccaattagaacgatttttgttccttctccaacccgtgttagaatcgttttcacttcatgtggcgataagttttgtacttcatcgataatcacaaattgatttggaatgcttctccctcttatgtatgttaacgcttcaacctttagagtcctcagtcctgataaaatatgatttaattcctcttcgtttttcgcatcaaataaaaattctagattgtcatagattggctgaatccacggtctaagcttttcttctttttcaccgggtaaaaagccaatatcattgccaactggtacgacaggctttgagacaaggagcttttggtaatgttgttcatcctctgtctggctaagtccagcagcaagggcaagcaaggttttccccgtaccagcttttcctgtcgcacagacgagggatacgtttttgtccatcaatagctccatgagcatgcgctgctggacattttttggcagcactccccaaatatgttcactttctcggttcaatccttgaatgactaatttctgattgtgaatcaacattcttccaatcccagaatggctgctgccaaatagatcttttaaaaggataaaatcttgactataaacttcttcggtcgtatactctcgcacaatatctatcgaaagttcaccgctcttgtataacgcgtcaatcacttcaggaggcacaagaatttcatggtatcctcgatgaagcctctctacatgatcaatgagacgatcattctcatatagttctggaaaaaatgcaggtaaatcaagtgatttctttagcgcatctgcttttgcaatcatcaacgtatcatttgaaacgaggacaacatcgcctattgaatccgtgcttaaattaatcgctactgcattaatgcggttatcatttgaatcttcactaaattcatttcgtaatttgtcaaaagagcgatgattcaactcaattcgaaatgttcctccggagtcaagcggaatgggtttatcgagcttccctttgtttgtgtctcgcagtttcttatacattctgctaaattctcgcgcatttcgccctacctcattcattaatcgcttcttagaatcgatttcttcaatgacaatcgctgggacgacaacatggttgtctccaaactgaaagagtgaatgggcatcatgcaaaagaatattggtgtctagaacaaaggttttcaactacagaacagctccttttaacgaaagtataagaaggcgaaggaatgtcccttcaccttgagctattcccgatttttttctttcggatccttcctttttacacaaacacaatctgatttacagtttcttcataatttgtgattttctattctcgcacatattgtttataagtcgcatattcacgaaaaccagatttacgtagaatgggttctgacgttccaagtcttgcctgcgtcaccgctagctcacatcctctttttctcgcttcaattagacgatctgctaacaaactacgatagatgcccttccctctatcttcaggtagtacacccgctccgtttaaatagagtaccttcccatccttgctatagcgataattcgaataacctacaggcttattgttatcgagggcaatcgtgtatcctcctcttcgctctggaaattgaaggtaagatgctctctcagtaacggcagcctgaatcgcttcatcatcatatccccagatcttcgctgctacttccacatgcgcttgcacgtcttcttccgtattcacttctctatacgtaaagtccgatatagccgcttcttctactgttagcttcttcgctaaacctttatatgtatcgtaatgctgaaatcctaatgtgaggagatgcttttcaagttcactagaatccgagcttgatcgcacccaccacgacaatggacttccttcaaaataagcgatcacatcttttacttcgtggatggtccgatgatatcgaacaactttattcgcatagacgctagttgattttttatttttgatcatcacgaggtcatcattttgaatatagtgaatagattcaggtacaagagcttcttcgtaatcccattgaatcgcttcaattgcacgtatgatttgttcttcatccattgcatatcatctcttttctccattatttatctcgattgatccccccgcatcttttctcactaatccgtcacatctggtcgtgattaaaacgcatagcacccggacatactgggaataaaaaatgttaaggagggtgtgctgatggaaaccaatcagcttagaaaagcactagagcagcgcagaaactactacatctcaaagcttattgaggcaggagcttattccaccgctgatcaccatctctatcgctgtacactaacggatcttgaaaaagagtacaaacaactatccaactattaaaatgttagatcaacgtgagattcgatgagaatctcttttttatttgattgtatacgtataaaacagctatagactggtaaaaatagagccatagcattaaaactagcaaaataagaaaggatgaaacatgatgaataaagcggaacttttatcgactgttgcggaacgtgcagcaatgtcaaaaaaagatactgccagagtggtagacaccttaatggatacgattgccgaagcacttgctaaaggtgaaaaggtgcagcttgttggatttggtaactttgaagtgagagaacgctctgctcgtaaaggacgcaatccgcaaactggcgaagaaattcaaattcaagcatctaagacacctgcgtttaaaccaggaaaagcattaaaagaaaaagttgtttaacataaggagagctggatccatttggttccggctttttaattgaggagaaatcgatggaatttatgcagataatcaaatacacggttaccttcgttacgatcattatgctgatcgttttttactaccgaatggctaaaaagtaaaagcgcgctaattgagcgcgcttagctgtttgcttaatttatgataccagctctcattaagctctttggcaagtagcgccttcacaagtcctgtgcgatctgttcgatccttatacgtaacccggttaatcaatgaaaccgtcacatcatggtcaggtcgatgttcaagtataatgtcatcctgaacagtgacgtgcccctcttctaatactctcagataatacccgctgtacccattttccattacaaataagtgcatattctcaacttcaaacttttttgcgagcttaaagcaaggctgtcttggtaaactaacctgaacttttatgccgccgatttgataaatatctccaatccgcgcttctttctcatctagtccagacactgtgaagttctcaccaaatgcgcctagcttcaattcacatccaagtttcttttcccagtactcataatgttcaacgggataaacacaaatcgctttctctgatccaccgtgatggacgagatctgcctggccatcgccttctacctgtacatttgaaacatatacagattcacgaacaggttgtttgtagataccagtagaaatcggctttcctttgtaagtcgtttcaacgggtttaccaacatttacgctaattaatttccccatctaatccctccttccctaagtttagcataagaaagggcgttccctttgcaacgcaaaaaaacagccgcatgacgactgttttcttgtatttatacgtggcgattatcaattcgtttttctatctcagcaagttctttttcatttttaagaagttctgctttattttgatcaacgagctgtttaaaagttaattttttcagctttttcaacaaaattcaccaactttccctctgcatgagttcattatacaacaggagtacgttagataagttaacaaactgttaaaattttgtgaaaatttacacacatttcagcttatgaacgattattcagattcattcctattggatgtaggcccaccacttaaaccataaaaaaataattgcaagacgtcgtctaaaaagtcttttcgctctgaccacgtttcggctgatactcgcttgacctctgttttgagggcattaagataaaatataatcgattccattgaaagtgaagcattaatttctccacgctcacgtgccctttcaaggagctgaacgaacagtggaagggtttgcgttcggtagaaatggtctacatattctttcagctcttcatctgccgttaacatctcttgaagcaacgatgggtccagactctgaacagctttatgtttctcaaaaacaattaactcaaccaaatcagcgaacgtacgctcttcctcgacactctctttaaatatttgaaactgttgatgcatgtactctttcatcaccgctcgcacaagctcttctttactagtgaagtgattgtaaatcgttacttgagaaactcctgcaaaccgcgcgatgtcactgattttcactttcttaacgccttctttattaaataacataaaagcagcgttcataatatctttacgcttttgttgttttcgtaattcaaatccattcattatcatcaccattattagtatagcatttattgaactatttattaaatttgagttcaataaatattgattatttccgtacagtcatttatgataaaaatgaaatatatattaaataatagttcaaaattttactgagggggaacctcaatgatcgaattaaacggcttaaccaaaaaattttcaaatggaaaaggaatttttgacgttactttctccattccaaaaggagaagtatttggatttctcggaccgaacggtgctgggaaatcaacaacgattcgtcacctgatgggatttatgaaaccttcaaaaggctcagcatcgataaatgggatggatacatggaaagatgcggctaagatccaagaaaagattggttatcttcctggtgaaatttcttttcttgatggcatggatggtatggcatttcttaaacttgtcggtggcatgagaggaatgaagcaaacagactatcgcgacgagctcattcatcgccttcagttcgatgtaaaaacaccgattcgtaagatgtcgaaaggaatgaaacaaaaagtcggtatcgtggcagcttttatgcatgaaccagaagtcattatcctagatgaaccgacatcaggcctcgatcctcttatgcagcgtattttcattgaaattgtgatggaacagaaggaaaaagggaccacatttctcatgtcttctcatagtttttcagagattgaacgtacgtgtgatcgagccgcgattattaaagatggcaaaattgttgtcgtcgaaaatattcatgacctccagcaaaaacagcgtcgactctttgatgtgacgtttgaaagcgaagaagaagctaagctcgtaaaagaaagtaaacttgacgttatttcggtcaccgagaatcgtgcagaaattgccgtacagggtgattacaatcaatttattcatgctttaggagattatcgaattcgaaatattgatattcatgaacaaaatctcgaagaagtatttcttaattattacgacagggaggcggaccgatcatgaacatcacgttatatgcaaagatgttaaaggttcatgccaaatcaatttctagctatgccattggttctgctctctaccttctgttaatcatcggcatttacccttcgattgcggatgcacctggattaaatgaattaatggagtcgatgcctgaaagctttcttgcggcctttgggatggagggcggctttcaacacgtgagtgactttattgcaggtgaatattatgggctactttatgtggtgattttgtcgattttttgcttaatgacagcgtctcagctgatggctcgtcacattgatcgaggctcaatggcttatattcttgcaacgccgaactcccgaaagaaaatcgccttaactcaagcacttgtgcttatcacaggacttctaattatcggattaacaaccgcacttgcaggagtcgttggaacagaagttttaattgaagataaaccttttgaggcaatgacttttatgaatgttaaccttgtcggcattctattattcttcgtcatttcaggctactcgtttttattctcttgtttgttaaatgatgagcgacaggctcttgggatttccggattactgacgatcgtcttctatggaatggatttagtcggaaaaatgagtgataagcttgattggatggtacacctttctctcttctcaacgtttcgccctgttgaaattgcgagaggttctgttgacgtctggccaacagccacattcttatttttactaggtacagtgctctacgctgtttccattctcattttctccaaaagagaccttcctctataataggaagaagataaggagtgatcaaaatgaattatgtgaaggaactccgtgagctcgttgggcaacggccgctcattttagttggcgctgtcgctttgattttaaacgataaagatgaagttcttctccagcaacggaacgaacgaagaaagcgatggggattaccaggcgggttaatggagccaggtgaatcgactgaggaaaccgccataagggagtcttttgaggaaactggcttaacgattcgaaacctcgcgctcttcaagctttattccggagaggaatttttcacaaaagcggataatggtgatgagttctattccgtcacaaccgcttatgtcacgcatgaatacgaaggagagcccaccttaacaccggaaagcttagcatttgaaaccttctcttctactaatctccctgctaagatggttggtagccatagacgaatgattatggactttttcaacgaaaaaaacgagttaccttgaagcaatggggacgtctccattgcttctttttcataccctacgatcacgttgcactcatttatcgataatgggagtatgacgacagcttttcatcaataaactagtactgattacctcttttccccttttcatcgtctcatttcgctcggtgtttcttttcttatgttagaatgagaaagtcattttgacaaaactatgaatctcattaacttacataaggaagtgaacatcatgaggaaattattccttttccttctcgttgctttggtctctttggtgacagcttgttcgaactccgcatcaacaaacgagcagaccgatgaaaaagcagaccaagaagcagcgaaagaagatgaaaacaaagaaagtgaaaacaagcaggaacaaaaagaagcggctcaaccttttaaaccactagcgccgtctgaagatgccaagccgcttgaagaaacaatgacggaagaagaattagcgaaaatgcctgtcgttgaagcccatggggaagatcgcacaagaaaaacacctgttggcgaaacgttaatggaaggcacaacggatgaaacggacggtattctaaaagattatcgccttgttgcttattacggacagccaaactccacaaaaatgggaattctcggcgagatggaacctgaggccctcatgaagaaattgaaagaacaaacgcaagcttattctgatgctgatccagcacgtccagccattccaacgattgagttaatcacaacgattgctcagcgtgacccagggccaaatggaaagtactaccacatgacttcagaagaagatattgatgaatacgctgagcttgcaaagaaacataatgccattctaatgctagatgttcagcttggtcgtgacactgctctccatcaagtacagcttcttgaaaaatggctcaagcttccttacgttcacgttgctatcgatactgagttccacgtagaagaaggtcaaacaccaggtatcgatctaggaagtgtcgatggttctgaagttcaggaagtcgttgactatgtttctaagtttgtagaagaaaataacttacctgacaaaatcgtacttgtgcatcagtttacagaccacgctgttacaaacaagcaggcaatcaagccaactgacaacgtagaagttgcccttaatttcgatggttatggtgattatggaacgaaaatgtcgctctaccgtaaatttgtccggaatgagcctgttcaatacggcgggtttaaaattttctataataaagataaaccggttctaacacctgcagaagtccttcagcttgatccgaacccagcgatcattaattatcaataatccgcagcgcttttccctttctttttaagggtaaggcgcttttttttgttcaattggaaccctccgcgcctaccttatttacgcatactttttccgtgataagccaatctaatcaatggaggtgagtatcatggacaaaaagacaccaaacaaagatgaaatcaaccagaacaatttgaacaaattcgcgaatgaatatggtgctgatttagatgagcaggcgatgaatggcgattacggcatgttagaaacagaggaagaagatcgagcgaacaaaaaagggaagaaataatgagagccacaccttgtccatccagtgataaggtggccttctttttctagataaacattctatttaggaaagcaaccactcacttttaaatcgtccatcacaatcgtatttacgtactttgcattagacaaccgcttgtcttttctaatatttgaaatgaatcataatgatgtcctagcaggagtcaagcactttattctttaatccacttgcttaacttcctcagtctcggaatttacagtgaatctctttattacgtgttgttgaacgtcatacaccctaatgtagaataatgattgctcttctttcacaaaatccacggtatatgtttgttgctcctcacttgttagccgttcatatataagaacttctgcatcgtcacgggacaaccgtccttcctgcttaaaaatcttgtcctcaacagtggattcactccctacctggtttagtcgatctcctgaacaactaactaaacctagcatagtaaaaaggattaagatgataagaaagaaatgcctattcaagtaattcccctccacctgtactcccccttctctctttttctaatggccttagccgtttcaatttatgttccttgtttggacgattgtagaaatgattttctaacgtagatggtatacatcaaaacaactagtgaaaaaatcatatttccgaggaaaggctgcggagatggattggaaatgaggagtgcactaatactaatacatccaaagagtatggaataggcgatcatgaaccagtagccccagtttgttagcccaaacctttccgtaattccaatcgtattggtgcctgcgtcataaaaaatggcggagatgaataaaaccgccgctccaaataagtaaaagtagctaatgagtgttacgcctatcgatcttttcaactgtcttccccctaattatctatctgtaagcttatttctttctactactttttatttctgattttattgaatgcttttcgtcttgcttgatatcttcgtttttaattaatagataaagatgcaaaaccacttcaaatactataatgccaatatccaactcttgaaaccacattaaataaacctatcaaaataagtaaacgataataaaagagatcctagtgttacataaataaccgctataacgtgtcccattttttgcacttgcttttttagttcgagtactcccaattatttcaaaacgttgagttgctggcaatcttttctttcatcgcaggaatgaaacaaccggcaacaaaaaaggcagcagatgcattttaccctttcgaaatgacgtcttatctttattcaaatgacatcttgcttttccagatctatactattcttaagaaagccgcaaaacaaaggatgtgaacaagtgaaaatttcactcgatgttgatcggaagtatgaagaaacgagcgtaacgattcactgtagagaaatggataattcaattaaagagatattggattatctaaacacacagaaaacggaattcattgtaggtaaaaaaggcgagcagcagcacatcttaaaaccaaatcaagtgcactctttccattcagaaggagatcaagtaatggctacgacatctcaaggcgtttttaaagtgaaagagaaattgtatgagctagaagaaagtttgccaatgaatacatttatacggctttccaagtccgttattgctaacttgcatgaaatcagccactttgaaccatcatttaacggcacgctcgctgtacattttcaatctggtaagaaagaatatgcttcgagacattatgtaggcaaaataaaagaggttctgaaaatgaacaggagggtaaaataaatgaaaacatttttgtttagaagtatggttgggttatttttcggaggatttttagctgttttactaacatatggaattattttcataggtgatcaaacaacgcttgactctaatctttttgtaacaaactcgttaggagcgattttctgtggatggttgtttacggtcactccactttactttgaaattcattcccttaaactcccacagcaaaccgcattacattttttcacggtaacgatcgtttactttatcttagcgtatggaatcgggtggatcgaaggtggagcattaaatattcttatattcttcattatctctatcgttttctacagcgtcatgtggatagctttctatctatactttaagcatgaatcaaagaaattaaatgatgaccttcaacatattaagtaaccatactatttaaagtagccccttcgccgactttactctgtacttcaacagatccttaggagagtctacaattaatttggtaatagcaaaccaaaaatttaagaagaccttctttaaagaaccagtattaaaagcggatgccattggcaaccgcttttaatacttctgtgaatagaacttatcgcttcttttccaaatcaattgggttatcaaccagttaacacactaccctatgttcgaggggctggttcataataacagtgatttttgtatcgactaggatgctctctccaataacccaatttctaagtttatttccatttggatataaactatgcaaaataatgttttatcacttcttacgataatacaaggatccaacataatataagtgctacgctcgatataggtgtcataactgatctttctttttccgttaggagagtttgcgatgggaggctattataagattttgccgcttggactaagaatagttagtattggaaatgccctctttcttttatttatgactttacttttagaaaataaatttcctagtgtattgatgacgagaaaagttgaaaaaacaatcaccattaatttaattggcataaaactcaagaactgaaacacatccgtatgatgaagaaaaaccacttccgagtacaagcaataagtgtaataaagcaataaagacaaatagaatagcaacaattacggataacaagaccacttaacctacctccatcttttcccctccaaaaagcacacaaccgtttaggcttttcattgggatgatgtaaaatgaaaaacaagagacctctttcttgctaagcatttgccaataataaacatcgtgatacttcatcttgctaacgaaacgattgcgacgctagaaattgcttcctaaatagaagaagtaggtgttcacctataaaagataaatataatttgcttaaaaaagtagaagaaaagatagtgtcgaggataaatggtaggaaaaagaggggttcctaaattcggaacccctctttttctttactctcttattcttcacctaactctacattatgataaacctgctgtacatcttccaactcttcaagcgcatcgatcattttcaagaactgctcctgatcttctcctgaaagttctacgtcattttgtgcaagcatcgtaagttcagctacggtaaactcagtaattcccgcattcttgaatgcttcctgcaccgcatggaactggtcaggctctgcatagacgataacaacatcatcttcttccataatgtcacgtacgtcaagatccgcttccattaataattcaagtacttcgtctgctgatttgccttcaatcccaaatacagctgtggaatcaaacatgtaagcaacggagccgttcacacccatgtttccgccatttttcccaaaagtagagcgaacatcagaagctgtgcggtttacgttgtttgttaatgtatcaacgatcaccatcgatccgcttggcccaaatccttcgtaacgaagcgtatcgtaattttcatctgctccgcctttggctttttcaatcgcacggtcaatgattgcttttgggacgttgtatgttttagcacgttcaagaactaagcgcagcgcctgattggctacgggatccggttcaccttgctttgcggctacataaatttcacgaccaaacttagcataaattcgacttgtatttgcatccttagatgctttcttttccttaatattattccatttacggcccattgtatttcactcttttctactagttatctgttgcatgacaaattcacattactctctatacgtctcgtcaattataccatattttacagttaacatttgttttagggacttggatccattagaaataatagtaaactagtagaaaagaggagtgatcatgtgagtcagaaaagattgcgagattacgacattactatcggagaaatggagcccggtgggaaaaatgcgattacggatgtagaaggagtagccgtcggacatactacgctaaataatggagaggttcaaactggcgtaacagcgatcctaccgcatcaaggcaatctgtttcagcagaaattaatcgcatcaagctatgttcttaacgggtttggtaaaacaatgggaaccattcagctgaatgagcttggtacgcttgaaacaccaattattctaacgaatacgttaagtatcggaacggcagcagatgcggtatttgattatatgttagaacaaaattctgagattggctacacaactggtactgttaatccagttattggcgaatgcaacgacatgtttttaaacgatatccgaggacgtcacgttcaaaagcatcatgttcacgaagcgatcgcaaatgcttcgactacttttgaagaaggttccgttggagctggaaggggtatgctgtgctattcattaaaaggcggaattggcaccgcttcgagaaaagtgaagctccagcatggaaattatactcttggtgtcttggttgtgaccaactttggtatccttcgtgaccttaatgtaaacggaaaaaaagtgggtaagacattaaaagaagcccttcttcattcttgggaagaaaaagataagggatccgtcatggtgatcgttgctactgatctccccgtttcagaacgacagcttcagcgtattattaaacgggcatctacaggactagctcgaacaggatcgataatcacaactggtagtggcgagattatcattggtttttccaccgctaacaaagtcgcccatcagtatgcgccacaaactcaaacactggaaaccattcatgaggaagaaatcgacaccgcttttcgtgcagttggtgaagcgacagaagaagcggtccttaattcattagtgaccgcaactcacgtgattggacgtgatgagaatgagagaccgacgttaatggagttacttcagaaattcagcatgaaactcaaatgaaacatcctcctgtcatcacgacaggaggatgtttatttcattaacgattacgtgcaacgtaaggataaatcggttttttcaattggaattcatacgtatttccatctacgattccaacaacttgattgctatcataaagatctagcatgaagtctgccatttctttagctgtatggtactgaggtacggttccttcatattcgaaattatctacgttcattgaacggttttcaaattctgtttctgttgctgcaggggctaggacttttgcctgcatttttgcaccctgtccttgtagctcctgatcaagtccttctgtaaaggcgctcacgaagaatttcgttgcacaatacgtcacggcatccgctacgatcatatagcctccaccggatgaaacgttaattaattgtgttccttctacattcgcataatcgcgaacatacaatgatgaaagaattgttaaagccttcacctttatttataaacagttcccacccattgatctcgatgaatcactgcaacgtttggtatctctgtttcttcattccattcctccttatgaaaatgaagaatcttctccagaaaagcagacgaatatcgaacctgtccttttccaatttttccattctgcccgtgtacttctacgacatctcctacacaaaaatcgccaactacttgctcgattccaccataaagcaaactcttgccatttaaaacaatcgcctgttccgccccttcatcaatataaagctgacctgatacgtgagagtgcatcgcaatccattgttttttaattgggaatgatgttgctttctcacggttaatatacgttccatctccaacacctgaaagaatacgaagcaacttttcgctgcctgtttcatggccaataaagacgctaacgctcaagcttaaagccgtcttcgctgcgattaactttgacttcatgccccctgttccagcgctcgatccagcacctccggcttgttcaatcatcgtatcatcaatctctgtcaaagagtgatatttgactgcatcaggattcgtggccggatttgaatcataaataccgttcacatctgttaaaatgatgagctcatctgcatgaacgagcccgcttacaagagctgaaagcatatcgttgtcaccaaactttaactcttccgttgagaccgtatcattttcatttataatcggcatcacacctcttgccagcaattcagacagcgtatcaaacgcatttttgtatcgttcttgattcgagaaatcagggcgtgttaacagaatttgagcgactgaaatgttccgctgattgaattcctcgatataagatttaatgagtaaactttgtccaagagcagctgcagcctgttttccttttaacgtaaccggccttgcaggataacctagttctttaaaacctgcggccactgcccctgacgaaacaagtagtacctcatgtccttcctctcgaagtaatacaagggcattaacatgatcaatgagcttatctaggtcaatttctccccgtccatttgttaatgaactacttccaatcttaacaacaatacgcttctttcccatgttacatctccttatttaaacatgttctaaacgatgatgaaatttctaaaattttaacacaaaaagtgagcgttgtattgctttaagttactaaaatccgaatgtgtatcaattatgtagtcataacgatgaggcgaagctaccaataaaaagaaggcactttgtagatgtgcgaacaaagagcctttcatgatccttttataaaatataaaaaaaatgctcaacagtgagagggttcaatcgttggtgtccctaaaagcgcccaggtgtgcgttctatgatcaggtggaaaatactgctcagataataggttccattctgccagacgtttttgatcttcataggcaacccattcctctaacttgtcagggacagtattctccattgcaattgccgtactgtctcagacaatgatgaacccatgcttgatacattcgattatttaaagcataagtctgatcgtattgagtcaaccgaccgttattgtgttgggtgggcggcaatccaccagattcaggctgttgatgattgaaataattaagcaatgagtaatccccctttttttttcattcctccctcagttcattattaatttagtagagagacacgcctttcgtgcctccccgttaataaataaaaggaaagaatccgaggattccttcctttttttcaatctatctacaagtcgtcaaaaccattatcatcagacactttcgtgtactggcgtgacttctgttcaaagaaatcacttttaccagcattcacatcggcatacgctttgatccacctcattggattctcccgatgcccttcaaaaggacgctcgattccaagctggtttacgcgggtattggccataaatttaatatagtcgcttaattcattcatcgtaataccaggaaaacgatcaccgatgatgtattccgcccatttgatctcaagttcagccgcttctctgaaggtattattaatgaaagcatggttctcttccgtattaagctcaggatgctccttgaacagttccttcacaatatttacgaacaacgtgacgtgaagctgttcatcacgattaatatagttaatcatcgttgaagtcgacaccatcttttgatttcgagcaaggttataaaagaaagcaaagccagcatagaagaaaagtccttccaggataatgtcatagacgatcgattcaaaaaacgtttgcggtgatggattttgaacaaatgcttcatatccagatgcaataaattgattacgttctaagagcacgtcatcatgcttccagtattcaaaaatccggtcctgctcatgtttattgacaatagaagaaagcacatagctataggactgattgtgcacaacttcctgaaaggaaagcacctgcatgagcgcagataggctcgaatctgttaaataatccgctactttgctcgaatagtcggtttgaatcgaatctagaaaagcgagaagtccaatgattttcttaaacgtatcttgctcgtcttcacttagtccttcccactgctttacgtcgtttgacatattgatctcaaacggagtccaaaagtttcctagcatatttttatacatgggataggcccagctaaaacggacatcatcccagtttagaacgtttgagctcttaccgttaataatccctgtcgagctattcggtgcagacacgtcataaagctttcttttctgtattgtcgccatttagagctcctcctttaacttgcgcagctttcacagtcatcgatctcgactgaagtacttctcgtgtaatacgttgtctttaacccttttctccaggccgtcatatgaatgttgagcaagtcctttgctttcaccgtgctctgcacataaatattaaatgaaatggactgatcgacgtggcgctgtcttgctgcgttctgctcaatactccaaagctgatcaatgtgataggctgacttataataccaggttgtttctggtgatagatcaggtgccgttacgggaattttataattcttcttttcctctgaatattctttttggaaaatcggatcaatcgaggcggtcgatccggctattaaactcgttgaactgtttggcgctacagctagtagataggcattcctgacaccacttttgtgaaccctctctttaagcgcgcgccatttttcgttcgtatagccacgttgtgtaaaatactccccattttgccaatcagagccttcaaaaagagaatagctccctttttcaatcgcaagctcatggctcgcctgtatggttaaataattgattgtttcatataattcatctgcatagtttgctgcttcatgactttcccagacgatcccctttttggccagtaagtgatgccaaccaaacgtaccgagaccgatgcttcggtatttctcattagttaactgcgcttgaggtacttcaatcgtattaatatcaatgacgttatcaagcattcttacttgaatcgggattaatcgctctagagcattggctgtaaccgcacgaccaagattgatacttgatagattacaaacgacgtaatcaccaggcgttttcgtaatgataattttaccgtctttcgtaatctcttcttcaacagtcgttgcactcatattttgcataatctcggtacaaaggtttgaagcatagatcatgcctgcatgcttatttggatttgcacgattaaccgtgtcacgatagaacatgtacggcgtacctgtttccaattgagatttcatgactcgcttcataatctcaatcgctggtaccgtttttctggaaagctcaggatggttcacacactgcgtatatttcatacgaaactctcctgatcctttttctttgtcataagaatcttcaagagagaatcccatcacctgacggacttcatgcggatcaaacaaatgccagtctgcacggtcttctaccgcttccataaagacgtctggaatacacaaaccagtaaaaagatcatgcgtcctcatgcgttcgtccccgttattaagcttggcatcaagaaattcaaaaacatctttgtgccagacatcgaggtaaaccgcaacagccccctggcgttgacctaattgatccacactaacggctgtattgtttagttgcttcatccaaggtaaaactcctgatgaattccctttaaaccctttaatatcacttccacgcgaacgaattttcccaaggtatgcgccaattcctccaccatttttcgatacggtagcgacgtccgtattgctgtcgtaaatgccgcggaggctgtcatccactgtatcaataaagcacgagctaagctgtccataacttttaccggcattggaaagcgtcggtgtcgctacggtcatgtagagatttgatagtgcccaataagcttctttaatgaattccagtcgcttttctttcggttcattcatcatcagtgtcatcgcaatgacaagaaagcgttcttgcggtaattcatacacatttttttcatgatcggtagcaagatagcggtctgcaagtgtgcgaaggccaatgtatgtaaagagacgatctcgtgttggagcgatgaacgtcgctacctgatccacttctttttttgaataagattgaagaagtgcttcgttataaatcccttcctccgttagctgttgtagaagccgataaaagtttccttttccgtatacttccttttcatttcggttacgaagagaattccgataaagcgtacgtagatgaaaagctgcggcaacataagtccaatcaggctcctctgccgtaattcgttccaaagcatttaagacgaggatattgtcaatctcgttttgcgtagcattttccgttaggccatctattgttttcgtaagaaagctttcacgactcagtaaagtatactcatttagaatgacttttacttccttcaacagtgtagttaacttcgtatcaacaactgtgctcattaacctctctcctttatgaatccattataaaaggctcactcttagaagagtgagcctggagaaaacgacaagttagacgtgcacatccgtgcacatttccaatgccatctctcaccctcaatccccgaagaatagaaacgtttttgagtacacggcaggtctactggcttgtgcttcgtccttggcaaaccttcccagattattctccagtggtttcttgcctcgtccacacgacagttgcggggacagctccggattcagaccggattcccttttaagtcgttctacgacaccgcatactcaactatttaattatttaggatttaccccatatatagtatacaaaacatttttataccactaaatattgataacaccatcttacatgacccaacgtttttgcacaagctctattgttacattgacgagaatttatttcaacttttaagacaaacacctatcacaatcacttcgtttaagcatatattgttaacacctaaaaaagtttccttaaggaaagaaaggtgagtaagttgaaaaaaacgatatgttttaagaagctagctggctacacacagctctgccagaaattcggtcttctaagcgaagaggaaagcaaagaaattctgcaaaaattaaatgaacacaaaacttaataccttcatccagatggaaaaggaagcgtgattacaacccttcctccttttttatgattttctgcgtgaatttcgccatgatgcttttctacaattgttttcgtaatcgccaatccgattccagagcctgactgatcacctgtataaaaacggtcaaagacgcgttctgggttctccccaaatccagtaccatcatctcgaatttcgatcgtaacctgattttcttctttccgcatacgaatttcgatgagagatgaggcgaatctaagggcattcccaataatattccagaaagcttgcttcattttatctgcgtctacctctatatgaaccgcataatcaccatcatactttagctttaacccgttctggtaagctaatggttttactgccgtcaccgcttctttcataataagttgcatgtcgaccacttcgtaggtgaaagcctcttctactgtttccagtcttgttaaataagaaatatcttgcacaatcttcttgagtcgctgcgtttcatttacgattacttcaagactatgctccacttcttctccgacaatcacttcgtctagaattccttccgcattcccttggattgccatcagaggggttttgagttcatgagaggcattttgaagaaattctttttgatcaaaatcattttttcgtagctgatccgttagttcttcgaaggtttccgctagttcattaatttcatcttttgacttaagttttagtggaggctgtggcttccgcatactaaatcgtctcatgtgatctgccagtagacgaatcggtcccgttatgcctctttgcatccaagcagcaaggagtaccgcaactgctgcagaaacgaagagactgaccgcctgggcctgctcgataattcgattaaagccttccaaactctctacctttgtaaaaaggacaagacggccaatttgctcacgagagtcattgattgacacttcctctgtaacaaatagcttccccttgttttcttcatactccatttgaacgtcttcatcgacatttgaataaatcgccctgtcattttggttataaataatgaactgagatgaaattaaattacccgccatttcaattcttctacgatccagtaaaccattcggtggctgattgcctttccaatttcgatcttcaagcatattgctaatttgaaggccttctttttgaagctgatccctcgcttcacgaacaaggtattcttgaaaaagatatcgaaatgagaccgtcgtaatgagaagaataaccacgattaaaacaacatagctaagaaatagtttcgtgccgattttaaccttcttcatcgattttataaccatacccccaaaccgtaacgattttcaaatccccatctaccatctttttacgtagccgcttcactagatcatcaatcaaccttccatcacctgcatagtgatatccccaaatagtttcaattagtttttctctagtgaatggttgcccggggttttgaataagaaaggcaagtacatcatattcttttggtgttaatgctatttcctgatcctctattaatacttgtctttttttcttattcaattggacatttttcaaatgaatttgataggaagattgcccctgttctactcgatcgatccgtttaaatatatttttaatccgtacaaccagttcacgtggactaaatggtttagttaaataatcatccgccccaagttcgagtcccaggatccgatctagttcttcatctcttgcagaaacgacgataactggtataaaagactgcttccttaacagtcgaagcagttcaagcccatctatattaggcatcataatatccaataccaataaatcgggttcactcgttttaagagcacttaacacttcagctccatcctgaaaggttgataccgtaaacccttctttctttaaatacttttctaaaatatcacgtatgttttgttcatcatcgataacaaaaacgtgtggcatttgttcactccgttctttagtccacctatactttcttcatattctatcctacgcttctcacacagtaaatccatctatgtagtggccacgcaaataaaagagatagggaagctccctatctctcatgatgactagctaagcttttcaattagctgatcaagtactttatttttttgtttaaccagttcggaagcctgttctctgtttgctttcatttcttcatgagcggccttctcttcttccgttaactccggacgttctccgctatctttccactcttgcatcttcgcttctttttcttcatgtgcagctgtgaatttctcttttagagtatccaactgagtatttagatcggcaagctctttttgaagctcatcaatgccgtcaacgcttgcatcttgatcaagtaagagatcaattaactgatctttcttttcagccgtttccattcgcagttcgcgctcttcagagtgacctttaaagtcacctctttttccatgatgacctccatgtcccgccaattcctcttgccccactactgcttcgtctatttcagttgattcgccatgcgctgcatgaacattagctccagcaattcctcccgctagcataaccgatgcgactcctatcatccatttgttcattttcatcaatctcccttcgtaggtatgttcttacaatacctattatggacaacaacctacgaagaaatttgtaagaatgatgtgaaaacgatgtgagttccagctatcgttttgttaattgttgaatgactttttcatctaaacttcgtacatgcaaatcgcgctgtggaaatggaatttcaatattgttttctgcgagaaccctattgatccggaaattcaaactactttttgtttctactgctgctttgggggatgaaatccaaataaacagttgaaaatctaatgatgaatcaccaaatccaagaaaattcacaaaaggcggcggtgtttcaagaacatacatcgagtgttccttttcttcttcagctacttgtaaaagaagtgatcgaacaagctcgacatccgatccgtatgcaacgccaatcggtaagacaagccgcaatcgagaatctccataggaatgattgacaacctgttcttcgatgaagtaggaatttggcattataattcgttcattatctaatgtgcgaataatggtagcacgcatattgattttctcaatgtcaccaataatatcgttaataatgacacgatcgcctactttaattggcctttcaaataaaataattaaaccagaaataaagttattggcgatgttctgcattccaaaaccaattcctacacctagaacacctgcaaagacggttaacgcactaagatcaatccctactgtcgttaaacttataacgactgctactaccattaacgtatagtgaaaaattcgattaaacgtgaattgtaatcctgtatctaaactgtaccgatcataaacggggggcatcagaaaagaagttgcgatatttgaaattcgattcgcaagcgtaataatgaataaagcaattaaaataagaaagagagaaatttctaccttaccaatagcaaccaaagggctaaacatccaactgttattggaataataaagtaatacaaatagtagaattgcgtaacctgtagtccaattgatgaaagacaagaaggctggacgaatcccatttggatactcctcttctgtttctctttttgttagccataatttgataaaaaatcgaataagaaaaagacctagtatgacagaaacagttatgattaaatcaacaatattcgcattttcaaagattgaaagcacaaaaggcaactcctttttgagtcagttaccttttatcatatcacggaaactgtaaccgaagcagtttcgatctcgtctaacatataaataactgaagtgggggctcagctatgaaaagatggcttcttccgatttttacttctatccttatactagctggatgcagttcaaatgaaggaagcaactccttagaaagtagtaatcgggttactgatcaaaccactgaacagagtaaagggagtgatgcaggagaagaaaacagttcatctgctgaagcgacatcggaattgcctgaattgctacaggaacgcaaagttatttttaacgctacgctttccttaagcgtggaagatttaacattagcgattaatgaaattaaggaatcgactaaagtatttgaaggttatgttgtggaagaaagcactttttcagaggagaacgcctttattggatcaatgaccgttcgtatccctcaatctgaatttgacgcttatctacgtaaggtagaaactctcggaaaagggacgccacaaaaggcaatcaccggaagtgatgtcacggaagaatatgtcgacctatcttcgcgattaaaagcaaaggaagctgttcaacagagacttgaatcatttctaaacgaagcaacgaaaacagacgacctgttagcaatatcaaatgaactttctcgagtacaggaagaggtcgaacagctgaaagggcaaatcaattatctcgaaaatcaaagcgactattctactgtaacaatctcgcttgaacaaaagaaaagaccaattccatcaattggggaaagagatttcgaaacactttctgaagccaaacatctctttataaccacatcaaacggactgcttgcttttttctccaaaacaatcgttctattaattggtctttctccaattcttttaccacttctgatcatcggtttatttttcttataccgctttcgaaaaaagacatagaaaaagccggccaaatgaccggctttttctatgcagctacatctcgttttgtgaacagtagccatgataataataagaaaacaataaagtagacaagcaatgtaattaaggaaaagccaagcgtcatactttcgataatgggagacccatcgaaataaacacttaaatccgtatttgcaaataggatgtatttcacccaatcgtactgacttaaaatatacgtaagctgacttcctgtaaacattaagaagatcgctagcccaatggcaagggatgaacttctaaaaacacttgatagcatgaaagcaaatgtgaccatcataagcaagttcacacttgcaagcgcatattcaacgatataatgaatcgccatactcgtttcggccacgtcaccacctgaataagtcaggtatggttgatcgacggcattaaaaccgaggaataacccaccgataataaaagatgaaatgtataagatgacaagagaaaatagcgcaaataatagtgttgccatgaatttggaagcaagaatttttgtacgagaagcgggtctgatcaacaatagtttaatggttccccacgaatattcacttgcaatcacgccagccccgataatgattgtgaatatggaaattaaactcacaacgccagtcgaactatccataaaactccaaatcgagtcactttctagagggggaatattattctccaatctgtattcattaatcgcaatcgaacgttcctgactgtctttaaaggctttcggcattccctctgaatcttttaaagtttcttccgcttgttggatcgcattttcagaattcgcacgccagtttgcggtctcatcacttgcattcatattggtaaaaatagctgctacaagaacagcggccacgacaagcccaatcatcacccacgttcccactcttctataaatcttcatgttttcattttgaattaaatgtagcatactagacaacctgctcacctcccgttacttcaaggaacacatcttctaacgtttttacagaggattggatgccgtaaacccggacgcccttttctaccaaaacggctgttacctctggaataagctcatgctcgattttaatcgtcaacttacgatccgcctgttcaatctcacaatcagggaaattcgctttaacagcatgaaccgcatgttccactggatcaacttcaaatgaaaccatcactgcttgatcattctgaacaaagtcgtttactcgctggacatcgatcattttaccagcctgaataataccaattcgatcacacatgagctcgatctcggataacaaatgacttgaaacgactatggcgacgttttcttctctcgcaagcgttcgtaaatattgtctgatttctcgaataccggcaggatctagtccatttgtgggctcatcaagaataaggagcttaggcctatgaagaagggcttgcgcaagtccaagacgctgcctcattccaagggaatatcccttcactttttcattgatacgaccttgtagccccaccaattgaatcacttcttgaatccgctcttttgtaaccccttttaccattcgagcataatggacaaggttttgatagcccgttagaaatttgtacatttcaggattttcaacaatcgcccctacttttacaatcgcattctcgtaatctgttttaatactgtttccatcaatgagaacttcgccttccgtcattctcattaacccaaccatcatccgaatcgttgttgtttttcctgctccattcggtcctagaaaaccaaatacttcccctggatagacatcaaatgaaagctgatcaatgattgttttctttccaattacttttgttaagtctcgaatctgaacaactggttttacagccatgttacgcctcctcttggtacatcttcttcaaccaatccactattctcatacgatctcgctcgcgaatggtttcaacatcttcgagagccagtaccttaccatttcgaatcgcaataaccgtttcaagcaaaggttcgatttctgttacttcatgtgtcgtaatgatcaccgtttgtttttctaaatcaataaatgaaagtaaaccttttacaattgaatctcgcaccatcggatcaagccctgataatggctcatccatcaaaataaccggcacttctcttgccagggtgagcgcaatctttaacctcccccgatttcctttcgataaatgctttaccttttgactcgaatctacatccataaagtcaacaatatcgttcgctttttctacatcaaagtcctgaaattgtgaagaaaagaaatcgattgtctctttcactgaaaagaatgaataatacgcatccaattcagaaagataagccactttattggctgttcgcctagaaaccgcttcttggtcaatcattactttcccttcagaaggtcctacaagacctgcgatcattttcatgaacgtcgatttcccgctaccgtttgatccaacaagaccaataatcttcccttctggaatggttacgttcacatccgtaagggcatgttttgtaagatatcgctttgacacgttctcaaatgtaatcatgattgattctccttttcgttcgtaacgtaagtttgaataccttcaatcatatcttctgatgaaaaccccatttgcttcatttcttcaataaaattctggatgtggttaatcttaagctgttctcgaagttcgaccagtttttctttttgttctgttacaaacgttccttgccctcgcttcgtctccacgatttccatcctctccagttcattgtaagttctcgacactgtattgggattcactcctgattgaatggccatctccctcacagaaggaagtttttcaccagttttccgttcacctttaataatttcccagctaatgcgatccacgagctgcaggtaaatcggctttgagggattaaattcttctcccatccgttacacctccacttttcgatcaagtaaccagcaagtaaacaagaaaatgacgattagcgtgataaggtcgaaaaccacgttaccaaccggaaatggaaaggttgaaacagttaaaccaaactcctgctgactaacttccatatttaacggtgaaggcagttgcacatacccccactccacaagcacttctgaaagacgggttccactaaaccacgaacctaaccaactaatgaaagcaacaagtacgaggacaaggagaagcgcccatttgccaatataggttttcaacacttgataaaacgtccaatagaagataagccaaattcccatgtagatagaccctgtcacaatgacggctaaaaaataaaacccgaacaaccatacgttgtcaattggaagctccaaagcacttgtctctatgttgtaagctagaagagataagctacttacaagaccaattgaaattagtattgctaataatccattcaggaatttagccccaagtaagcgagctccagattgaggattgtggagccaaagatgcaggtttcttccttcagtgttaagactaatcaataagtacaggggtagaaagaaaacatgtatcgctgttaagacaccaccaataatggcggttaaataagggaattcccacctttctgatgctaagaaaaaaccgatcatcaccagtaaatcaaatgttaggacgcctaaaagaagggttcttgttacacgaaattcttttcgtaacagcccgctccaattcatcattttatcactcctcatattgtgttggtgtattagttacatagtacaccgatactttggaaaggtcaatcttttttagattaaattttttcttaaaaaatgatctaaattgacgtttttttcgttagctttgtaagacgattgtcagtaaatgcttatatgatagaaattaactaaaagaggtgaagaatgtgaggaagatcttgttgcttgtcgttggcgcaattatctggctcgttcttgctggttataacaataattatactgagccggcgcaagaagccgtaacaaacacaactgaagaaaaccaatctgagttagaagtagaagaaatggagaaaccggatgtcttatcggatgaatttttacttctggatgatcagaagaaaaaaattgagaatgcaaaagaatctcaggacgttcaagaaggaattgaaccagtgcaacttgaaattcccgccattgatgtgaaagccgatattgagaatgtaggcgtcttagataacgggcaaatgggtgtcccagaagatatcaacaaagttggctggtttgagcccggctttaagccaggtacaaaaggaaatgctgtccttgccgggcacgtcgatagtaaaacgggaccagctatcttcttttatctcgaaacactatcaaaaggagacgaaattattttaactggtcaagatggtgaaacaatgaccttcgttgtaaccggtaaagaaagatacccatatgatgattctccaattgagaaaatttttggaccaactgattcacgcacattgaatctcattacatgtgttggcacatttaatcggtcgaaagggacacatgaagaaagacttgttgtgtcaaccgaattaaaagaagacgatgctgataaaaaggaacaagtaaatcctgacgaagtaccagatgccccaacaaaccttagtgttagtggcaactttctttcgtggcatgctgttcgtgatgaaaatgtggtaggttatcgaatttataaagccgatgcatacggagtatacaaacaaattgagagtgtatcaaatcttgaacgaaagagctttacagatccagatgcctcaagctcttcctactatgttacagcggttaatatttttggaaatgaatcggcgccttctaaaaaaataacttcagacgaataaaaaagagcccagctgaaattttcagcagggctcttttttgtctatctaaaactaactcgctttcttcatttcaaattcaacaagataacgattaaagtagtcatctgtttcactcttaatcactttataaagcaacaatagcgcaattaagtttggaatcatcattaaggcattggccatatctgcaaaggcccacacggttgttaagttcgcaactgttccaacaaagcacgctagtatatatacggcaccataataaatcgttatttttgtaccaacaaggtattcaaaacatttatacccatacacgtaccagccgataatggtcgagaaaccaaagaaaataacagagaacgtgacgatatattcaccaaccataccgagacttgacccaaaggcagcagtcgttaaagcacccgcttccaggtttggatcatgcacaactcctgaaagctctcctcctgtaggatcccaaaatcctgtaatgaggagaacgagcgccgtcattgtacaaacaataattgttacaataaacgtacccgtcatagcaacgagcgcttgttttacagggtgatccgcttttgcattacctgcaattagcgctgctgtacccaagcctgcttcattagaaaaaatccctttggaaacgccggacttcacagcttccattacaattacaccagaaaatcctcccacagccgatagaggagaaaaagcatacgtgaagattaacttcattgctggaataaccgcatcgaagtttaggatgatgatgatgaccgctcctactatgtagagtactgccataattggaacaaagaaacctgcgacagaactaatccgtttcacgccaccaaaaataataagtgctgtaagcgcagcaaggataacccccgttacccatccatcaatgttaaaactttcatcaacaacacttgcgatcgtattcgattgaacgctattcccgatgccaagtgaagcgatagcaccaaataacgcaaacgagatcgcgagccacttccattttggaccgagtcccttttcaacataatacattggtccaccagcatactcaccattatcatttttcactcggtatttcatagcaagcagggcttcaccatatttggttgccataccgacgagaccaacgacccacatccagaagatagctcctggtccaccgatcgtaatggccgtcgcaacacccgcaatgttcccatttccgatcgttgccgcaagggctgtcatcaaagctttatagttactaacatcaccttcagcactgctgtcctcttctttttcttttgaaaatgccaatttaaacgcatacccaagtttccgaaactgcagtccttttaaaattaatgtgagaaagacacctgttccaaataacaaaattagacttggtgctccccaaagaacgccgttaattttctgtagccactctaagatgttcattctctctactcctttatgttaacgctttcatgcactgacctataccacattatcattagttcgctttcatcgcaatttttacgtcgaaaaatgatgaaaaagtcactatttatttttctatagctatgtagaaaatacaaggagtaacattatccaacagaaaaaagagacttaacggacgttaagtctcccataaacatctactctatacctgaccgatcgcatcactgatgctaagatcaccgtcaagaacttcgaacgtacgattaaacgtatgttcattctctagaacttcagcaagaacagccgctacatcttcgcgaggaatttgaccggatttgtcttctaatgtttctgaagctctaattttacctgtacctgggtcatttgaaagacgaccaggacgaagaattgtgtacgttaagtttgttgcttttaagtgctcatcggcacgtttttttgcatgtaagtatggtttcatttcatctggtcctttttcaggatagtcggacccgactgtgcttagcatcacaaagcgcttaataccctgttgcttcgcttcatcaactgctttaatggcaccttcctggtcaatcatgattgttttatcggcaccagtgtgtggaccggaacctgcagcgaatatcaccgcttcacaaccgtataacgcttgtgagaaatctttctcaagatcaccaagtacggttttgcctccagcatcttcaatggctttcacttgatctgtatcgcgaatcataccaactggttcgtgaccgcgctcagctaatttcgtaattaaatgtgttcctacttgtccatttgctccaataacgagtactttcatgacaattcgtcctcctttaaaaccttatcacttgttatattccgcaaattcatctttttaaaccaatgaatgtgctaaaccctaaaagcatacctggtttcgaccatttttctttgctctgtaaagagacttgtctgcttgttcaacagatgccattaatggctttcgctggtcgagttcagctagtccaattgaaacagaaacatttcgtatctcttctcccatttcagtaataaattgctgttcactcaaacttttctgcaaggttttcatccgattgtaagcctcgtccttcgtagccgcttcgagcataacaataaattcctctcctccgtatcgtccaacaagccaatcatcctgttctgaaagaaaagcagcaaagtcagcaagaacacgatcgccattcaaatgaccgtatgtgtcattaatttgtttgaaaaaatcaaggtcaagcatggccaccactttcaataaatgactctcatggtctctcgcttttctaagaaaacttctaaggtttaaaaggcctgtcagagagtcgtgttcagcataaaaacgaagctgctcactcatctcaagattttttgtactcgtttgtataaagaaatacatgattagcgcagatagctgaaaggaaataaaccgcattaaatacgaatagaccgtaatgtcttctgaaataatatggccaacgatcgcatccgaaataaaccagatgccaataaaataaaaaaacagctttaaatatgtaaggttttgaacaagcttccgtcttactagcatggttacaaaggtcgggattaacaaggtgaaaaagagttcgaggtaaataaattcacctggaaaagcaaaacgagctaagataatgatgattagcacgggaatgccaaattgatagccgtggtacaaaacaagtatcaccattggaatggttcgcaaatcgaacagataaccgtctaacgaaactggaagcatatagagacagataataccgatggccacaatcaggatatgcgagactgcagcaacgtggttgggccaccgtttttgaaaggcgagatagtacaagctttgaatgcaaagatgcataaacaataaaattgagaaattagctaataaagattgcatcgggccgtgtcacatccataataatttttttattgtttcttacttatagattctacacctatcttatcgcttttggaaaataatagaatgttctaatccgtttgttatgaagaaaaccaagtatcactccttcgggagaaatacttggttttcataataagcggccaggttatgacctcttcacttatttagtataatttttgcaaagcttctttatcaaatggtaacaggtcatctgcacgaccatcgcgtactttacttacccattcaggatccattaataaagagcgaccaatggcaacaaggtcaaattcctcattttctagctttccaatcaagccatcaagactagttgtattggcacctgagaagcttgtaaattcgccatcaagtccaacggaacctactgaaataactggcttaccagtcagtctcttcgtccaacctgctagattcaattcggaaccttcaaattcaggctcccagaaacgacgtgttgagcagtggaaaatatctactccagcttcaacgagtggcgttaggaactgttctaattcctcaggtgtagtggcaagcttcgctttaaaatcatgcattttccattgagaaaaacggaaaataatcgggaagtctggaccaacttcacgacgacatgcttcgataatttcaaccgcaaattgcgttctacctacaaggtcgccaccatagcggtcagtacgttgatttgtctgttcataaaagaactggtcaatcaaataaccatgggctccgtgaagttcaatcgcatcaaagccgagtcgcttcgcatctgctgccgcctgagcgtacgcttcaacgagctgttcaacttcttctgtagttaaaggctcgtttactttctcacccgaaagtgctagacctgatggcccaactggttgtgcttcttcgtttggcagttcacccatttttcgagtcattccaacgtgccaaagctgaggcgcaattttaccgccagcttcatgcacttctttgacgacattctcccagccattaagtgcttcttcaccatgaaatactggaatacttgcacctgaaacagaagaaggatggttaatacctgtcccttctgtgacgattaagccaacaccattttcggctctacggcgataataagcagctacatcttctcctggtacatttcctggtgaaaaacctctcgtcattggagccataaccgtacgattttctaaagttaatttttcactattgaacgttttgaataacgcttcggttgtttttgttgtatgtgtcaatttgatttcctcctctatccttcgtgcacttcatattatttcaaagtcacattttaaatgaaagcaatctgtttgtgtgatgtgctcttggcgttattgttcatgaaaaatgctgttaattccgcgatctgccaaatcacaaaaaaaatcataggcaaagcgcctatgatttcctctctgtactacttattctcatatttagctgaaagaaagcctaaagttgcccccaatatggcgccacctagaacttcaacaggttgatgtccaagaagctctttcaactctttttctctttccacgaattgcatgctgggataatcgcctgagatcgtcgccaggttatcttctaaatcgtttactagagcagcaatttctccagtatgacgcctaactccctgagcatcatacatcacaatcactccgaaaatcgtagcgagagccgtttctgtatgacgagatcctttgtgtgaggcaatgtaagaagtaagggctgcaactccggcggagtgcgaactcggcattccaccggttgtcgcaacttgtttcaagtcccattctcctgataatttcttatgcgttaggatcttcaatccttgagcaattgcgattgacgacaccgccgttaaaattcctctgttcattttttgcatctctctcatcctccactttgccatcttttctgcccgagcagaatgttctattacacgcattacccttttcagaggaattctacgcagagagagtgctaatttagaaaacaagttgtttttatctatgctgatctacaagaataggattaccatcaggatcttctattgtaaaactcgctggcccttcacttgaatcatctgcttcagaaaggatattcacaccgttttcttttagcttattttgaaggacccgaacgtccgtaaaggactcaagattttcagcgttctcatcccaaccaggattaaacgtaagaatatttttctcaaacattccttgaaaaagaccgataacggtacttccattcttcataatcagccaattttgagagatatcccctcctaacgattgaaaacctaatttttcgtaaaaattctttgaagcttggatatcctttacacttaaactgacagaaaaagctcctaaattcatctttctacctccacatcacaattgttataaaacggttcttctccattccaccctttcttaccttcttttaattcttttcacatagcgttacgtatgaagcatggttctacactagaatttcctcttcaatgcttagcactactcttcataatcaatcttcaatccatcaacgtgctttcgattcatcaatttctttttctttctgttctcaacagattcaaaaagaatatcaaaatcataattctcaggatacagttcacttgcaggaagaaggagctttaagcgtttggcgtgtattgtctcttttttgccattgatcataacaatcacgttcccaaactcatcgatcggtttataaacgattcctttttcctccatagaaggtatcgctacgctgtctccaatggcatactgttcaaagtgcttttcgagcttttgccgtcgcggtttttcgacttttttacttttgagctgttgttcatagtgccagtcgcgctgatcgccctgatcgtaagtttccttctcctgatacgtaatttcatgagcacgctcaataatcttcggatgcatgccaagcctgagggcaattgcaaatgcctgactttcacccggtatgcccattcgcagtttaaatgttggccgtaatgattctggatcaaactccatggatccattctcgaaatcaggatgagcagatgcaaaattcttcatctcgctatagtgtgtcgtggaaagaattgtagcctcaaggcgatttaattgttctaaaatcgatacggcaattcccatcccttcaccagggtctgttcctgaaccaagctcatctagaatgacaagagcatcaggtccagcatcttgcaaaatggtaatgatattcgaaattcgtgaagagaaggtacttaacgattgttcaatactctgtccatcgccaatatcaacgagtattttgccaaacattccaaacacagaagactcttcagccggaatgtgtaagccacattgcaccatcatcgcaagaagaccgactgttttaatggcaacggttttccctcctgtatttgggccagtaatcactaatcctttatatcctttcccaagttcaagagttaagggaacagcttctttagctaacaaaggatggcgaccgttgcgtagttcgatcattggctcaggtgatagctgaacttgactgccatcaatcgctacactatattttgctttagcaaaaatataatcatagtgcgtcatcgtttcaatgttaattgaaatttcctgcgcatatcgctctacttctcctgttagcctgctcagaattcgctgttcctccaagtattcgtcagcttttaactcgtttaattcgatctgaacttttcgaacttcttctggttcaatatatacggtcgacccacttgacgattgatcatgaaccgttcctttgatttgtttacgatattcctttttaactgctacaacataatggccgttacgatcactaataatggtatcctggagagcttttcgtttcgatgatgaacgcagaagctggttaagtttctccttcacccgttcttcatatacagttattttctttcttattcttcctaactctttactcgcagtatcgtctatttccccatttcgtatcgcccgtttcaactcttcttcaatatccgtaagttcaaaaagagaatgaacatagctcgaaattgtaggagctaaccactctttccctgccatgaactgcttcattcttcgtccactttcaatcaaatcaagcacggttgtgagttggtctggtcgcaaagcaactcccttgtttaattgcttcatcacttgaatgatgccatgaaggccatgaagaggaacacttgagctcttctttataatcgcttttgcttctgttgtttcatttaatctgttttgtaccacttttgtatcatgtgagggtttcagtttctgaacctcatccttcgcttcttcggaaagcgcatagtgcgcgatctcgctacggattttatcaaattcaagtgttgtcatcgtttgttcgttcaattttcttcctcctcgattgttgtttgttgctactataaagcgttcattcatttaacacagtcacacgctcccaacgaaaaaaagagctacaaatgaacacaggttcactcgtagctcttgtatataagggtagacttccccattccccgcttaaaaagcatataaaaagccgcgcacagaggcgcagctggaatggtcgtcatcattcatgagcttaatctgtgttcttaactattttgacagaaggcatagttaaataagcatagtatttatgcgtctttaaaaaccaaactgtctataaaattacgttagttaagaatcaccgataacataaacttttcccctttttcttttcaggttacacttattataagggagggcgtcacttctatcaagcccagatctaaaaggcgtgagaagtcgtcccaccatcaatgacgaggttctgcccagtcgtgtagctagaataaggtgaagcgagataaagaacagcaggaattagctcctccaattgaccaatacggtgcatcggattactgttcttaattttatttaaaagtattgggttctcaagcgctttttcgttaaatggtgttttaatgaagccggggctaatcgaattcacggtaataccaagtggagatagctcttgtgctagctgcttcgacaattgggcaactgccgctttacttggaccataaggtgtggagaatggcaggccaacttcacttgccatcgatgcaatgttaataattcgtgatccctgttgttctttcaaatcagggagaactgctcttgtcatcatataaacagatttcacatttgtttccatcacgtcatcccattcattaggttccaactcttcgatagatttccgcaccgttttacctgcattattaataagaatagtaatagaaccaagcttctcatggatatcagttacgaactctttaatactctcttcctttgtaacatcataagcaaatgggagaactgttccatttgtttctttgcttaattccactgccgtatcttcaagtatatttgaggttcgtcctactatagcaactttagcgccagcttcagagagagcacgagccattgcttttccaatccctcttcctccacccgtaacgacggctaccttgtttgatagatcaaaatacttcattttcaacctcctcctctactttctctaccatacagaagaaatttattttcttcgactcaaatgcattacaccgaacaagaaagcgctcttttctatcattcgacaatttccagaaaaaatttatttggttttataaaggttattgtggtaatttgttagaatatttagtattaacatacataaaggaggagttcttattggaagcagcattaaatagtattagtggattcgtgtgggggtggcccttgctcatcctgctcgttggaacgggtatttacctcacaatccgtcttgggtttctccaattcaccatgcttccatatgcgttgaagcaagccttcacgaagaagcaagataaaacatctgaaggagatatttctcatttccaggctttaatgacagcccttgctgctacaatcggaacaggtaatattgccggtgttgcaacagcggttttcgtgggaggacctggtgctgttctttggatgtggatcagcgcactcttcggaatggccacaaaatatgcagaagccattctcgcagttaaataccgctctgtgaacgcaaaaggtgaaatgtcaggtggaccgatgtactaccttgataaaggccttaatatgaaatggctcggtatgatctttgcattctttggtgcttttgctgcatttggtattggtaatatggtgcaatccaactcagttgctgatgcagtggctacttttggtattgcaccttggattaccggtcttgtcttaatgttttttactggaatggttattcttggtggaatcaaaagcattggtaaagtaacagcttactttgttcctgtcatggccttattttatgttatcggaggactagttgttattttcatgaaccttgagcttgtgcctgctgctgtatcgcttattttctcagatgcctttacaggtgaagcagctgctggtggtgcgattggtgccgttattcgttacggtgtggcgcgtggggtattctcgaatgaagctgggcttggatcagctccaattgctgctgcagctgcgaaaaccgattatccaggtcgtcaggctcttgtatcaatgacccaggttttcattgatacgattgttgtctgttccatcactggaattgcgctcgttatgggagatctttacggaggcgacttgaatggtgctgcgttaacaacggcaacatttgaaaaattccttggcgttcctggtgcactcattgttacgattggtcttattctttttgcttattctactgttcttggctggtcgtattacggagaaaagtgcttctcatatctgtttggagacgcatcgatcaaatattatcgcttcgttttcgtattagccgtttttgtaggaacaacgttaaaactaaacgttgtttggttacttgcagatatcttcaatggcttaatggcactaccaaacttaattggcctactcggtctatctggggttgtggttgctgagacaaaacgtttccttgagaaagtaaaagaagaaaaacgtgaggcgcattccacaggcgtttcaaattaaaaaggtgtcgggggaaatacccccaacaccttttcttatgagctttcttccatttgaaactgctgttgagcgagttccttataaagattgctgttcataaacaattcttcatgagtaccttgagcggatacacttccattttccattaccaatatttgatctgcatggacaaccgttgaaagacgatgagcaatcacaatggtcgttcgatctttcattaaattgttcaaggcacgttgcacttgaacttctgacgtactatcaagactagacgtcgcttcgtctaacaaaaggatagatggatttcgtacaattgctcgagcaatggcaattcgctggcgttgaccacctgaaagcttgattcctctttcgccaatctcagtatcaagtccattcggaagatcctgtatgaaaggaagggcatatgcctgactggctgccgcttcaatatcctgatccgaaaattcctcttccaacccatatacaatattttctttaatcgttccggcaatgagtggactctcctgtgacacatagccgatttgcttccgccaggatacaagtgaaaagcgactgatctttttatctcctagtttaatttctccttcttgtggttgatagaagcgttcaatcaaagaaaaagtcgttgtttttccgctaccgctaggcccaacaatagccgtaactttacctggtggcacttcaaaagatgctttcttcaagaccatttccttcccatatgaaaattcaacattattaaatgaaaggacttgtgccgggtttttgacttcttctccatttagacgctcttcactctcatgatcaagtaagaattggagacgttctgttgcacccatcgctttttgaatggctgttaggaaacgcgccatcgaactaaacggaataataatctgaaacaggtataaaaggaaggcaacgagttctcctgccgttaattctcctgtcgacacacgtacgccgccatatccaacaataatgacgagaacacccatcaacaatagtgtcataagaggcatgagaagcgcataaatttttgcttccttcatactatagtcaaaaacattgtttatgccattctttccattctcctcttccacattctctgccatggagaatttcacgagccgaacttctgataacacttgagtaattgttgccgtgaatttggccgtttcttcctgcaaacctttcgatactttatacattctctttccgataaaacgaatgccaatcatcattattggaacgacaccaagtaagatcgccgttaatttccaatctaagtaaagtaaaatacctatcgaaccgacaatggagagcgtgctcgttaacaaactaatcaaatgatttgatacgagatctttgataacccctgtatcgtttacaatccgacttgtcgtatcaccaacacggttttgatcaaagtactcaacttgcagagaaagtactttcttcattaatcgctcccttaaacgagccacgactgtttcaccgatatataaaagcaaatacattgataaacccgaaaaaatcgcttgaacgataaaagcagcaattaataaagtaataacccctgacgaaagcgtgtttcctgaaagctgatccactagatttttcgtaaaaaatggaacgattaatccagcgatcgttccaatcatactcatcgcaatagctgctgctacgagaggtttcgacgggtttgtgtctcggattagctttgaaagtccacgccagttcatctttttatcttgatcgactacctttgccattctcatcccccttatgctctcttcttagtataccgtctttacatgtaaaatcatgaagataaattcgttttagatgtaccgtcacgcatctactattcccccaatagaaaaaggaaggggcgctgcccttcctttttcattcatcttcaattagaagctttctttcactaccatgcgctcaattgggaaacgtcctgttccatgcgcttcagcagcggctttcccaacagagataagcatcgtcggaacatatcgtgcagggatgttaaattcttcaacaagtgcaactggattaaatccgcccattgcaactgtgtcataatcttttgcttttgcagctagcataaactgcatagcagctagtgaactatttttgatcgcttcacttaatgcaaatccttctcgctcatatgcacggtttatttgaccaaccagcgtttccttcacagcgttgtccatataacctaattcaacagcctggccatatatttcttctgcatgcaagttagcttcaaggtcaccaaggatcacaatggtagctgagctatcaacaatttgttgttgattaaaagcaattggtagaagcttttctttctgctcgtcattttcaataacaaggaacttccaatgttgtagattccaagaagacggtgcttcaatcgtagcatttagcatttcattcatcacatcttcaggaattttgactcctttttcaaactttcgtacagaatgacgatctttcattacatctaaaacattctgattttcttgtacacttaccgacatctttgtttctctcctttgaacctatcaataattttctttttgtctactatcttcaccatttatacagtaacacatttatttacagttagaaaacagaaattgctagcagttgtggcagcatctacccttcttgccattgtttttatttacccagttttgaaccccacgcttcacctgttggataaatgaaggtgcttttcgttccggaaaatccagcgttagttttagcttagataattcagctgttaacttgattgctaattcaggataagctaaatatagtgcacggtaagacgtttgatctaattgaatgagctcaacatcagtaaccgttttggcatacaaattttgatgtacaaaaatcgagcggtttccgagaacatcatttgccccaagaactgcaagcggctcttccatattatcagcatgataaattgcgatgcttccacttctaataatgtagacatcacgatttgtatgctctggcttaatcaaaaacctacttttgtttcgcttcattaactgacctgatctctctaatcgattccaatctttcatattaagcttactttcgttttttgccaccagacttgtactcatgtctgctcacccccattaggttattggaatattttttattacagttacaatataaaacaaaaacaatcgtttataattgtttttgcttcaggctttggataatatcacgaatcgtatattgtttcaagaatgctgttaagtggttctcagcatctgtaaaaatatcgccaagtacatttgacaagttcgctccaacaaggcagtactcattcgaatcaggacaccttggttgaagtgaaccgatagaagtgaggttatagatcttatcaagcgttacttcttccactcggcaagataaagtaaaaccgccaccagcaccttcttttgaaacgatatatccgttttttttgagtaaactaagaattttcctcatacgaacgggatggaccgaagcacttccggcaagataatcacttgttgccatctgccctggcttaattgcgagtaaagccagactgtgtacggcgagagtaaaatcactattcatttgcagcgcctcccaacactttcttccacttccatcctatcgtatttcaattattgctggcaagaaaattttaacagggaactacttcctccgactcatttcgaagttcttttagttgtgtcgaaagttccatgaaccattccttgtcttttgtgatcaaggcaacttcaataagatttagcaagaaggattcatcctgttctaaatcaggttcttccagctgcgaaatacgattctggaaagtttcgattacttttccaacagtttctggattatcacattctagaacgaatactttaatcgttccgagataattattaacagattcaacgtagccatgaattagttcatcatggactgactttccttttacccaatcacctttttggtattgtgtttgttgatgtagttgattcatcattatattacctccttatttggaagactagtttgtgttccaactgagtcaaggtatagtgtaattttaaatattacagttcattttgtcaagaagagatgctttcaattaattgaaatgcttctgcaagtagtttatacgacttcagtcgggcttgaaaatcatgtgtaatggtattaatgatcacttcatccgtttggtattgattggccaattcctctatttgctgttttacctgggtcggattacctacaatcattctttttctgttttcccgaatccgctctttatcaaacactgtatatggaaagctacgtgcttcatcaggggatgggaatccgtctcctgatttaccttgttcaattaataaaatcgataaatccaaactagaagcaagatattctgcttcttcttctgtttcaccacaaatgacgaagatcgcaacgtttgttttaggcgcctcgttaaattcagatggtacaaaacgagaacggtatttgtcaaccacattcgtcccaccatatccattaatgaaatgtgcaaaggtaaacgctagtcctcgctgcgcagccatcattccactagccccacttgatcctaataaccacatttcaggtgtcgtactgccaagtggtgttgcccgtacgttcattctctgtgggtcttccccatttagataggcggctaactcattaacctgctctaaatagttgtcgatccccatactgtttcccccagcaagggcttttgtaacattcggcatacctcctggcgcacgtccaagcccaatgtcaatgcggtttggatttaacgtttcaagcatccggaagttttccgctaccttatatggactataatggggtaataatacacctccagaaccgatcctcatccgctctgtattcgctgccaggtgagaaataaggacttcaggactagatccagcgaggcttttcgtgctgtgatgttcagaaacccaaaaacggtgatagcctagcttttctgtttctttggcaagtgtcgttgtttctctaagtgcttcagtaggcgtattgcctcttgaaacaggtgattgatcaagtacacttaatttcatattccgtcgctcctttaatgtaaaaaatatcattacagttaatcttatcaaaagaaaaagggtagaccaattaatttgcttgcccgttattagttgttaccctttttgcaaacaaaaaaacggactgtcacgcccaaatggttacgccagtccgtttcttaactaaataagctatatttaaggttgttacaaaaaaacttactcttctgcaacaacaagcttaacttggtgattgcgaagcattgtttgaatgttctcttctggaagtttgtccgtaataattaaatcaatgtcttctagctgtgcaaatgtaaaaaattccgaacggtaaaactttgaattatcagcaagagcgatcacatattgagattgttgaatcatctttcttttcaacataccgtcttcttcatgagcaattgttaatccattatctaatatgccaatgacaccaataaatgcaatgtcggcattataggagccgactttttcgacgactgcagatccataaagaaaacgatgatccttctctagttttcccccgagaagatgaatatcgaggtgcgctccattcgatagaatatccgcctggtgaatagagttggtgataacagtagcttgcttttctacaagaaattcggcacatgcttgaaccgttgtagatgcatcaagaataacaacgtctcccggattcacatagtttgaagccatctttccgattcgctgtttttcttcggataccactttcaaccgatcgtgataagactggatctcatgacgtaactcaggaagcacagcgccaccccttgtcctcgtgaccgctccttcttcttcaagctttactaaatcacgtctagccgtatctcttgatacgagaaatagctcgcaaatgcgttctactgaaatccgttcatattgttttaaataatccaggatcgctagcattctttcttcttgatacatcggtacaccccatttccatccacttacattgtaagtttttataagtatattatcaatagtaaataagtattattaattaaatttaattattcgtaagtaattgtaagtaatcaattctttttctctctcttaatcattcctacaaaatatccttttgcgctttacatcgaaataatgtattatttaaaatatttacaagataactggaggcaaatcatgaaggaaaacctagaaaaaggcattttattaatttcctgtccggataaagaaggaattgttgcagcagtctcaacgtttttattttcaaacggtgcaaatattatacattctgatcagcattccactgaccctgtgctggggcacttttttatgcggattgaatttagtcaccctcacttgaatcatcagctagacgagttgaaacaagcttttgaagaaacggcaaagccctttgagatggaatggtccattacggcttcttctaaaaaatcacgcctcgctatttttgcgacaaaagaagaccattgcttacaagaactactctggcgctggcaattaggggaactgcatgccgacattgctatggtcattagtaatcaccccgactttaaagagctaactgagaacgcgggaatccctttttatcatgtgccggttacaaaagagtcaaaaccagaggcaaccgccgagcatcttcgccttcttgacgagcacgatgtcgatacggttattctcgctaggtatatgcaaatcattcctgaagagcttattcacctctataacaacgaaataattaatattcatcactcttttctgccagcctttatcgggggtaacccttaccaacaggcgtttgatcgaggagtcaaactaattggagcgacggctcattatgtgaatgctcagcttgatgagggcccaatcattgaacaggatatcactcggatcactcaccgttataatgtaactgatttaaaaagacatggaaaagatattgaacgcattgtgctctaccgcgccgtgaaatggcaccttgaaaagcgcgtgattgttcacggaaacaaaacaatcgtctttcaataagggttccaaaagaaaaagcaccccattcgggtgctttgcttattttagtaagcccatactgcgccaacgataatcaatagaatgaacaatacaacaattagcgcgaagccttgaccataaccgtaactcatgcgtatccctcccttcatgctaatttaacaagaaaggtttagtagccatatccgccgtaaccgccgtagccaccttttccgtaaccaccacattgaccgccgtaattagctccgccaactgcagcagctccaacgataatcaatagaatgaacaatacaacgattaacgcaaagcctttaccgtagcctccgccacgtacttgctcttttccaccactcattagaaaaccccctttcctggaaggttactaacactatatgtcgcaaaggaaaagaagggttaggctggtgtccatagttcggtagaaatatcatttcaacttatctgtcaccttcaaataatgcctgctacagctagtaaaataatgacaagaagaatgaaaaggataagaaacaaaatcaattcatccattgagatccccccgaaatcggtcatttactattttatgtcactctgggcacctaggtgaatgaaacctcactgacacaaaaaagaagccccttcctaaatgaagaggctgttgatttatgcttattccattgtatttcctttagctgggatcgggttttcatttaaaatacgcgcaaaatgaattaaattataggccattgttttggcgtgacctgttgaaaagtcatttttctgtccattcgcttcgatgtaggaatcgcctggtccagcttctcctacccaatacgcatccacgtttggcggaactgttagtccaatgtgagaaaatccatataagattgaagctgcagcgtgtttagcaccatcttcattacctgtaatcacaacgccgccaaccttattataatagagggactggcctttctcgttcgttaagctacttcctccgtataagcgttcaatcgcaagtgtcgcaatgctacttttttcacctagccagagaggtgtacctactataagaatatcagcagccttcaccttttcaaaaatggctggccactcatctccatgaccttcatcttccgaaactccgtaagcgattttataatcagctaaccgaatactttcagactcaattccttctttcttaaaaatcgcttccgcttctttgtagagagcatccgtatttgatgccgtttcacttgttttaagcgaacaatttaaaaataatgctttcatcctttaaactcctctccaaactatggttattcctaccatctttttacctcttctagagttatttaaacaaatcgttatgcaaaaaaacgacggaagcaaaaaaaaccacttgaacgaaacttcaagtggtttttactttttattcagttataagcaatagcggtggctcatttaaaaacttcatcatgttttgcccatcttccgatacttttgcccatgccggtgactgcattgcgtcttccaattgctctttggattcaaactcaattgttgcggttaagaaatactttttatcggtgttcattgcagctgtaacataattcacttctgcatgagtgacattaggaacatctttcactaaagccatatgattcttttcataatagttcttaaattcttctacgtgttttggttcctcataaagcacaacaattttagccaagattcatcgctccattcattgcatttcttataccataagctaagttaagctgattagaaagtaatatgcacctggtggtgttcactcatttctttttgcgaccagccactactttaccaataataataattagaacaatgacgacacttgtccaaagaaagcgggtttgatattcgtccaaattagcaacgtcatgtccaacaatcgtgtaaaggatcgttccaggaatttgtccaagagctgtcgctacaaaaaaagagcgaaacgaaatctgactaagccctgcaagaaagcttataaaatcaaaagaaacaatgggaattaaccttgcgacaaaaattaaaaagaaaccgtttttgccgctgtaccgatttgcttgatgtaggagatgattctgtttcgtaactctctcaacaaagccggcacctagaagccttgcgagccagaacatcacaatggcagctgccattcctcccgtccagctgattaagaacccaattggaatgccaaatgcgagcccatttgctgcggtaattacgaatgatggcagcggcgccagtatgccctgcgcaatcattaacgctatgctaatgattggcgcccacactcccaaagagcgaaagtaatcagctaggagagaaagtgattcaagtgaaagcatggagcgaatactcgccaaccatggtgggttgattagaaaggtaatcaggattgtaaataaaagggctattcctatccataggaaaggatttgcggactttttcataaataactcctcttctgaaaaaactatagcgtatatgctcttaacatgaatgttctattgacgaaatcaagtgacaatcatacccattgagtatgctgtaagaaaaataatagttgttttacgttcccccaaaagaggaaagcatcgatataataagacaactattacataggaggtgaacccttacaaatctgtaagggccttattggaactaattaaagtaattgctgttctgttgttaatcgtcttaacggcgtttttcgtagcatctgaatttgccatcgtgaaaattcgaaggacaagaatagatgcgctcgcaagcgaagggaataaaaaggcaaaatcggttcaaaaagtattaggtaacttggatggctatctttcagcctgtcagctaggaatcacaattactgcacttgctttaggttggctcggagaagaaaccgtagagcagctcttgcaccctctgtttgagctcatcaatttacctgactccattgctacacctgttaccatcgcgctagcttttgcgattattacgtttcttcacgttgttcttggtgagcttgctccgaaaacgtttgccattcagaaagctgaaagtgttagtttacttcttgctggaccacttatctggttctaccgtatcatgtatccatttatttgggctttgaatggctcagctcgcggtatcgtaaggttattcggacttaaatcagcgaatgaacatgaacaagcccactctgaagatgagcttcgcctcattttatctgaaagctacaaaagtggggaaattaacaaatccgagatggaattcgtgaataaaatctttgaatttgatgagcgcatagctcgagaaatcatgattccaagaacagaaatgacttgtctctttttagataatacaacggaagaaaaccttgagatcatgaaagatggtaaatatacacgctatccggttgcggatggggacaaagataaaatcattggtgtcgtcaacattaaagaaattttaacacagtataaatggggcgaagagcttgtacttagagaatacattcacccgattaaccacgttattgaatcagctcatatcaaaacactattagcaaaaatgcaaaagagccataatcatatagccattgttgtggatgagtacggaggtacggcaggactcgtcactgtcgaggatattcttgaagaaattgttggcgaaattcaggatgaatttgattttgatgaaaagcttcccattcgtgaagcagaaaatggccaaacgatcgttgatggaaaagcactcattagtgatattaacgaattgcttggcacatcaattgaccatacagatgtggatacaattggtggttggatcctcacgcatgacattgaacctaaacagggaacatcgtttacagtagataactatcagttcacagttttagaagtagacggacatcaaatcaaagaacttgaaataaagcaaaaatcataaagtaaaaaagctgtctcgatgtgatccacatcgagacagctttttcgcttaagataagagatcaatccatattttaatggacgttccaagaataagggcagcaagtacccactgaagaattttcgtattaattttcttacctgcattggcaccaagcggtgaagcaattaagcttgcgacaatcataactgcggctggtagtaaaagaacttggccagttgccaatttacctaccgttgaaccgattgaggaaataaacgtaatcgcaagagaagaagcaattgtcatccgtgtcggaatttttaatacgacgagcatgatcggaacgagaagaaatgctccggccgcgccaacgattcctgcaccaatccccacgataaaggcaagagcagctgaaagaaatttattaaatttcacctgatcaagtggaatatcatcgatgccttttttgggtataaacatcataaccgctgcaatggctgcaagcagaccatacacgacattaattccttgctctgacataatggtggacccatatcctccgatgaaactaccgatcagaatgctgacacccatgtagaggatcaactgcttattcaggtaaccaccttttcgataagcccataccccaccgatggttgcaaagaatacctgaaccgcactaataccagaaacttcatgtgcactaaaggcagcaaaaccgagtagtggtgggatataaagaagcattggatatttaataatggaaccaccgattcctaccattcctgaaataaaagatcctataaatccaattgcaaaaatcgtgataataaaaccgaaatccattttgttcactccttccattaaaaaggaggtactgattcagtacctcctatcattttactaagcctttttaatccagaaatagaacacgccgtctgtttcttcagacttcattagttcatgaccgcctgattttgcccatgcagctagatcactctgtgcacctttatccgttgcttgcacttcaagtacttcacctgactccatatccttcattgcttttttcgtttttacgattggcattgggcatgcaagcccttttgtatctagtgttttttgtgcatccatttgtaattcctccttattagttaaccgcacagcggtttggtccaatttccatttctctttttgtttcttcatcaggagtgattttccccatgtttgtttcacgaatttcttgataagcatttggctgtggcggaagattttccgtcaccatttttctaaaatcttcttctttttctacattaagaccatcattcttttggtaaagatcctgcagctttgcagataccagtcctttttcatcaagctccgccatttttgaaaagtgagctggaagaacaactaattctccggccatttctttgtaacggttgtagagtgttgtccgtaggtcttgcacccagtcttcagccttaccagctaaatctggtcgtccaatagactctacaaatagaatgtcacctgttagaaggtaagcatcatgaatcataagtgacgtacttccaattgtgtgtcctggagagtagatcggttcaatcgtaacctctccaattgttactgtacttccttctttcaatgccgtatagtcgaacgttacttcgccagcatcctcttcaggaagataatacgttccattcacgctatcagctaacgtcttaccgccagaaatatgatcagcatgaagatgggtatcaaacgttgcttttattgtaagacctttgttttccgcaaacgtggtgtaattctcaatcatgcggttagcatccacaatggccgcttccccatttgattcgatcaaataagagaggcatccttttccaaggcgaacaaattgataaagagctcctcctggaaggtcgccaaccttaactggctcaaggtattcactccatgctttcattccacctgaaagataagagacgttctcaagtcctgcttcaacgagttcttcacctacaaagatcgatgaaccttctttcgcacatacaacaagaatttctttatccctaggaagcttcggcagaatttcttctacaccgtcaattaaatcgaagtaaggaacattcattgacgtaacggatgcaccttcgattttccaatcaccgtatgcttcttcatttcttacatcgagaataaaaagttcatcctgattgatcacttttgttgcaacttcacttgcttgtttttgttttaaactcactttatatacccccatccgtattatttgttctaaaaaaaatttagtcatgctgcgggaaaatttcccgctctttattttctaaagatcagacgttgtaggaccatcccactcggacattcccggtacaacattgatcacatcatagccactttcagctagcttttgcgccgcaaggtcacttcttgtacctgtacgacaaacaacataaattttcttctctttatctaactctgacatacgattttctaagtcacccagtggcaaagaaatcgcgtgtggaaggtggctgaacgcatattccgctggctctcttacatccacgatcgtcatattatcttcttctaacttagcggttagatcttcatttaaaataacgtgaggatgactcttttcaagtgttgtttccccatctgaagccttacgaagataatgttttagtacatccccttcttctactgttccgagataatgatgaccaactttatcagcccaggctttaaggtcagctttagaacctttgtctgtagctagaatttctagaacgactccagcttcaagatctttcatcatttttttcgttttcacaattggcatcgggcacgctagcccttttgcatctagtacatgatcagtttgtatcataagtctacctcctgtatgagttattctgtttctccagtccattcaagcatgccgcctgtcatatttaacacggaatacccgtttgatttcaagaccatagaagccataccgcttcttccacctgatcggcagacgatgatatgctctgtatccttatcaagttcattcattctgtcctgtagctcattgaccggaagattataagcaccaggaatcttgccttccgctacctcttctggtcctcgaacatcgacaatactaatagttttgttgctctttaacagttcatttacctcagttggtgttacatcttttacataaccagacattcttttccctcctcttatttccacatattcattccgccgcgtacattcgaaacagacgtgaagccctgtctcctcaattcgccacaagcttttgaacttctcataccactttgacagatcacaacaacttctttatttggatcaagttcttttgctcgtttgcttagttgatgaagcggcatatttttaaattgctttacgttttgtcctttatattcaccaggtgtacgcacatcaataaattggacattgcgatcgttaaacttcgctttcgcctgttcagaagttatcgtggcaacaccttttccaggtccgacctttttataaatgaaccatgcggctatcacgaagacagctattaggatcagttccatacttatcgctccttaaataaagagattgacgttaccatcttcagcatcgccaaggtaagcggcaacacctgcatagtcgatttcttctagcagctcatctttttgtagaccaaggagatccatcgtcatcgtacaagcaacaagtttaacttcctgttcttgtgcaagctcaattagctgcggaagttctgttacattatgctttttaatcacgttcttaatcatctttttacccattccaccgtagttcattttggaaaggcccattttgtcagcgccgcgtggcatcatttttccaaacattttctctagaaaacctttattaacgtctacttgctgatctttacgaagagcgttcaagccccagaatgtatggaaaatcgttacctcatgatcataagcagcagcaccatttgcgataatgtacgcggccattgctttgtcataatctccactaaataagacaatcgttgttttcttttgttcactcattttatatcctcctttatacaccctagggtatataatatattaaaattttttatcgacttcttactaaaaggttaacagcttctttcacaacatcatcagtagattctccctgctcaatctgtttgtgaagacactgttcaagattcgaacttacgattaatccaatgtaacgatcgattccagaacgtgttgcggagagttgcgttacaatatcttcacagctcttctcttgctccatcatctggattacgccgcgtaattgaccttcaatacgcttcaatcgattcataacggctttatcgtatttcattttgatacccctcactatatacccctaagggtataaaatcaagtaaaaaaatttatcggcacatcaatttcgtttgtgtttcaaatacctataggggtattataacgtatctgtatagaatgtcaacaccctggttttaagaaagccaattgatttgaataataaaatacgtagcaattaaagcaatcattaacaatacgactactagtagaaacacgacgatccatgaagaggaaggtacctcgaattttaaaatgcgttttttcgtgcgatagaactgcacagctccgcctgcgatcgtcaacaatccgaaaaataacgaggaaaaactaatgaagaccgctacctggtcatctgcacgttctcccgcggctcttgtaaaatgtaagcttgctgttagaaaaccaataccgatgatagcaatcgaagtgcgaacccacgctagaaacgttcgttcatttgctaaaagctgctgcactcgtccatctgctttcttgttttccaagtttcttcacctcacatgatttgaattatataccccatagcgtatataagcaactgttgactactgttattgtatccttctaaaaacaaaaaaagcagaatcgcttacgattctgcctgttcatcaaaaatgtttacaaattctccgtatcctctctcttccatttcttcttttgggatgaaatcaagagcagcggagttcaagcaatagcgaagacctgtcggctcagggccatcttcaaacacgtgaccaaggtgagaatcagcacctttacttcgtacttcggtacgaacggtaaaccaacttttatcttctttttctacaatattctctggtactagtggcttagtgaaacttggccagcctgtacctgattcatatttatcgatcgagctgaaaagcggctcgcctgaaacaatatcaacataaatcccttgttctttattatcccagtattcattatcaaatgctttttccgtatcatcttcctgcgtcacactgtattgaatcggcgtgagcatttcttttaattcttcatcagtatacgtaacagctgatttcgtttctggcacgtctacctcacgatcatctccccatgctttctcgagaaactgatcgcggcctgaattttcacgataaaatttatagcgaaattcattttctttataataatcttgatggtaatcctccgctacgtaaaaggtcgttgcttcttcaatcggagtaacaatcgctttatcgaaccgtcctgagtccccaatctcctgtttcgacttcaccgcagccgatttttgctcttcgttgtgataaaaaaccactgataaatattgatcaccacgatcgacaaactgtccttcatcatctgtggggtcaatttgtcgccaaaatacatctaagagtgtctcatagctaacaacagaaggatcatagtacacctgaacggcttcaacatgaccggtccctcccgaagatacttctttataggaagggttttctgtttctccaccaatataaccagagacggcttctcgaacgccatctagcttttcaaatggtggttccatacaccaaaaacatcctcccgcaaaagtagcgatcgcttcattatcctggacagcctgtgccggctcgctcccatatgaacgtttaaagatcacatcatataatttgggcaatgtgaaaactaagacagccgctattccaactaacaaaatccaccttgttgctttcatacgttattcctcctttatttctaatggaagcataaactaaaattcacagcctaaccctacatctattaattgactcttcaccatcaaccatcttcatcgattcactcttctttagtttaactcattttggataattcgttgattttggatcggttttctcaaaaacacccgggtgtttcatcatattcctggttaaataatgctagaggtgataggctatgaatatagaaaaaatattaatgtatggttaggagtatatacgatgaaaaaatataatatccctgtcgaagctgccctcgaagtgattggaggaaagtggaaggtcgtcatactctgtcacttaatcgaaggtacgaagcgcaccggtggactaaaaaaattaatgcctgggattacgcaaaagatgctaacacaacagctccgtgaattagaagatgatggtgtgattttaagaaaggtgtacaatcagattccaccaaaagttgaatattcacttactgactatggatggtctttaaaagaaatacttgattcactttgctcatggggagagcagcacatcgaaaaaacttatccttgtaaagaagatgtgctcttacaacctgaagaacgagatacaatgaaagcttaattcaaaaaaaacggtccgcaatttaaaaatgcggaccgtttttttatcttcgagctgatgtcaatttatctggtgaaggtaaccatcgatcgaatgccagcagtttcgagaaaaacggcatggcgaatactgtagaaacgaacagcgtaaagatcaagataaatggaatcccccacatggttgcaatgacttcagatgattgttgttcgaggaaccatttaataacaaatccgtggaacaaataaatcgcaaacgttctggatcccaatggtgtaaagacaattggtccttctggaatcatcgaaaagaacagaaacataacaaccgctgttccaatataataggtgaggcgaatcaacaagtctgtgtttgattcatacacatacgtaccgtaaagtagatcagctagtccttcaattttgtataaataaaacagtaaaaacaatccgccaaggaccacgggagcaatccacttcatatatgggaagcggatcggcttctttttacatcccatcaccataccgagtacaaaaaacggtaagaaaacgaaaaggcgatcaagtgacagaaacctttcaacatcaaaatagccaacaacgagacccgcaccaatacttaacggaagcaaaaggctcgctttcattttaagtaagatcggtgagattagtttgtacgctgcaatacataacaagaaccacatcgcccatctcggcgtaagaaattcaatcgcaaatgatttttgatacaaatttgtgtaatagatcgaataaatcacttgaaaaatgacataaggaagcaaaaacgtcgtgaatattttccaaaaatattttgtcccagatgcctttctagtaaaatagccagttaaaaaaataaaagcaggcatgtgaaaaataaaaatcacatgatacagactgtaaagaaaacgagagtcattaatgaatggcgttagcaggtgaccaccgactactaacaatattaagatagctttactattatcgaagtatgcaatacgttctgacacgaaaaacaacctcctcaaaggattgaaagacgttcgataccgtccttctctatataccctcaacttcgtattttcatcctttatatttgtaagttattcgcactctgatcgtataattctgtcaatcccactaaaagaaagaatattcgaaccctactttcggtcataaacacaacctttttactacctaaaaccaggtctattgactcaaattaatatgaaaacgcttgaattaatagaaaaatatattttttctgaataatcctattgtttttttgtgccgcgatgagtagaatgaatgttatattttcacacatataaaaggaggcgggagacatgatcacatttgtcggagccatttgtttattgattgttgggtattacgtttattctaaggtggttgaacgaattttcggcattgacgatgatcgtgagacgcctgcatatacaaagcaagatggcatggattatatgccgatgagctggtggaaaggaagtttgattcaacttttaaatatcgccggtcttggtccaatctttggtgcagtgcttggagcactatacgggcctgttgctttcatctggattgtcgttggctcaatcttcgcaggagctgttcacgattatttctcaggtatgatgtcacttaggcataatggggaacagtatccctcactcgtaggacgctaccttggaaaaggggcaaaaggaacgatcaatattatttcaatcgttttgatgattcttgttgctgctgcttttacagctggtccagcccagctaatggcgcaagtaacgccgcttagttttacgatgagcttgatactcatttttgcttattttgtactagcagccattctaccagtaaataaaatcatcggtcggatttatcctatttttggggttattctgattgtgatggctgtttcgattgctatcggattattctttatggacaatcctatcccaaatttaactttctcaaaccttcatccggataatttaccgttatggccactcttaatgattactgtatcgtgcggagcaatatcagggtttcattcgactcaaagtccaatcattgcaagaacaatgaaacgtgaaagcgatgggaaaaaggtcttttatggagcgatgattgcagaaggagtgattgctcttatctgggcggcggccggaatgactttctttggaagtacaggtggacttcagggtgcacttgctgctggaggaccgtctggagtcgtaaacgaaataagttcttccttacttggtacatttggtggcgttcttgcgattgtgggtgttattattcttccaatcacaactggcgatacgtcgcttcggtcttctcgtatgatgcttgctgatttatttactaaaaaagagacatcaaaagctgctgatggcaaaggaaagacgcttcttttaacagctgctgttgcaacaccgacatttctattaacgcagattgattatacgtttttatggcgatacgttggttttactaatcaactcgtggctactgtcatgctttggacagcagcgatgtaccttgtaaaaaaacaaaagttccattggatttgtagtttgccagcactcttcatgacaatgacggtatcaacgtatcttttccttgcaccagaagggtttcaacttccatacaacatctcaatggtctttggtggtatcattacttgtttaacagcgggatggtttggttatcaattatggaaagcccgcaaaagaaagatggttacaatcgaacaagtggcatagagaaaagcagccttccttttcagctagaaaaaggaaggctgcttttttggttgcgtatcgtaaatggtaagtttgttcttaatagatttacgttctttcggattggggataaaagctggcttcccaatatgaagcatcccaacgatcacgtcaccaggctctagtcccattgcttcttgaaaagaaggatcgaaaataaagccgttcgttttccatacaacgcctaatcctttcgcccaggacagaagctgtatattttgaatgaatgcacacgtagccgcaaaatcttcatgacgctctttttcagtcgtagccgctttcaccgtcacgaggagatgaatcggtatgttacgaatgaattgattgatcttttcctttttcttttccgctttttcttcatcaaattctgtgcgggcaatactttcttggatatgctcaatgaggtgtcctttgccgtcacccttatataacatcacttcccacggttctcttagtttatggtttggcgcccatttcgcatcttcaagaatgtctacgattgtatgtaatgggatatcgtcaggttgaaatttgcgaatcgttcttcttgaaacaattgtatgttgaatcgtattattcattttttataagcaccctttcttaagacaaatggtagacccgtgcctttcaatctcatcttacttctattctattgataatgattatcaatgtcaaataaaaaaaggaaagcctatgatagactttcctttccctgattatagtttgccacgagctgatccatcactctactcgttcttatcgcagtgtttccagtgcttggtgattgtcctttaccgtttagttcatttacaatagactgaattaacggctgttgaacatgttcaggatacaccacttcaatttcatgttcaccagactcatttttgagaataattggacgttcttgaagtgtcgaataaatgattgatcctttatcaccaacgatttcatttacatcttcatttttgtacgattgaaaacaccactgacctgtaccgtgtacacctgattgaaaaacgtaagtgcctgatactatgtcttctgcttcataaagaccgccttgattactcgcaaaacccttcgcttgttcaatagggccaaacagatagtcaagaaaatcaagcgtatgactagccaagtcgaaaaagtggccgccgcctgaaatttccggctttactcgccaagggagatcaccttgtaattcttgctcagaagctttcttatgatgcacggttcttacaaatcgaacacttccgatcgcctcattctccaacaactcttttactttcaaaagagcaggcatcgctcgacgataaaaggcaacgaataaaggcacatcgttggaacggcatgcgtcgatcatctcctgacattctgatgtgtttaatgccattggtttctcaacatacaccggcttcccagcttgagctgcaagaagcgtatattctttatgagtcgacggtggtgtcgcgatgtatacggcatcaacttcgtcatcctgaatcaattgttccgcatttgtataccactttggcacttcgtgtctcctagcataatcttgagctagctctgcatcacggcgcataaccgccacgagctccgaatactcagctttctgaaaccctggtccgcttttcttttcagtaacattcccgcaaccaatgatcccccaacgaatggttttcatataagccccctagctaaaagttttttctcctcaatttcatgctccttaaattcgtttacttcatctttaattcgcatcattttcgcatcaaggtaatgaacgatttctgccgcttcttttaattcgttgcttaatttatccggtatttctccttcaaacttatagtaaatcttgtgctccaagcttgcccagaagtccatggcgatggtacgcagttgaatttccactctcacaagttctggtcctttcgataagaaaacgggaatttcaacgatcaaatgtaaacttttgtatccatttggttttggattctttacgtaatcttttacatcaatcagttggatatcgtcctgactttcaatcatgtcataaatacggtaaatatcattagtaaaagaacaggttacgcgcacacctgcgatatcattaatatgttgcttcacattttcagtcgtaacttctagtcctttacgttctagctttgccataatactttctggtgactttattcgtgatttcacgtgttcaattgggttatgctgatgaacaaattgaaattcatcatttaagattgttagttttgtgttaatttcatcgagcgcaaatttatagatgaacaaaaaattcttccattcttcaattcgttcttggaattccttcttcatgttcaaatcatcctttcaccagttaccgtaccatacttttatgaacgacgtatgaaggatctttgacgaaccccgaacaaatgccaacgttgatatgttaaaataaactgaaaaaaaggtaaataatggatgaatcgaaacttcactttctaattataatgaaccttttcataagcgcgcttgccatggttttgtatgcattcactatgtatcaatatcataaggtaggatattcctttacctttgtcatccttagcttttttttcattgtaatggcgatatatggcgtgatacgaaatcaaaagcttcgcgcgaacgataaccattaggctttattgaaaataaggaacagaagccgctttgtaagaataccttctgttctccttatacttgccgctcctagtcgataaagacaaggccaagcgaaattgccacaccacttacaatcaatacgatgaagcaataccccataatgtcctttgcctttaaccctgcaattgcaagagctggtaaggcccaaaacggttggatcatattcgtccacgcgtctccccatgctaccgccatcgctgtttttggaatagatacgcctaattcctttgcggcatcaagcatgatcggtgcctgaaccgcccactgccctccaccagaaggtacaaagaaatttacaatccctgcgcttaaaaacgcaaaaaacggaaacgtaaattcatttgaaatcgaaacaaatccctgtgaaagctgagcagctagtccagaagccaccatcattcccataatacctgcgtagaaaggaaactgaatgatgatcccgctcgctcccttcaccgcatcacttacagcttctagaaaatggcgtggtgttccgtgaaataggattcccagaaaaagaaaaccaaaattgacgatgtttagattcaattcaaatcccgcattcacaaaataataaaccaaataggcgaggccaacaattgaaataaccaaagaaatgatgcggctattctccagtctttcggctggcgttaattctccttcaagactcgccgcctctatgtgccctttttcaagcaggtttggatcaatatgtacacgctcatcttctgcaggtgacatgaaataattgataataggtaaaagaagaaagagagacgctacaatcattaaattaaacaaagaaaaaatcgtttcattcgttgaaacaatgcctatcagatcagctgtaaaatgatcaggcgtggcaatggtaaggggaatggaacctgcaagcccgccatgccacacaagaaaaccactataagcactcgcaatcagcaaacggtaatcgaccttcttcacctgtctcgcaagttcttttgcatagagcgctccaataacaagaccaaatccccagttgatccagcttgcaatcagagatacgagtgtgacgtatacgatcgcctgtccaggtgttttcgctctttttgcaagaaaacgtagacctttcttaaaaagtggactacttgcgagtacatagccagtgacaagaacaagcaccatttgcatggaaaaagcgagtaaactccaaaatccttctccaaagtattgtaccatctgaactggtgaacttccggtaaaaatcattccgaaagcaaatactacaaatgttaaaatgatcacaaacaaaaacggatctggcaaataccgttgcatgatccgatttgataatgagatggaagctttaagcatacattcaactcctttatgtaataaggtacttcaacttcattcggtaacaattctcctgattcctcccgtaaaaaagaaaacgttttcaaaataaaactttcttatgaaaaagagaaagagccgcagtattgcgactttacacttccctttccttcaaaaacgcttgaaccatattaacataaggttgagtgaaataacggttgtaatgaatcgttgaaagtcgtattggatctccaaagaaaaaacgttcaaattgagtttggcgtgagccgaatgcactcatcccaaaatcccatgccattcggaatagctgcacgcgttcttttgcattgatgttcgctccttgaagatatttcgctaaatcttcttgaatctctgaattaaagtccttctcggtagggattgaaatcagtccactcgcaccaagtagttgaataatctcaattaatcttggataaacacctgaaaaatattgaatggccgccttcaatggctgactctccggaacaagcgtaccaaaatgatttaaccgactattgacttcagaagatactagcagtgctttcataatttcaagcgtcgtgataatttcactcatttttaacttaatatgttcgtactcttgaatttgaattgcttctcccattaactcacatagtccaagaatatattctactttcactacctgcctgcacacagcttgaaattgtaagaacgtgtacataccagtcgcttcttccatctccccaacaatttgagcatctttataaagaaagacacattcccaggggacaagaacatcctcaaatacgacgattgaatcaatttcttcaaattgagaagcgaggggatgatcaaaccgcgaatcacgatagcaaaacgattccctacatatgaatttcagtccttttgtgttagaaggaatcataaaaccgaataagtaagcatcatccaaagtgtagcccccagcaggcaaaacgagcagttcatctgttaatcccccctgggtagctaacaatctcgcacctttaatgacgattccttcctctttttcctcaaccactttggccgctgtgacattcgtagcatcaaagtactggccaaccgatcgattaacctgtggattaataaacgtatgtgtgatagacaaatctttctctcttgctttttcatataatttcttaatgttatctccaaaagatttctgatcttgtgcaaaatgcggtgctgcgtacccaagcgtcataagtagtgtattcatataatctggtgaccttcccatcagtcctgcacttaatcttgcccactcctgtgtagccaagcggcgattcgtgaggtcttcaatcgacgtaggctgatgataagaaaagccatagtcgcctttacgatcaggtggtgaatatcgaaacaacttttgattttcaggctgacattgaaaatcataaagggcggctttgctttttaaaatgcctttaaaaggcgccaattccgataatttacctgaacaccgtcctccctcaatccatacttcattttggagcgcgtcaattcgttcgatatactctcttccattaatcatgccgtctccccttttcataaaactacttattaaactatgcatcaagaggataaaaaggtagtgctcatgccttctcgataaaagagtgtaataagaatatgttttttatcccatacttactgataggggttttcaagtcgactcttttgtggaacaatagacacagccttttgaaaggagcatgtgaattgcgtaaattaacttacctatttataacaggtttattaatcgttgtattagcagcctgtggaggaaacgaagaaagcagtaatgacaaaaaacaagaagatacaaagacagaagaaaaagccggtgagcaaaaacaaccggaagttgataaagtagatgctgataaggtagtagctactgttaatggtgaagaaattaagggggaagatttcaatgccctttatagtcaaagccaaatgcaatatgtgcaaatgggccaagaagtaccgaaagatcagctagagcaaatgaaaaaacaagtcgctgaaagcatggttggtcaagaactaatccttcaagcggctcaagaggaaggcattaaagcttctgacgataagattaaagaagaacttgagaatgtcaaaaaaggctttgaagatgagaaaaaattcgaagcagcacttaaagaaagtgacatgacgatggaagatcttgaaaaagaaatcgcgaaaaacattcaatatacgaagtacattgatcaagaaattaaagttgatgaagtaagcgaagaagaaatgaaagaatactatgagaaggcaaaagaacagggtagttctgaagagatgccagcttatgaagatgtgaaacctcagatcaaagaaggtctagaaggtgaacagaaaaataagaaaacgcaagaactgatcgacaagcttaaaaaagatgctgatgttaaaatcaacatttaagttcctcgatgaaaagccactagcgaaattactcgctggtggctttttggttgccataaagatggtcttcaagctgacttcgaatctcatctggaatcggtatgctcttttgtacatcaaaatgatagttcacgtaagtggcgcttcctttcacacaaatgctctcgttctgatgaatttcctcatagacttcaaagcttgttcgaccaattcgcttaatccatgtgtaaacagttatcggcgttccataataaatttgagacatgtactctgcattcatttttaaaagaacgcagtgccagtcatggaaacttaaatctgggttaaacaaacgaaagatcggatcgcgaccagattcaaaccataccggaataactgtattattaatgtgtcctgctccatctgtttctgagactcttggatcgatcactttctgatacataaagcacctcctattgttttactaattcgctccgttgaagtgctcttccttttttagttggggtgttcgcactattaattagtagaaatgtgacacttcatgacgaacgaccgttcttttttattcctcctcatgccgttatactagacgtagatagacaagcactgacttactttaaaggagagtgaaagctatgaagcaccacccggttccttatttcacattcgaaggcacagcgcgagaggctttggaatactacaaggaagtcttcgaaggcgaaataaccgatgttcaaacatttggagaagcaaacttcgaaacgccaccagaacttgacgatcacatcatgcatgcacgctttaaaaaagataacctctttttcatggtttccgatgtttttttgaatcaaaacgtaactgtagggaataacatctctcttgcgctcgaactggatagcgctgaagaaatcgagtcgctctatgcgcgcctgaaagaaaaaggaacggtgtatatggagcttcaagatactttctggggagcaacgtttgcgaaagtaaaggatgcctatggggtaatttgggatcttaattttgagaaacctgggtcttctaattaatgatggaggtccgccacgggtgtgtggcgggctttttttgttgttgtttggaggaggagaacacgttaattccgcgattttctggataattccgcgaaaatcaattttattccgcgaaaacacttattatttccgcggaaattcaattaattccgcgaaaccccagaatctaacttatagcgcctacctttagtagatccagttgactctagatttaatgatcttaataaacgtgtagcagcatctccgaaatccatcttcaaaaaccgcctcgccttctgattcgtaatctctctagacacaagcagcgcatattcttgaagagctcttaagtgggcattccgcgaataagtaccacacgattcgcaaaaccatctcccgtgcaatctctgcatagccaggcgagcacacgctggacaaacaacaccaacaagcaattcgtccggagaaattgataatcgcttcagcacgtctcggtcaatcggctcatgtagcttaacaagaatacgccctaactttcgtacttccttcaccgtcaatcgctcatcaccatacctcttatccagcagcttcacttttgttggcaggtactcacctcgaatcacttttgaagaaatgaactgaacctcctctgtcgctttcaggaccgctcttcggttagcgacaacaatgagcgtttcaatcggtacttctgggatattcattttttgaagcaaagcgcgaagttgggagcactgccgctccacctgagtgaggggattagggaaggcctcttctttcgtgtcggaaatgcgaatcaactggttgaaggtgggatcaaacataagagtacctgagatatttttcacttcaagaatgagaagatagcactgagtcacaacaagcgtatcgatttgaaaataatgggcgccgtcaaataaacgcaagtcatgatagatcgaaaaccgcttatcgtctaaaaaacttagcgggaaatttagagatttctcacctgaaagtcctgcttggtacatggcaatttgctccttcacttcttcaatgcgcgaatgataggatggaagccggtttagtaaaaggcttaatttgtggagatgatgcgggggatcatgatctttcttgatcaaagggagacactctcctctgaattttattttctacgctatacgaattcattctccactaattcattatttcctttgctcaataaaatgaaaaagccagctccttcactgagaaggaagctggctttcgtactaacatttactcaagatcaagatctgttactgcaccttttgcggatgaagaaacgagtcttgcatatttaccgagaatacctgtcttatatcgaagctctgggcgcacccattcagcacggcgacgctcgagctcttcgtctgttacatcaaaattgatttgttgcttgtcactatcaatggtaatggtgtcgccttcttttaagaggccaatcggtccaccaacaaacgcttctggtgagacatgaccgatgacaaagccgtgggatccgcctgagaagcgtccgtctgtcataagcgcaactttaccattcaatcctttcccaacaatcatggaagtaatggaaagcatttctggcataccaggtccgcctttaggccctacattacgaataacgagaacgtcaccttctttaatatcatccgcttcgattgctgcagtcgcttctgcttcgttattataaacgcgagctggtccttcaaattgactaatcttttgaccggacatttttgctacagaaccttcaggagctagattccctcgaagaacaacaagtggaccgcttgctttaatcggatcatttagggagcggataatttcttgtccttcttttagcgatggggcttcggccaagttttctgcgaccgtttttccagttactgtgaggcaatcgccgtgaagcaagccatgctcatgaagaagcttcatgacagcaggtacgccgccaatctcataaagatcttgcatcacatatttgccgctcggcttcatgtctgcaatgtatggaacacgttcgcgaacgcgttcgaaatcatccaatgataagtcgacaccagctgagtgagccattgccgttagatgcaagaaggcatttgttgaaccaccaagagccataacaaccgtgatcgcattttcgaatgcttcttttgtcataatgtcacgagggtagatgtctttttcaagaagagaaaccactaattctccagcctgacgacattcagattctttgtaatcattcactgcaggcgttgaggacgatcctgggatactcattccaagtgcttcaaccgcagacgccattgtgtttgcagtatacattccgccacacgcacctgctccagggcaagcagaacattcaactttgtgcaactcttcgtcgttaatcgttccagcttgatattgtcctaccgcttcaaatgatgaaacgatgtcaatatcatttccattcagtttacctggctgaatcgtaccaccatacacgtacacggacggaatattcatacgaccaattgcgattaaacaacctggcgttgttttgtcacagccgccaatcgctacaatgccatcaagacgttccgcatttgtgaccgtttcaattgaatccgcgatgatttcgcgacttggcaaagaatagaacattccctcatgacccatagcaataccatcagaaacggtaatcgtgttaaaaatcattggcgcgccgccgttatccttagcacccgctttcgcctcacgcgcaagtgaatcaatatgtacgttacaaggtgtaacttcactccaggtactcgctacaccaatcattggttttttaaaatcttcgtctgtaaaaccgactgctcgaagcatggagcggttaggtactcgatttacaccttcactgattactttacttctgattcgaagatcttttttgccttccattccaatcacccttccacatcacatataaagttagacaatttatttaattcaaaatttatattctttgatgatactagttttcgcactttaacgcaaacaattatctgaatttaattgtaaacttttcacgaaagctatcttcttattaggcccatagcttcaaaaacaattagaaaccgccctcttatgaggacggcttcgttttttatcataacgtttggaagagtttaaagggtaccaggctcaaatgttttacaatcggtttcttcactattacgtgctttattcccctgatgactgacaacatagatttcgtctgctccacagttttttccattacgattgtgaacacagtttgcgacttcgcacaatacatctaatgccattcccttcacctccttctttctagcatgaacagaaaggagtgatggcataccggtgaaaaagagatatatcttctttaataaaaatttctttcgagattcgtaatttccaccaacaaactcatggtatgatgataaaaaacaagaaaaattgaggtcggcataatgtggcaaaataaaaatgtgtggattttactaacaggtgagtttgtggcagggttaggtttatggctcgggattattggaaacttagaatttatgcaggaaaaagtaccatctgattttatgaaagccgttattctggcgattggactccttgccggggttgcgattggtccctatgccggacgcgtgacagatcagatgaagaagaaaaccgtgatgatcgctgctggacttgccagagcgattagcgtcatcttcatgctgctcgcgattcaaactggctctgtactctggatggttatctttctgatactcattcaaacggccgctgctttttacttccctgctctacaggccgctattcctctagtcgtaaaagaaaaagagcttctccaaatgaatgggattcatatgaatgttgccacgttatcaagagtacttggcaccgccattgcaggaatcttcctagtgattatgtctttatcaacgatgtatcttctttctttaggggcatatcttcttcttgtcgtatttacattcttccttaccattgaagaacatgacgtttctgaaacgaatcgttcaaaagcagaaagtagctttaaacatctgtttccgataataaaagagctaccaattgtgatgatgacactgattatgacgttagttccactcttatttatcggtggatttaatttgcttgtgattagcatcagtgagcttcaagacaattcgctcattaaaagctggatttacacagctgaaggcctttcgtttatggttggggctttcgctgttaagagaatttcaagaaaacaatcgccttacaccattctatttttgttttcctttattatcggactttcccagctattgctcttttttgcaaacagtcctgttctatccgtcatcgcctttattatattcggtttctcagttggctgcttttttccaacagccgctactatttttcaaacaagagtaccaaaagaatttcacggaagattcttttcattccgaaacatgttggaccggatcatttttcaacttgttttgcttttaacagggttgatgttggatctaattggccttcaaatgatgtctgtcatttttggcattatgtcgattacaataacaagtatctttttcctgaaatatcgtcagagcaatctaacgtctttaaacattaatgtgcgttagtaatcatgctcgttcgattaacgtatttttctcttttgtatagaatacaataggccgacttttggagaaggcgattatatgattgataatgaagaaaaaggtgtctttggttcatgggttgaagcgattgggacgatattagctgcgataggtagtacacctattaaagaaatcaactcttcgattctaaatagttttactttgattggaaatgtgatgcagggaaccggtaatgcccttgtcgctgatacgattactccaccttcattaaataagatcggcaatcagcttcaggcgattgggaactcgacggtcgtaacaagcattctaatcgactttgatgagcgagtgaagcggattttgaatattgatgggaattggcttcaggcgattggtggaagcgtatctctctcagatgcattaggtggagaagtttcggcttcagcgttgtatagcatttatggaaacttcctgcaggtggtcggcaattcccttcaagcaatctcaggaattaaagagcttaacaacgaagatgcaacaaatattaatgtagtaggaagctggattcaggcggttggcgctgtgatttcagcaatcggtcaaacgaaatatccttcctcttaaagaaccccctgatcgctcaatcagggggtttcgtgtgtcattattttaataaacggagaaattctttcatgaatcctggtaaatcaggccacgcctgtcctgagacgaggttatcagctgtatgaaccttttcatcgatgtatgtagcaccacatgcggttacatcgggtttacaagctggataagcggtatactcgcgatctttcataatatcaggaactacattaaggacctgtgccgcatgacaaatcgcacctactggtttattttcttcaaaaaaatgtcttacgatgccaggtacactctcatccattcgaatgtattctggtgctcgtccgcctggaataattaaaccatcgtactctgccggtttgatttctgcaaaggaagtatgtgattcaattccgtaggcttgcttctcaacaaacgtttccatttcatctgtaaagtcgtgacataccgtttgtagttttttagcggtcggggatgcgatcgtgacgttaaatccttcctcaagacaacgatagtaagggtagaaaatctcaagagcttcaacagcatcaccggaaatgattaatacgtttttactcaaaacgagcacctccataagaattttgattaccttttttcattacccctcttttttacatctataacagatctctcaaaaaataggtctagaatctccgtctatggttgaattcgtggatgacttgcgactacaataaaccataatgcatttcccattctggtgggaatagagacaggagctttcatatggacattaagcagttagcctatttcgttgaagtcgccaagcaaaaaagctttacgaaagcctcacactcgctctacatctcacagccaacgttaagtaaaatggtgaaaagtttagaagctgagttagatgttgaactactcgatcgctcggcacgatcgagtgaactaaccgatgcaggaaaaattgtatatttgcagggtgagaaaatattaaatatggttgacgatctttcttctcacttatatgacatgatgaatttaaagaaagggcacatcaaagtcggtctcccgccactcatcggcgccctctacttccctagtatcttaaaaggattccaagagctctatcctgatattacgatcgaactaatggagcatggagccaacattgcgcaacaaaaaatcctcgacggtgaactggattttgcagtcggcctcttacctgtcaatgaaacgaaatttgaaacacttccattcacaacggaagaattaatgctgtttgtacacagttcacatccattcgcagaaaaaaattcggtctcaatcagcgagttgcgaaatgagcggatcatcctatttagtgaagactttatgttacatgaccagatgattgaacagtgtcgtcaggccggatttgaaccgcacatttcttacgttagctcccaatgggactttattagcgatatggttagtcacaatctcggcgtcacctttttcccaaaatcgattcttactaaaatcaaccaaaacaacgtggtctcaattccactcgtaaatccagagatcccatgggaccttggcattattctacgaaaagaaaagtacatttcttatgcttctcgtgcgtttattaactacattaagtctgcaatctaatcagcgtaatctagaggtaaaggcaaaagtagcattaaaatgattaacaaaacaatccgtccatgtgggcggcttgttttattgtcgctataaaaatcagaaaattaaaaattaatcctttccatatgtttaaagttcatgtattatatatctaaatgatatatatcaaaaagatacaggaagtgaagaaatggataaacaaattcatacaaagtacgcgattctcggcttattaacaatcggttgtcaaacgggttattcaatgaaaaaaatgatggatggaagtttaaatcatttctggaaaatcagctatggacaaatttaccctacacttaaaagtctagttgaggaagaactgataactgttcaggaagagagtgagtctggaaaacctgataaaaagaaatatgaattaacctcattaggttggcaggccctttacaattggatggaagctcctattgaagaacttggagtagaaaagaatgagttgttgcttaaactttttttcagtcatcaccagagcaacgaaacaacttttaaacaattggatcactacaaattaaaactgctagaacgtttgaatacttatcaggcgattgatgaaatgatacgaggaacgtatggcgatcaagaagatgcgaaattctggctgttaacattagattatgggataaggacaacgcaagcagctagtgaatgggctgacgaagccaaaaagaagcttacttcaaggaggtaataggaatggtgtgtcaagtttttaccggacgctacacggtggataaaggacaggacgttgtggtatttctcattggaatgcgaatcaatcaatggtgggctgtgcataaatggcttcctgtcttccttgcgatgcctggcatgattcgtgagcttagcatcaataaacagttaggatgtctctctatggaaaatttctttagctttcggacaacgctactccttcaatactggcgttcagcagaagaccttcgtcaatacgctcatggtaaagcccatttaaaagcgtggaaaaactttaatcaaaagattggaaacaaccgtgctgtcggcatctaccatgaaacatacgtcctttcgagctctcactacgaaagtctctatggcaatatgcccgcttttggattagggaaggcgctcggacatatcgaggttacacctcaagctgattctttcaataaacgtcttaatggaatgcataccgataaagcgaacgaacactaaaaaagcccggatcgtgaaaattcacgttctgggcttctttaataagatgattttttgcaaataaaaaaccaccaaatatgtatttggtggagacggtgggagtcgaacccacgtccagaagtatcggcacttaagcttctacgagtgtagtcgttatattagtgtttcactacaattcagcccaacgacaggcttccttgtagctagtctgattaatctcttccaactttcctcagacggtggattgttggcgtatcccacttaagttgagtcccttaccctaccacatgggcgatggagggaggaaccgcaaaacagcttacgctgctagtgcgaagttgttgttttctttgccagttataggcatggcgtttttaacgtagctcgccaactcgactcgcgacttaagctcgacctacccctgtcgaatccgtaacgtccccatgtaagaaaatgagaaccgaaaacgggtaagcagttaagcttaatatgttgtttcggtaattttaattataacatagatcaacttccattcaaatggaaactatatccgctgacgttctttcaacgctttgtccacttcacgcttcatcgtcttatctttgagatcctggcgcttatcatacttcttcttacccttagcaaggcctagaagtactttcgcataaccattcttgatatagactttcagtggaattaccgtatagccctgttctttcgttaggccaatgagcttatcaatctctttccgcttcatcaatagcttacgagtacgggttggatcgtggttaaaacgattcccttgctcatattcattaatgtgcatattcagaagaaagatttctcccttacgaataatggcgtgagagtctttcaggtttacgcgtcttgccctgatggatttgatttcagttccttgtagaaccagtcctgcttcatatgtctcaataacggaataatcgtgtcttgctttcttattttgtgcaatgagtccaccatcaccttttggcatgaccgtcccccctctcaaacgtcgaactcaagtatatcaatttggtcagaataagtcaaggtgacttacactgaccaaatgattagtaacgcgaattaagaattgttattgcgacgttttttctttttgtttttcggtttcttttttgttccctgaccatcttttggcggcgaaaacttacgctttttctgtccagcatccgttgttttgttagatgacttcccgcgtttttttcgcttgccgccttcaatgactttcggactttctcttctgcgacgttcttttggcggtttcatgccaacaatttcaaagtcgatcgaacgttcatcaatattaacattcaagacgcgaatggcgatttcatcaccgatacgatagacgttaccagtacgttcaccaatcatcgcataagcaccttcgtcgtagtggtagtagtcatcggttaaataactaacgtgaacgagaccttcgatcgtgttcggcaattcaacaaacaatccgaagttcgttacaccactaatcacaccttcgaactcttccccgattttatctttcataaactcagcttttttcagatcatcggtttcacgttcagcgtcaaccgcacggcgttccatcgcagaagcgtgctgagcgatttcaccaagcgcttcgctccatttggaagttgtttggttatcaacttttttctcaaatagatacgtacggatcaaacggtgtacgattaagtcaggataacgacgaattggtgacgtaaagtgcgtatagaagtctgtcgataatccgaagtgaccgagactttcagggaagtacttcgcctgttgcatcgaacgaagcatcaccttactaattaccgcttcttctggctctccctttacttcttcaagaagcttttgtagcgcacgagggtgtaccgtgttcgcattcccgcgtacaacataaccaaagttcgtaatgaattcgaagaacgtatttagtttatctgcatccggatcttcgtgaatacggtacatgaacggtacttccataaagtgaaaatgctgtgcaacggtttcgtttgcgacaagcataaactcttcaattaagcgttcagccactgagcgttctcgttgcacgatctcttgcggcgtcccttcatcatctacaagtacttttgcttctgcgaaatcaaagtcaatggcgcctcgttcaaaacgtccttttcttaaaatttcggccagttcacccatgctatcgaagaatggaacgagagatttgtaacgttctagcacttcatcgtcttcacgctgaagaattttgcgtacatctgtatacgtcatacgctcatttgtacgaatcacacttgggaagatctcatggtttaccacttcaccctgtgttgtaatttccatctcacaagaaatcgttaatcggtccacttgaggattcaaactacaaattccgtttgatagacggtgtggaatcatcggaatcactcggtcgacaagatacacactcgtcccacgatcaagcgcttcttgatcaatcggagagttttccgtcacataatacgttacgtcggcgatgtgaacaccgagcttgtagtttccattcggaagtttgacaacgttaacggcgtcatctagatccttcgcgtctgctccatcaatcgtcacaatggtctcttcacgaaggtcacgtcttccttcaatttctttttcatcgatttgatctggtgttttatgagcttgttccattgcagcctcaggaaactcgcctggaagctcatgcttataaatgatcgacagaatatcgacgcctgggtcgtttttatgacctaagatttcagtaatgcgtccttccgcactcatacgcccttcaggatacttcgtaatttcaactacgactttatggccgtcaacggcacctgcagtagctccttttggaatgaaaatatcgtgtggaatcctcttatcgtcggcaatcacaaatccaaagtgcttgctatcagaatatgtaccaactgtgcgttttacaccacgctcaatgatacggataacggtaccttctggacgagtgccagatgatttttgatgaagtcttacaatgacacgatccccgttcattgctccttctagatcaccctgattaatgtagacatctttctcgccagtatcactatcggaaataaggaaagcaaatccttttgcgtgtacttgtaactttccgcgaacaaggttcattttctcaggaataccgtagcgattgcttcttgtgcgaacgattaatccttcatcttccatgctgtttaacgttttcacaaattccttaaattcactggaatctttcacaccgaatacttcttcaagctcctgaacggttagcggtttgtacgcttcgtccttcatgaagctcaatattttttgttcatgttcttctgccattgtcttccaccttccttctacttaaataagttctttgtttattctgaccagtcaaggctatcaagaaaagcatgaacgtctttatgaagctcgtctttttctttgcctagtgtgatcgcatgcgttgagttttcgtaccatttcagacttttctcatctgattcgatgttatcgtgaatgacgttggcactttctgtattaatcatttcatcatgtctcgcttgtgccacaaatgtaggagcgtaaatcatatcaacgttgtcacgcacatcatagatcaaatcgcgaagttcaccaagtgtattcatcggtgtttctttaaaggcttccatttcctcttcaatttgttcaggtgatttccgttcaaatttcttgtattcctttgcataggaaaggacgccctgatacatcgtttcttcatctttcatatccatcggggcgcacatgggcacgattccctttacaggaacagtataaccgagctttaatgaaaatacgcctccaagtgataagccgacgacagcaatttcgtcatggcccatgcttttcagcttttcatacccttcagtgacgtttttccaccaatcttttggcccagtatgtacaagctcctcaggcggaacgccatgtccttcatattgtggcgcatgacacgtatagcctctttcctgcaagtaacgtcccatcattcgtacatctgctgaatttcctgtaaaaccatgcaacattaataccgcgcgattgcctccctcgaatgtaaatggctttggtgcaactactttcatgatgtgatcctcctctaaatcaactacctgttagtttgacctgcaataaacgaattatcctatccaatgaggcctttatctgcattttacctgtttcgatcggaaggcaaaaggaattcgttctgttagcttatttccctcttccattcgacaaaaaactcccttttcgcttcttcttagaaaagcttgccgccaagtactagcggaagtcatagtttttcttatactttagtcctttaaaaaggttaaatattcttaaagtacaataaaaaaagcagcaagtgactcaacacctgctgctttcttgatcacgttacacgagatacgcaacgagaattgaaagaacaaagaacaatacggcaagtactaccgttactttatttaaaaccgcttcaaagccgcgggctttctgctttccaaataattgttcagctccacctgtaatggctcctgataaaccagcgcttttacctgactgaagcaatacaacagtaataagtaagattgaaacgataactaatgcaattgtagctgcaagatgcataattccacctcccggactatagcctttccaatactataaatttaccataaatttttcaataaaagcaatctatttcggtaatactcgacattctcattattatcttaacaagtgttaacacttcttaaacgggtatcggctgttttcgtagacattgttgcgataagagtggtggctgatttccgttccatgatgctccctttccgcggggcgggttgtgagcctcctcggcgcgctaaggcgcgcctgtggggtctcacctgtcccgctagtcccgcaggagtcgagcaccttccgctccaatcagctattaagtgtggatcttaatacaaaccccttttaaaaaaagaaatttacagaaaaaatttagtaatagaaattaaaaaatccccgcgttttcacgcggggtcttcaaaacttacttcttatctaagttatagaagctcttacgtccaccgtagattgcaaggtgctcaagctcatcttcgatgcgaagaagttggttgtatttagcaacgcggtccgtacgagacggtgcgcctgttttaatttgtccagcgttagtcgcaacagcgatgtcagcgattgttgtatcttctgtttcaccagaacggtgagagataacagctgtgtaaccagcgcgcttcgccatttcaacagcatcaaatgtttcagttagtgtaccaatttggttcactttgattaggattgagttacctacgctacgctcaattccttcagaaagtttgtttgtgtttgtaacgaaaagatcgtcaccaacaagctgaactttctcaccaagagcttgagtaagtttctcccagccttcccagtcgttttcatcaagaccatcttcaattgaaatgatagggtatttttcacatagctggctgtagaattcgatcatctcttcagaagtcttcactacgccttcaccagcaaggttgtatttaccgtcgctgtagatttcagaagatgctacgtcaagtgcgatcataacttcttcgccaggcttgtatccagctttttcgattgcttcaataatcgtttgaattgcttcttcgtttgaaccaaggttaggagcgaatccaccttcgtcaccaacagaagtgttaagacctttttcttttagaacgcctttaaggctgtggaaaatttcagcgccagtgcgtagtgcttctttgaaagaaggtgcaccaacaggcattaccataaattcttgaatgtctacgttgttatcagcgtgctctccaccgttaagaatgttcatcattggtgttggaagagtttttgcgttgaatccaccaaggtaaacgtaaagtggaagctcaagttcttctgcagcagcgcgggcaacagccatagatacaccaagaatagcgttagcaccaagcttgcctttgttgtcagtaccatcaaggtcgatcatcatgtggtcgattccaagctggtcataaacgctcatacctactagttctggagcgattgtttcattgatgttagctactgctttttctacacctttaccaaggtagcgatctttgtcaccgtcacgaagttctactgcttcgtattcaccagtggatgcaccagatggtaccattgcacgtgctttaacacctgcatctgtaaatacttctacttcaactgttggattgccgcgggagtcaaggacctcgcgtgcataaacgtcagtaatgattggcataacgtgtcatctcctttaaatgtaagttatttaattaatgattttcctgtcatttctttcggttgcttgccgccaagcaagtcgagaagcgttggtgaaaggtccgcaagaattccatctgtacgaagctctgcaccttcttttgtcacaataacaggtaccgggttcgtcgtatgagccgtcatcgcatcaccatcaagcgttgtgacttcatccgaattcccgtggtcagcggtaatgatagcatgtccgcctttttcggtaattttatcaacgatcttacccagacattcgtcaacggcctcaatggctttgactgttggttcaagcattccggaatgcccaaccatgtcaggattcgcaaagtttaagataatcgcatcgtgcttatcggcatcgagttctttcagtaacgcgtccgtcacttcataggcactcatctccggctgcaagtcataggttgcaactttcggagagtcgataagaatgcgttcttccccaggaaactcttcttcgcgtccaccgctaaagaagaatgtaacgtgtgggtatttctccgtctcagcaatacgcagctgcttgtaatcctgctgagcgagtacttcaccaagcgtgttatcaagatttgttggtttgaaagcaacgtcgcctccaactgtttcactaaaacgagtaagtgagacaaagtgaagatttttaggacgttcttctccacgatcgaaaccgcggaaatcatcatttgtgaagacttgcgaaatctggattgctcggtcaggacggaagttaaagaagataactgcatcttcatcatcaaccgtcgcaatcggtgaaccgtcctcttcggtcataactgaaggaagaacgaactcatcatagatttcatttttgtaattatcatcaactagctcgtatggatctttgtaagaagggccatcaccgtatgccagggcacggtaagacttctctacgcgatcccaacgcttatcgcggtccatggaataatagcggcctgagagcgtcgcaaggcgaccaactccgacttcttccattttatcctctaactgctgaatgtaggttttcgcagattgttggccaacatcacgaccatcaaggaaaccgtgaacgtacacatcttcaagaccttgctttgcagcaagttcaagaagagcgaaaagatgtttaatgtggctatgaatcccaccgtcagaaagaagtccaaacaagtgtaggcttgttccttttttcttcacatggtcaattgcctcaagaaatgtttcattttcaaagaagtcgccttcttcgattgcaagattaactcttgttaagctttgatatacgatgcgtcctgcaccaatattcaagtggcctacttcagagttccccatttggccgtctggaagaccaactgcttttccactcgcttgtagggtagcgtgtgggtagttgttccagtaacgatcaaaattcggtttatttgcatgtgctacggcatttcctttttcctcatctcggaggccaaagccatctaagatgattaaagcttctggctttttaggcattctgaccagcctccaaaagctgtaggaaagatttcgcatcaaggctagcgccgccgactaaagctccatcaatgtcggatttacccataagctcgtcaatgttaccaggtttaacactgccgccatattggatacggaccgcattagctgtttcgtcagtcgtttcgtctttaaggacgccgcggataaatgcacatacatcattagcttgatcgcttgttgctgttttaccagttccaattgcccagattggctcatatgcgataacagattgagctacctgttcatttgttaaaccagcaattgctttttgaacttgtgcttttacaatatcttctgttacatcgctttcacgctgttcaagcgtttcaccgacacagatgattggcgttaggttatgtttgaacgctgcatgagttttttgattcacgatctcatctgtttcaccaaataactcacgacgttcagagtgaccaagaatgacatagcctactccaagatcgttaagtgctacagggctaatttcacctgtaaacgcgccgttttcttcaaagtgcatattttgagcaccaacttgaagtgctgtaccttctagctcatccgttaaataatcaaggaaaagagcaggagcacagacaacggaatctacgcgattgccatcaggaataagtcctttcacttcgtcaacaaagctttttgtttccgtaagtgttttgttcatcttccagttacctgcgatgattggtttgcgcatgttcactcaccatcctttataagattaaaaaaacataagtattttatttgtcgttaagtgcgacaacacccggaagttctttgccttccatgaactcaagagacgcaccgccaccagtagagatgtggctcatttgatcagcatagccaaatttctcaaccgctgctgcagagtcaccgccaccaataactgaatacgtatcttctgcgttcgcaagtgcttcagctactgctttcgtaccattagcataaacgtctagttcaaatacacccattggtccgttccagataacgagtttagagtcagcgatcactttgctgtaagtttctctcgttttcggtccgatatcaagtgcttcccaatcggaaggaatttcttcgatgcttaccactttcgtatttgcatcatttgagaaatcatcaccaatcacaacgtcttgaggcatatagaaattaacgcctttttcttttgctttatccatgaatgatttcgctagatcgattttatcttcttcaagaagagacaaaccaacttcatgtccaagtgcttttacaaatgtataagcaagaccgccaccaatgatcaagttatctactttatcaagtaggtgatcaatgacaccgattttatcttttacttttgctccaccaacaatagctgtgaatggacgggaaggttctgttagagcacttccaagaacttcaagttccttctccataagaaaaccagctacagcaggaatatgatgagcaataccttctgttgaagcgtgagcacggtgtgctgcgccaaaagcatcatttacgtaaagatctgccattgcagcaaatttcttcgcaagttcttcatcattcttctcttctccagcttcgaaacgaacattctcaataagaagaaggtcgccatcttctagacccgcaatcgcacggtcaacttcttcaccatagactgcatctgtttttgtaacggttttgccaatgaggtcacttaagcggtctgcaaccggatcaagacgtagctcatcaacagcttcaccttttggacgtccaaggtggcttgcaagaattactttcgctccctgatcagacaaatgcttgatcgtaggaagtgctgctttaatacgcgtttcatctgttacctttccatcttccataggtacattgaaatccacgcggcagaatacctttttgccttttaactcaacgtcacgaattgattttttgttcatcacgcacgtcctcctctgcacaaagttttaaaaggttcaccttttaaataaagctatatcgttagtaaagacaatggaaaaggaggaaggcccaagacttcctcctcctctattaacaattcttattatagcccttttgcagcgatgtagtcgactagatctactacgcggttagaatagccccactcgttgtcataccaagagataactttaaccatgtttccatcgatacccattgtagaaagaccatctacgattgaagagttcgggttaccgttgtagtcttttgatactagtggctcgtcgctgtaaccaaggtatcctttaagatcgccttcagcagcttctttaagagcagcgtttacttcgtcaactgaaacgtcttgatcaagttcagctacaaggtcaacgattgatacgttaggtgtaggtacacgcatagccataccattcaacttaccatcaagctctggaagtacaagagatactgctttagcagcgcctgtagatgttggaataatgttttcagctgctgcacgtgcacgacggtagtctttgtgtggaagatcaagaatttgctgatcgtttgtataagagtgagttgttgtcataagaccacgcttgataccgaacttatcgttcaatactttagctactggtgcaagacagtttgttgtacaagatgcgtttgagataacgtgatggctagctgcatcgtacttgtcttcgttaacacctagaacaactgtaatgtcttcgtctttagctggtgcggagatgacaactttcttagctcctgcttcaaggtgcttcgcagcatcgtcacggtttgtgaaacgtccagtggattcgattaccacttcaacaccaagatctccccatccaagttgtgctgggtcgcgctcagaaagaactttgatttcagttccgttaacaacaaggttctcaccgttaacttcaacttctacattaagttctccatgtacggaatcgtatttaagaagatgtgcaagcatgtttgcatctgtaagatcgtttacagctacaatatcaacaccagggttgtttaatgctgcacggaatacgttacgtccaatacgtccaaaaccgttaatacctacttttgttgccattgtgtagttcctccttgaatttcctcgtttcccgaggtgtgttttatttaataaagggaatctccctctaataacgctttagcggcaccttcatctgtaacaagaacactttgaatccctgtctttagataagctgcgatggcttttgctttcgaacggccgccggctaccgcaatgactaattcgctacgctctaaatcttcgagctgcagtccgattgtcttcactttgtgaacgacttctcctgactgattgaagtaatacccaaacgcttcagcaacagcatgttctcgctcaattttctcaacaacatcaagcgtcgacttacgtctctgtgccatcgttctagcttccccaatcccatgaaccacaataccggctgacttaataatctcaaggatatctttgacgcccggttcttctataagagattggtatgcttcttcactcaactgatctggaacatgtagcaaacgatagtcagtatgggcttttcttgccatcttcgcacaaatcgtgttcgcctgattttctacctgttcaccaagaccccctcgggctgggacaaacagcgttccttccatttctgaagaaggaatcatcatatcggctacacctgcgagcgtggtaccacccgttacagcaattactctatcttttagctgaaactttttcaagcgtcccacagcggctcgacccatttctttttttacccagggtgtatcatcactattaccagggacaataaatacttccggtatgccaagcttatctttcagacgcttttctaggttatcgagaccggatacttcattcataaccggttccagttccaacagaagctgttcaccctcttctgtcaagtgcataccttgtatcgacatatgtagtagcccctgatctttcaagaacgttacttcgcttctgagaacccgctcggtgatatccaaactgttcgcaagacttctacgtccaataggctgcataagtcttaattgtctcaatacccgatagcgcttattcataacttctagcatgtccggcaataatttttgttgaagtgacaataatgagcgcataattcgtctcccctgctgttcttcttttttcctgagacgtattatgtcccgcttagacatttttagtcccacctggatcaaaaagaacttcttacaattttcattgtagcagttgccaaaagcatgggcaactatgttatactgaaaattttaaagtaagcgttttcttattgttttttttgatatccgaccataatccacgatttcaccttcgatttcgacaaccggaatcattagcataaacttttccaaaagcgcttcatcgctataaatatcaaccgtttgtactgagaacgctatttcttcttgaagctcctcaagaagataagccgcttcatcacaaagtggacatgtcgccttagaatataaaataaccgatttactcacgtattaaacctcccttctttcaattttctagtttactgaacaaggtattcaaacgcaaaaaaagagccgccttcccggcagctgttacgtaaatctctttcgctttgatgaacttaagatctttaattcgtctcgatattttgcaattgttcgtcttgatacttcaataccatgctgaatatgaagagcttctacaattttttggtctgataacggtttaagtttattctcattctctacaagctctttaataaagagcttaacactggaagaagaagccccttccccagattcactcgctagctttgaagtgaacaaatcttttaatgggtacaaaccatgtggcgtttgaacatatttgcttttaatggcccgacttaccgtcgactcatgaacatgagcttcatttgctacttctttcaatgtgatcggtacaaggtcacttatgccatttcttaaaaacccttgttgatggacaatcacaacgcccataatcgcccttaacgtctgctttctttgttcaatacttttcattaaccagctcacttgctgatatttgtctttcaagtagtcggctgcttcgttatttttaaatgaacgatacgtgttgctcactttcattgcgggcaaatcatcatcaagcaatgtaacagtaaatcgtccatttttctcttcgatcataacatctggaacgatgtacgttgttttctcagcaaaccacttcgttcctggacggggatcgagatctgctactaaatctgctgcctgctgaatttgttcgactggtacgtgatactgtttcgaaagctcgcgatatttcttttctgctagcgctttcaaatgatctgatacgagcaatcgagcaagttcaaagacctcaccctgcttatttagctgtaaagaaagacattccgataaagagcgagcccctatacctggaggatcgagtaactgaacgtgtcgaatcgcttcagttaattcaaattcgtcacactctaaaaaactcatcacttctgtttcattgattcgtaagtagccactttcatcgatgttatcaattaaataatggacaatgccggttattttttttggaaggtttatgcacctcgtctgctcgtgaagttcatcgtgcagactccttcttgtttccgcatattccagcggatcttgtctagttccattatcgtaggaacgttttgaagaacgaacgccgccgtcccatgatggtaactgtaattcaatgagtggattttcaagagcctgttctttcacgtactccagtaattcagctgtagaatattggagtatagaaatcgcttgatgcaactgggttgtcatgactagtttcgttgtctgcttttgtatcaatcctaattccatcgcaatccctccaccttcatcatactatatcgtttcattttatggtatgaaaaaaatgaaaatgagcagaattttctgtttttttaaaggcggttcttgacaccatttttaataaaattgatgaaatcgcccgtccctcagtcaaatttctacataaactgtgttatagagagagaaaaaaggaggcaaatgccatggatttagcggtatatggaattgctttgcttccagtcatcattggagtagtacatctcttcaaggtgtttggttttccggtaagatttttacccatcctttcaatcatcatcggaattgtgatgagtcatgtttacgtcgaaccggaagattttaaaaaagccttctttatcggattatggcttggactatgtgctactggtatgcactcaggctttaaacacacgatgagtggagcaggcagcaagagacatgatgatgatcgtgattgttagagggcacgactgatagcagaaagagtggacgagttctactctttttctttgttcatattttagaatcaacaaccgatatcgttatcgtgaaatttgtctatcctatatataaaaaagaacaacaaaaaaatccctctcgcatcagcgaaagggattggaattatgtatatggtgcgcccggagggattcgaacccccgactgacgcggtaccggaaaccaccgctctatccgactgagctacgggcgcgctttattagcgcaaagattattatacgggatcacccatttttttgcaaggtgattttcgccttaccgctctttcaattgattcacttcgttacttaggtcttaagctcttgacgtctcaattatctcatagtaaagtaaaaccaaacatgtgttctattaggcggtggcgatcgtgttccaattaagtaaagaagaaacgaaggcattaagaaactacctcttacttccttacgtaaaaagagtgctggaaatggatatgaaatggttacatcattctagaatgaagcttccgcgcccttacctggaactgattcggtcagctatgtcgcttgcatcaactgatttgaaatgggcaaaagcagttcttcatgaaaaaggaattcgcgtctacattgaagaaactaaagaagatgtcatcatttgcaaagtctactgtcgtggctacaatcaaacataccgatattcatctattcaaattcgtaaccaggtagagagaagaattctagcttattttgtagcagatgagcgcctcaaaaaaaggagcacgcggtctgtttaaaataaggtgatgcggggaaaatggatgtagatagagaaagaaaacatctctaccttacccttttcaaaaatagcacagcactttatttgacctatattgaccttttaggtatgatgaacgtacagcaactacatattccataaaaataaaggaggaattttaaatggttttaattccaacggtaattgaacaaacaaaccgcggtgaaagagcgtacgacatttattctcgtcttcttaaggaccgtattattatgctaggaacagcaattgacgacaacgtttcaaacgctgtagtcgctcagcttcttttccttgctgcagaagatcctgataaagatatctcactttacattaacagccctggtggttcgatcacagcaggtatggcgatttacgatacaatgcaattcatcaagcctaaagtatcaacaatctgtatcggtatggctgcatcaatgggtgccttccttcttgcagcaggcgagcctgggaagcgttacgcgctaccaaatagcgaagtaatgattcaccaaccgctcggtggtacgcaaggtcaggcttctgacattgaaattcacgcaaaacgtatcattcaaatgcgcgaaaagctgaacaaaattctttctgaacgtacaggtcaaccacttgaaacaattgatcgcgacacggatcgtgatcgtttcatggaagcaacagaagcgaaagaatacggcttaattgatgaagtaatggaaaagaaagcataaacttgtttgaatcgagcctttcctcagtgaggaaaggctcttttttacgcaaaaaattctttactacaacaaaaaaaacgaaggctaccgcttgcacttagcggtaagccttcgctctttaatctttttgcacaaaatccatgagtgatgacatagcatcctcttcgtcattaccatcaacagttaaaataacagaagcccctgttccaaccgcaaggctcatgatacccataatgcttttggcattcactttctttccatctttttcgaggaaaatatccgcgttaaatcggttggcttcctgcacgaaaagggctgcaggccgagcctgtaatcctgtatctaatgtcacaacaacttctttttgaaccacttgttcattcctccccttctttataactgctgataagaaaaacggatcgaggactcttatttagcgagtgctaaaaacgggtatcagcagatgatcgttgtattatcctaaatataagtaagcgctatctcagactgtgaaaaatttagaaaaaccccattccctgcgttatgagggaatgaatgtttttctttaactttgccttccttctagtcggaaagctaccttccaccagtaacgaaacctttggcgtggataactatgaaattggcttaccattacgaagcttgtcagcaatttggtcaatttttctcaacctgtgattgatgccggatttgctaatcgctccacccgtgaccatctcgccaagctcttttaacgttacatcctggtgcttcactcgaagttccgcaatctcccttagtttatcaggaagaatttcaagcccaacttctttttggataaagcggatgttctcaacctgccgaaaagctgcaccgactgtcttattcaaattggctgtttcacaattcacaattcgattaacagaatttcgcatatctttcatgatacgaacatcttcaaagtaaagtagcgcctgatgggccccgacaacacttaaaaactccgtaatcttttcaccttctttgatatagacgatgtaacctttctttcgctcgagcatcttcgcatttaaaccaaattcattcattaagttacaaagtgactctgtatgctcttcatacatggagaagatctcgagatgataagaggtttcagggtgattaattgaacccccagcaagaaatgcccctcttagataagagcgtttgcaacaggcctttttcgtaaaatcactcgaaatcgttctagtaaacgtaaatgcattatccataataccgagatcttcaagaagctctctcgcttttgctgagacccgaacaatgtaaacattgtttttcttcaatctcatcttcttacggacaaggagttcaacatcataattgtaaatccgcttaataagcgtataaatccttcttgcaatggcagcatgttccgtcggaatgtttaaaatcaactgtctgtttccaaacgaaatggatccattcattcgtataagagctgctagttctgatcttgcacaacaaggtttgctttctaactgcgttaattctttctttgtatcagcagcaaatgacattgccatcccccctttttcatgcaggggccccactgacccatcatgatcttttatcgtctaataaagataaaagaatcgatgatatttttttcgcatcatggcgtacatatttctcatcgtattggataattttatcactgattacatgaaaaccaaagctcttcagacgattttcgtcatattggacaacctctgctcgttcttgtgcataacgtttttcgtaaaaagagggaatcatttcttcatttacaataatcgtatccataagtttatagccaatgtgatcaatgagtgcctgcacgtggtcactcgccgtataattttctgtttcacctaactgagtcataacattacaaacatatacttttcttgcttttgactgctgaatttctttcgcaatgcccggcacaagtaaattcggtaatatgcttgtatacaaactacctggtccaagtacaatcaaatctgcttcacgaatagctcgaatcgactcgggtagcgctttgatgcctgatggtgagagaaacactcgtttaattgctttgtttacctttggaatttgggattcaccttgtacaaacgttccatcacgcatttccgcatgtaaaacgatgctttgattcgatgctgggagaacttcacctcgtacgttcaagacgcgacacatttctcttacgccttttacaaagtctccggtaatatccgtcatggcagcgagcattaagttgccaagggaatgaccagataaaccatttccgtttttaaaacggtgctgcatcaatccctctaataaaggttcaacttcagataaagctgtaatgacatttcgcacatcgccaggaggaggaatatcaaactcgtcacgcaatcgacctgaacttcctccatcgtcggctactgttacaatggcagtgatgtcgacaggaaactttttaagtccacgtagaagtaccgataggcctgttcctccgccaatgacgacagcctttggcagattagtctcatccatattaattgtgacccttccctttttcaatatcccgatgcgtaatatttgttcgatactctgattcaaagtgatggccgatgtgttctgcaaaggcgacagaacgatgctttccgcccgtacagccaataccgatgactagctgactcttcccttctctcttatattgagggagcatataggcaagcatatcgattaacttctcaagaaagatttgtgtttccttccacttaaatacatagttcgcgacttcttcttccacacctgtttttggacgcaaatgctccacatagtgagggtttggaagaaaccgaatgtcaaagacaaggtcagcatcaatcggaatgccgtatttaaagccaaatgacatcacgttaacgccaaagttttctttttcattgttcgaaaagcgatccatgattttctctcgaagttgaaccggtttaatatcgcttgtatcaataatttgttgggagcggcctttcagctcttccaacatttctcgttctttttggataccttcaagcggcaaaccttctggtgcaagcggatgagagcgccttgtttctttatagcgtctgacaagtgttgagtcttttgaatcaaggaagagcacttctgcatctaagcgatcatgtgaatccaaatgatcgacggcttccactagatgatcaaagaaatctccaccgcgtaagtccatcacgagcgcaactttatttaacttcccttctgatccgtcaaccatttcaacgaacttcggtaaaagggctggtggcaggttatcaatacagaagtagccaatatcttcaaaacactgcatcgcaaccgttttacccgcaccactcattcctgtaataatgaccatatgaatgcgtttatcgattaaatcggtcattttccccactccgtttctcaatttctcttattggtacgcttctaattaagacgggtcaagccgataagaaagtaatttgaaatcgggggtgtaggtgaatgtaccataaattattccatggcctttcatcatatagtcaagaatatgataatctcccggagccattggaaggtcactcacatcatctgtttttacccatgctacttttccttctgctgacttttcaaccgattccccatcgtattccgttgcaagaaacgtaaacatcatccattcagacttagttacttcattttctttaataatgaatgtgaaaatccctttaagtttggggttctttaaatagacaccagtctcttctcggaactcgcgaatcaccgaatcacggatggattcttctgattccatctttccacctggtgcaacccaccaacctcggcgcggcttttgtagtaagagtacgcgatcatttgcttcgtcgtttaaaatgcagtttgttacacgttgcacaattgtcacctcaattcaatcatcctgttagtatacgaaagcctgaaagaagctcagacttcaagattttctacccatagtatactatgattgctgaccatgaacaatgagagcggtttgatcagccctgaagatttgtctcattcaggcaaaaaaagagcacggtgcataaatgcccgtgcaaaagagtgaatctatttaaagggggttaaatctaatattagtttaccccatttgtatttcaccgctgttacagccaaattaaaagcgaatgacgcggtgacaggcaccacccgataccgctcgaaggctgtcgaaatgcggttttaatgcgagctacaaagaaaaagcagaggatcaccctctgcttttataccgaattagactagtgcttcttttccagcatcttctagtgattcgatgtagtgctgaacagattgtgcagcgatactaccatcaccagttgctgttacgatttgacgaagcattttgtcacgaatgtcacctgctgcatagatacccggaaccttcgtcgccatgttttcgtctgtaacgatatagccttcttcgttcgtaatatcaagaccactaacagcttggtttaatggaagcataccgatgtaaataaagacaccgtccgcactgaattcacgctcttcaccagttaccgtgtttacaagtagcgttttatttaccttgccattttcacctagaatttctttaaccgtatggttccagatgaaatcaattttttcattatcaaacgcgcgctgttgaagaattttctgtgctcgtagctgatcacgtctgtgtacgatggttactttagaagcaaatcgtgtaagatacacgccttcttcaacagctgaatcgccaccgccaactacaacaagctctttgttcttaaagaaagctccatcacaaaccgcgcaataagaaacaccgcggccgctatactctgcttcacctggaacaccaatcttcttgtattcagcgccacttgttacaataatggccttcgcatgaaattcttgattcccagatacgactgtcttgtagtcaccgttatcgcgaatttctttcacatcaccatattgatattgagcgccaaatttcttcgcgtgctcaaacattttcgtagaaagatctggaccaagaatgctatcaaaacctggatagttttctacatcttctgtatttgccatttgtccgcccggaatcccgcgttcaatcataagaacgtcgagattagcacgagaagtgtatacagctgcagtcatacctgcaggcccggcaccgacaataatgacatcataaattttttcactcatctgcttcacttccttcacgttttgctaaattacatttattattaaagaataatgtttcttatttaaaatcatatctgattgttgataagaagtctaccagtctgctcagaggtcattcgtttcaagtaagctagttaactttttacggtaagcatatatggtcgatccagatacaccgaacgcatttgcgacttcgatttgagtgacgtttgtttgccttactttatgccacatgtaaaacatcgcagcagcagttgctttcacgttatgaaaggcttcgctactatctgaaagtttaacataacaaggcaaccagatcatcgcaattagctcatgcaaatctgagtcactaatatctgcctgctctagctcagcaataacacgcattcctgatcgtacgtattcggggaaatctgtctgtgtacgtaccgtatacgtcccttcatcatctatgatttggaccggttcgtcagcaagtgtgaccgcaatatacgccgaaagctctttaacaagaagaggttcatcttttcgtttacaataggtttgtagaatcgaagcaccttctggatctcgtctcgtataaagaagcatcagatgcgtcattctggcatgataatcgtgtttcccctcaggatcttccacttcttgaggcatctgtgaccggtagctaacctggtttttatgaagcgtacccgcttctagctctgtcagataatgctctgccatttcattctttgcatcaacagtttgaacctttttccagtaacgctttgcaagatcaggacgattcagttgatacgcagaaacggctagccagtgatagaacggcacgtcccacatgtgtcgggtactctcaactttacgtagccagtgaaaggcaagctcatgttcacccaaaaacccaaacgtgcttcctaatttatacgaatgatcaggatgaatcgggtagacattcttaagcctctcaagcatcacatcacgtttaacatgttgaccgaggaaatcatagaaaagcgttaagttacaaaccgcgtttagattcccttcatttttcgttaaaacgtcatcgagtacttcgacggcttcctcatactgctcactataaaaataagcgagggccaggttattgtacgccggccaaaactcagaataaacttctgtcatccgctcaagtaactcaattgcttcaagaaaatgccccgcttcaatcgctttacgagcggcttcatgctcttgaatcaactgttcttcttcgccaatctcctgtggtaaatgctcggattgctcgaacaagatgaggtcgacgagctcctcggcctcttccataaactcaccttctggctcatgcttaaggtaaattcttgcatgctcttccgtttgtttaaacagacccatatgtgcaaagttgttcgcaaggaaaaagtagcaatcatagtattcaggatcaagatcgtcaagaacaaatttcagccattcatttgatgcttcatattcgcctaattccgacaggaccgctgcaagttgacatatataatcgacttcttcggggacaagtttaaccgcacgttcaagatgctgtcttgctttatccaaattccgttgctgataggctctcatggcctttttataaaaataatctccgtcctgaacgaacggaatcagtcggcctttcatttccgaagaagcatgaagttctttcctcatgtttccccccaataatatttcttcaagtaattctattaccagtcatatccgttcaaaagtataacatacatctacttccaaccgtaaaagaaaataagtagaaaaaactggctaaatgctcatatgcgctcttcgaatcgttttgatctgacgcaactcaaaataaaaacgagctcatcggctcgtttttatttccacatatctttttttcgctttgagatttcttgcgcaataaaaccaatacccattccaagcagcacaccaggtcctggttgaccaagaaaaagtccaatagcaagtcccacaaacatgaagcctacaaacatgtaacctctctccatttctcgtaattgaatttactcttgtctacgaatggaagagaaaaaagtttcattattttgaagcgtgtcgttcctcaagtacctgaagaacgtcatcgagcgcacattcctgctctcttaacagtaccatcaaatggaaaatcaagtcggctgattcccacgtaagttcttgatggtcgcggtttttagctgcaataatgacttcagaagcttcttcgccaaccttttttagaatcttatcaacaccttcattaaagagataagttgtataagctccatctggacgctcggcttcccttttagcaatcgtttgttcaagtgtattgaggatagcaaaacgatccgcgttcggctttccttcttctgaaagcaaagtatcactgaaacaagagtaagtccctttatgacaggctggtccttcgggatttacaagcacaagaacagcgtcttgatcacagtcatagcgaagatcaagaacgtgctgtgtattgcctgaagtcgctcccttatgccatagttcttcacgcgaacgactgtaaaaccacgtttcctttgtttcgattgttttcgttagagactctttgttcatataagctagtgttaacacttctttactcgttgcatcctgtacaatcgctggcacaaggcctttttcatcaaattgaatcatttcggtattcatcgaatcgccaccccgttttgttttaagtaatctttcacgtgtgatagtgaggtttctttatagtggaagatcgatgcggcaagagcagcatctgctgaagcatcgaggaaaacctcgagaaagtcttcagaagaccctgctccccctgatgcaatgacaggaatggaaacagcttcgccaatcgctttcgttagcggaacatcaaacccatctttacttccgtccgcattcatacttgttaataaaatttcgcctgcacccatttcctgagccttgatcgcccactcaacagcgtcccattccgttgccgtacgaccaccgtgcgtataaacgcgccatgaatttgtttcttcttcccacttcgcgtcaatcgcaacgaccatacactgtgttccaaaataatcagcgccttcacgaatcaattccggtcgtagaacagcggcggtattcatcgatactttatccgctccagcgcgaagcacacgtttcatatcttcaagcttattaatgccgcccccgacggtaaaaggaatagcaagttccgctgccacctgccgcaccacgtcgaccatcgtttctcttccttcgtgtgaagcagagatatctaagaaaacaagctcgtctgctccttcttcatcgtacactctcgctaactcaacgggatcgccggcatctctaagacctacaaactggatgcctttcacaacgcggccgtctttaacatcaaggcacgggataattcgtttcgtcagcatccctagacctccagcgcttgttttaatgtaaattgattcgtgtagagagcttttccgataattgcaccgctaatcgagtcacttctttgttccaggcttttcacatcgttcagattgcttatcccacctgaagcaatcacctctttacccgtagcttcaccaagttcagcaatcgcttcaacgtttggacctgatagcgttccgtcttttgaaatatccgtaaaaatgaaaacctctgctccatgctcagcaagttcttttccgagatccacagctttaatttcggaagtttttagccagccttcaactgcgacatacccatctcttgcatcgattcctatcgcgatcttttctttatatttcgtgagcatttttttaacaaagtccgggtcagatatggcactactaccgaggataatccgatcaacaccattttcaaggtaaaaagaaacgtcttcttccgttcgaataccgccaccaacttgtacacgcgccgataagttgttggccacctcaagaacgtaacgatcattcacacgctttccctctcttgctccgtcaagatcaaccatatggatccactcggctccgtcatcagcaaattgctttgccatatcaaaaggcgaatcgccgtaaatggtttctttgttgtaatcaccttgcaaaaggcggacacatttgccgcctctcatatcaatagcaggataaatggtaattggcatcttatgcgtcattcctttctacgtattgggcatagttttttaaaatcgcaagaccggcatgactgcttttctcagggtggaactgggtgccaaacacctttccttttcctacaacagccggaacttcctcagcataatcagctgttgaaattaaaacatcacgatcatctgtatcaacataataggagtgaacaaaatacacgtgctcatctccgacatcattcattaaaaaggaatcaggctgatggatgactagtttgttccatcccatatgcggaactttataggcgttaccagctgcatctttgccaggaaacttctttactttacccggtaaaaaagagaagccctccgcatacccattttcatcactttcttcaaaaagaagctgcatgccaagacaaatgccaagtaacggtttacctgtttccacttctttttcaataaaagcttttaagcccgtttcggttaagatcgccatcgcatcacgaaaagaaccaactccaggaaggagaagtccagtcgcttttgcgagctccttctcatcttctgaaacaaaatagtcatatccgagacgctcaagcgctttactcacgctgtataaattccccatgccataatcaataataccgatcatttacagcattcctttcgttgatggcacaccttttactcgaggatcgattagcgttgcatcgtctagagcacgtccgagcgctttaaaaatggcttcaatgatatggtgcgtattgtgtccgtagtgaacgatcacatgtaagttcattcttgcttcaatcgcaagcttccataaaaattcatgaaccagctcagtatcaaacgttccaacacggtttgatggcagctctacacgatattcaaggtgaggacgattgcttaaatccacgacaacctgagcgagtgcgtcatccatcggaacaaacgcattgccatatcgcttaatgccttcttttgtaccaagcgcctgttttagtgcttcaccaaggcaaattccaatatcctctgttgtgtggtgatcatcaacctctgtgtcaccatttgccgcgatcgctaaatcaaacttgccatgctttgtaaaaagatcaagcatgtgagtaagaaacgggacgccggtttgcaaatcggtttttccgcttccgtccaccccaaaggataggttaatagatgtttcagaggtttctcttgaaatggaactttttctttcttcactcatactaaatcctccaatcgaagttcaacagctctcgcgtgagcatcaagcccttcaagcttagccagcgccacgatgctgttaccgttctttctcaatgcttccttactatatgaaataatgcttgattttttaataaaatcatctactgacaatggacttgaaaatcgtgcggttccgttcgttgggagcacgtggttaggtccagcaaaataatccccaacaggttcggagctataaggaccaaggaaaatcgctcctgcgtgacgaattttcccgagaagcgtcatcggttcatcgaccatgatttcaaggtgctcaggagcaagctcattcacagcttcaaccgcttcagcaaggtgatcaacgacataaatcatgccataatcctcaatcgacgttgcagcaatttcggcgcgcggaagttcaactaattgttgcttcacttcttgttgaacccgctcagctagggttgctgatgttgttacaagaactgcgcttgcccgttcatcatgctcagcttgtgataaaagatctgctgcaacataagccggattcgcatgttcatccgctagcacaacaatttcactcggtccagcgatcatatcaatatcgacgatcccaaatacttctcgtttcgcaagagcaacgaaaatattacccggtcctacgattttatctacaggagcaattgtttctgtaccatatgcaagtgctgcaactgcttgagcgccgccaactttaaaaatttccgtgacgcctacttcatttgctgcaacaagaacaccagaaggtacatttccgtttgagtcaggcggtgtgaccatcgcaattcgctgtacacctgctgcgatcgcagggattacgttcattagtaccgatgagggataagcagcttttccaccaggaacataaacaccaacagaatcaagtggcgtcactttttgtcctagcattgtgccgtcttcagcagtcgtaaaccatgactggcggcgctgacgctcgtgaaacgtttgaatgttctttgcggcctgtctaatcgttgtgatgagttcatcagttaaatcgcgataggctgtttcaatttcctcagttgaaacgcgcagttctgttaagtctgctccatcaaacttctttgtgttttccttaacagcttcatcaccagttgctttaacttgtgaaagaatagaaagaacagcctgacgctgctcttccgttccttgctcaatcgatcgcttaattgaaatgccttcgttccgattaacgattttcatctgcactctctccttccacaaccgcagaaagacgttcgaccatatcgtcaataatggcgtctttcgtccgataacttaccgggtttacaataaagcgagatgtgatcggctcaatgaatgccgtttccattaagccgttttccgttagtgttcgacctgttgaaacaatgtcaacgatgcgatccgcaagaccaatcagtggagcaagctcgatcgatccatttagcttaatgatttcaacttgctctccctgctgacggaaatagtttgaagcaacgttcggatattttgttgcgatcttcggtgccacccctttaattggtccatccgatagtccagcaacggcgaggtaacagccactgattttcagatcaagcacttcataaacgtttcgttcttcttcaagcatgacgtctttacccgcaatcccaacatccgctacgccgtgctcaacgtatgttggaacatccattggtttcgctaaaataaaacgaagattttcttcttctatatcgataattaacttccgtgaatcatcaaactcagggggaagttgataaccagcatttcgaagcaattctacagcttcttcaaaaatacgccctttcggcatggccatcgttagcatgactacatcccctttccgtttttaccgattaaatacgttacgtcatcaaagcgctcagagtaagcatcaagattcgttacgccgcttaactcctgcacaacaaccttctcaccatccgctcgtcgttctgacgcctgttgaatggcttcttctcttcgttcagggctgaatataatggcatttggaaggcgctcattgtccgttactccaagcgcttctgcaaggtgatcaaggcgaatcccgaatcccgttgcctgcgcaggacgatcaaagcgctcgagtagctcatcgtaacgtcccccattacttagaggcacgccaaggttgtttgcataaccttcgaatacaacgcctgtgtagtaactcatatgactcacaagtgtaaaatcaaatttcacctgatctgctacaccataagccttgagcgtatgtaatagcgtgcggagctcttcaagaactcgttcaccagcttcgtttggaagaagttcaatcgcttcttctaattttgatccatcaccgcgaagcgttagcagggccattaatcttttttgatcaattgtagacagcggcatctcacgaacatgctgacgatagcccacgtaatttttttcatataaataacggcgaagcacagcagcgcgttcttcatttccaacgatcgatagaaatagctcttgaataaagccaacgtgtccaatagcgatttggaaatcttcaaggccagcttcttctaaaacagcagccattaacgcaatcacttccgcatcagcactagttgtccgatctccgattaactctacgccgatttgttcaaattccgcaggcttgcctccttcgtcttcctgtgcgcgaaacacattcgaatcataggcaaggcgaagtggaaaaggctcgttcttaagacttgaagctgcgacacgagcaatcggtgccgtcatatctggtcttaggacaagcgtattgccgcgctggtcaagtagtttaaaaagctgctgatcaagaatagcagaagcttctccgaccgtttcatagtactcaagcgtaggggtattcataaaacgatagccccacccttccgttacacgctgaattttttctcgaatgcttgtttttaaatcatatagtaccggtagcgtatcgcgcataccgagcggcttctcaaatacgaatggtcttgtcattttgtgcacctcacgtttcctttagttcgctaacatactaacaagatgaagttatttgtagtttacacgcctttatttttttcgtcaaccaataaggggcattattccctttactccttttctgtactccaatgtgaattacctttattttttaggtgatcataaagagtgatgtcgatttttgggtttacgtctcatattcgtgatcatttctccgtagattagggtaatcactatgaaagaaactttcttttccaattaaggaaatctataatgaggaaaagaataaatgacaaaaagagaggatgtgccacgtggttaataaaattttctttttcctcgtgatcatcggagttcccctatccgttgctggaagccttcttcattggtcgcaaattctaatgtttgttgtctactgcttaaccattgtttctcttgccgcttatatgggaagagcaaccgaaagtcttgcagtaatctcaggaccgcggattggtggcttgcttaacgctacctttggaaacgcggttgaactcatcatttcaatttttgcattaagagaaggtttaattgaaattgtgcttgcttcactaacaggatcagttctaggaaacctgctccttgtcgctggtttgtcattctttgttggaggattgaagtttaaaagacaaaaattcaacgtctatgatgccaggcacaactccggactgttgatgtttggggtgatcgtggcctttgttattcctgaagtgttctcaatggacatgaatgacgcagaagcaatttcattaagtaccggcatatccatcattcttatcgttctttaccttgctgcactcttctttaagctcgtgacccatcgaggtgtctaccagcacgtttctgatcaagaaggtgacgatggaggtggcgctcacgctcacgaagaacctgagtggagtcgtaaaaaagcgatgctagtgctagctctgtcgactgctgcggtggcctatgtatcagaaagtcttgtgcatacatttgaaacagttggagatacatttggctggagtgagttattcatcggggtgatcattgtggccattgtaggaaatgcggctgagcacgcttccgctatcatcatggcttataaaaacaaaatggatgtggcagttgaaatcgcagtcggttcaaccctgcaaatcgccatgtttgttgcgccactactcgtccttatctcacttttcttcccggtccaaatgccactcgtctttacgttacctgagcttgtgacgatggtaacagccgtgctgctcacgattgtcatcagtaacgacggagaaacgaactggtttgaaggagcgacgttactcgctgcttacttaataatgggaataggattttatcttctttaatcaagaagcctgcaatttgcgggcttttttgttacagtaactgagggaagatcttccgcataacgtgttagaaattggacttcaccctcttttggatgatgtaatgtccacctaacggatcgaacgaaaacgcagaaagtaggcgaaaacatgattcaccgtaaaacaagtcgagaaattcaattaatgaaagaagctggagaggttcttgctgactgccacaaagaacttcgtagcattattaaaccaggtgttacaacgaaacaaattgatgattttgttgaactctttttagaggagcgcggtgcgacaccagagcaaaaaggctatcaagattacccatacgccacatgcgcttctgttaatgatgtcatttgtcacgggttcccgggatcaagaaaacttaaagaaggcgatatcgttacaatcgacatggttgtgaacttaaatggcgcacttgctgattctgcatggacgtatgctgtgggagcgatctcagaaaagaagcagcatttgcttgaagcgacgaaaaagtctctttaccttggcattgagcaagctgtcattggcaatcgtattggcgatattggccatgcgattcaaaaatatgcagaagcagaagggtttggcgttgttcgagatttcactggacacggcattggaccgactcttcacgaagaaccgatgattccacatttcggtcagcccggtacaggcgctagactgaaagaaggtatggtgattacaattgaaccgatgctaaacattggtaaaccatacagcactattgatgaagatggctggacagctcgtacagtggatggctctacatccgctcagtatgaacatacgcttgcaattacaaaagacggcccagttattctaacggatcagggtgacgagtaatcacaagaaagcccgcagcatctgctgcgggcttttatatatcgtgctttgctcgttcttctttcgtatagatgacctgcatcggatttccaccaacaaaagcccctgctggcacacttttatgaacaagcgtgccagctgatacaatggcaccgtcaccaatggtgatgccaggcaacaatgtactattcgccccaatcatcacccgatcaccaatgacaacatcgccaagccggtactcatcaatcaaatattcatgggctaaaatcgttgtattgtagccaataatggcgttttttccgactgaaatcttttccggaaacataatgtccagcatcaccatgagggcaaaagctgtttgatcaccgattttcacacctagaaaggttttatacaaccaattcttcataggaataaacggtgtataccgcgctagctgaatgacaataaaatttttaacaaccttccaaaacggaacggttttataaatttgccagagagcgttgctaccagtaacggggtaccgctccgtgtttctcacttgtcggctccagcaatcgcaagaatttctcccatatgatcaaccaggtaatctggcttaaatgaggcaagaaagtcgcatcctttaatcgtccaggacacaccaactgtcgttacacccgcattttgtccagctagaatatcatattgactatcaccaaccatcagcgtttcttcacgaacagaaccaagtttgttcattgctgtttcaagctgctctggatgtggtttaggatgatcgacttcatcaactgtgataactacagggaagaattgatcaagctttgttagctttaatcccatttccaccgtgtttctcatttttgaggtaacgatcgctagtttatatcctttttcagataacgtcttcaccgtttcaaacacgccatcgaattccgtgacaaggttatcgtgattcgtaatattatgatcacgataaaaagcgaccatttcttctgcacggctttcatcatgctttgcgaaggttaagtaaagcggctctccaataaactgttttaactcttcgtccccgtaacgaccaggataaaagtggtcaaacgtatgtcgaaatgaggccataattaaatcatttgtattaatcaatgttccgtctaaatcaaataaaatggtgttaatactcatacgatggatcctttctttttgaagcatttagttcacgtcgtttccatattactgagatgattaccgttaagagaatggctgttactaaccgaacgagaagcaaccagatgaccggaatcccaagaggaataaaaataagggtatcctcaatgacagcatgacacgccacgagaaaaataaacgctagataaagatctttcttctcaacgccatcttcttttgcagcctgaatcataacacccgcaccgtaagcaaggccaaatacaagtcctgcggcaagcgttgtcgatgtgttttctttcataccaaggcttctcgtcacaggtgccatccatcgcgaaaaagttgtaagccatgacaactctttcattacctggatgaaaatcattagcgggatgacgatcaaagcaagctgcagaacgcctaatgacgctttttctaacccttgaagaataatgggtccccagccgctcaccgtttcattcgtttgagaaacgagtccataagctgcctgctcgctcccaccttgccaaacaaggttgataacaaaagccgatacaacggcaagtccaattcttacagcaagaatgacccagagctttacaccaactcttgcggctacgcctgattctatcagcaaattatgtgagaaggatagcataacggccaaaatgaaaacctctttaaccgttaagtctagtgttaatattgccccaataccagcataaagatttaagaaattccctattactaaaggaatggctgcgtcccctgacaaaccgatccatttcattacaggagcgatcagcgtaacgatccattcgaggacaggagtataacgaaggagtgtcatcactaacgtaatcggaaaaatgatttttccaagttcccacgttgtcatcagtcctgcttttaaaccacgtcgcaaaatccccaccctgacacgcctcctatcttttttcgttatatggctttgctttcatcaccttgcgtcgataaataatcagggcaaccgatacaataatcaatacgactgagatcacctgtgccactcgaagcgattctgttaacatcaggctatctgttcgtaagctctcaataaagtagcgtccaaatgaataccaaataacgtaagaaaggaaaacttcgcctttcttcactgacgttcgttgaagaatcacaagcagcacaacgccagcaaagttccaaagagattcatatagaaacgtcgggtgataatacgtaccgtcaatatacatttgattaataataaattctggtagcatcatgttctcaagaaacgctctcgtcacaggtcccccatgtgcttcctggttcataaagtttccccagcgaccaattgcttgcccaagaaggatacttggtgcagcgatatcagcaattttccagaaagagagaccacgctttcttgtaaaaacaatagcggtaataacggaaccaatcaaagcaccgtgaatcgcaattccaccttcccaaatcgcaaagatatcacctagattatctttgtaatagctccattggaacgttacgtagtaaatacgggcagatatgattgcaattggcacagcccataagattaaatcaacaaacgtttctttcggcaatccctgtcgctctgtttctctaatggctaaaagtaaaccaaggtaagcacctaatgcaatgatgatgccataccagtagattgagatcggtccaagctctagcgcgacacgatcaagtggctgtattgaggctagcatgtcgttgtctctcctttatcggtgtcctacttaagattagatgctatcgtgttcgtcaccatcttcaatttctcgcgtcagtcgttctgaaaattgtttcgccgcattcatccccatattcttcaaacggaagttcatcgcagctacttcaataataatggcaaggtttcgtccaggtcgaacaggtacgacaagtcttggcacatttgaatcaatgattttcatgtactcttcttcaagcccaaggcgatcatacacttttttagaatcccaaagttcaagattcataacaagagaaatcttcttataatttcggatcgcccctgcaccaaataacgtcataacgttaatgattccaagtccgcgaatttcaagaaggtgctgaattaattcaggagcacttcccacaagcgtattttctgcttcttggcggatttcaacagaatcatcagctacaagccgatggccgcgttttacaagttcaagagccgtctcactttttccgacaccacttgagccagtaattaaaactccaacaccataaatatcaacaagcacgccgtgaatagccgtgttcggcgcaagctgactttcaagatagtttgttagacgactgctcaaacgagtggttgtcatcgttgatcgtataatgggaacatccttttctttcgatgcctgaatcagttcttcaggaacgtccatatctcttgaaagaacaatacctggtgtttcgtctgtacaaagcttctgcattcgttccatcttctgttcctcagtgagaccatgaaagaaggacatctccgtttttccaagtagctgcaaacgctccgctggataataagtgaaaaaacctgccatttcaagtcctgggcgtgagatatcactcgttgtgatcggtctatggatcccttcttcaccactcactaactctaaattgaacttttcaatcacatctttcatacgaactttaaccattcgtaaacctcctatgtatgaaccaaagcaacggttccaattcaacttcccctattgtaccatttcctatttcaaagcacatatagattaaaaccatttttgtgatgggtggggggtcagatacctgctccccaccatcacaaaaaaaaccgaagcatctgctccggtttttcaaggcttattttactttcaacggtacaaccgcatcatgcatttgcttatcgagttcctgaatgtgtgcctgcttcatttcgtttgaccagttaagtcgcttcgccatgtactcaatcactggctctttccagcgacgaacccaatcaatatcaaagtaaagtgcacttgttctacgattgaagtaatcaagcggtgttgccaccatctcttcttcgatcccataaataagcgttgagaacacttcaagacttaagtgatggaagcttgcttctgttccgaccgtttcaatgatttgatagattcgttcaatattagaaccgtaacgctgtacgagcgtttctgcttctttcacgcttaaaccaagcgtagttccacgtcgtacttgttccgttgcatattctttaaaacctttacttccgccaacgtaaccgcctgatagtaccatgtttttcgttgtagaagctgggaactttttatatttttcttctttaaattgatctgtaatcaggttgaccactttctcagccattttacggtagcccgtgagtttaccaccggcaattgtaattaagccagagtcagaaaggaagatttcatctttacgagaaatttcagatggatcttttccttcttcgtgaatcaatggacgaacacctgaccagcttgattccacatcctctttcgtcacattaatgccagggaacatgaagttcgctgcatcaacaatataatctctatcttcgaccgtcatctgaggatgtacagggtttttcgtatattgcgtatccgttgtaccgatgtacgtcttacctgcacgtgggatcgcaaacatcatccgaccatcatcaaacggtgtgtcgaaatacacggcttgctgaagcgggaatttagactgatcaaaaacaaggtgaacacctttcgttaggaacatgtgctttccttttttagattgatcgagctcacgaatttcatctacccacggccccgctgcgtttacgactttttttgcacgaatttcacgcgtttcacctgttacaacgtctttcgcgcgaacgccaactactttcccatcttcatataaaagctgttctgctttcacatagttaaccgcttttccaccgcgatgaacagcttccttcataatctctagcgttagacgagcatcgtccgtgcggtactctacgtaatacccgccgccttttatatcacttttacgaagaagcggttctttatctaatgtctctttctttgagagcatgcttcttctttcttttcgtttcacaccagctaatctgtcataaagagccaaacctgctccagtagagaacttcccaaacgtaccgcctttaataattggtagtagcatccactctggcgttgttacgtgcggtgcgttttcatacacaatcgctcgctctttccccacttctgcaactagcccaacttctagatttttaaggtaacgaagaccaccgtgtacgagcttcgttgaacgacttgacgtaccagcagcgaaatcctgcatttcgataacggctgcgttcattcctcttgaagctgaatcaagtaaaattcctgcaccggtaattcctccacctacaacgaggacatctagctcctctgagacgatttgatcaagtactacgcttctttgcaatcctgaaaatggtttaaccaagatgaacactcccttttgttatatgaacaattacttaattaacatcagtttctataattcttctcttcagtactttacccctaatagagggtttcttaagcattagtttaaacattcccacaaaaacagctcgtttaaagaacaaaaaaagaccacaacacaccagagcatgacggtccatgcttgggcgctgtggtcttctcctattctccgaccagaacactattaacttaagttcattgtagcataacctgtatgctatgcctagaaaaaaggattatttaaaagccattgtcgcattaacagcttttttccatcctccgtatagctcttctcgctcttcttctttcattttaggatcaaacgtcttattgatcatccactgttgcttaatttcttctttatccttccaatagcccgtcgcaagtcctgcaagataagctgcaccaagtgctgttgtctcactaaccgttggacgttcaacaggaacaccaataatgtcgctctggaattgcataaggaagttgttatttacaacacctccatcaacgcggagtgttttaaggtcaatgccagaatcagccgtcatcgcatcaagcacatctctcgtttgatacgcaagggattcaagcgttgcgcgtataaagtgctctttgctcgttcctcttgttaacccaaagatagctccttttacatcactatcccaatacggcgttcctagtccaacaaacgccggaaccatataaacgccatcagtggactcaacacgttctgcataacgctcactctcaggagcttcgttaaacatacgtaaaccgtcacgtaaccattggatcgcagaccctgctacaaagatactaccttctagagcatattccactttaccatcaacgccccacgcgatcgttgtaagaagaccattttcagacttaaccgctttttcaccggtattcatgagcataaagcaaccagtaccatacgtatttttcgccattcccttgtcataacaagcctgtccgaatagagctgcttgctgatcccctgccacgcccgcaatcggaacattttgaccaaagaaatgataatcaaccgttttcgcgtatacttcagatgaaggacgaacttcaggaagcatcgatttcggaacgtttaacatttcaagcaactcttcgtcccactttaagtcataaatgttatacatcatcgtacgtgaagcatttgtgtaatcggtcacgtgtgcctctccgccggaaagtttccagatcaaccacgaatcaattgttccgaaaagaaggtcgccattttcagccttctcgcgcgctccatctacattatccaaaatccatttaacttttgttccagagaaataagcatctattaaaagaccagtcttgtttcgaaccatgtcttcataaccctggtcttttagctccttaacgataccagccgtttgacgagactgccatacaatcgcgttgtaaatcggttttccagtatttttgtcccaaaccactgttgtttcacgctgattcgtaattccgatcgcttcaatatcttttgcagatagctcagaagcggaagaaagaacctgtgccattacggaaagaatagagctccagatttcttgagcatcgtgttccacccaaccagatttaggaaagtgctgcttgaattctttttgagcaacgtttacaatttcacctttcttattaaaaagaatcgcacgtgagcttgtagttccttgatccaatgataaaatgtacttttttgacatgttgtttcctccctaaatagaattaaatgattaatttttcgcttcagacgaagcatgaactgtattttgaagcttatcactaagttgataaaggatagcaaataaaatggctactatgacagtagatacccaaaaaacagcgctataagtcgcttctgttaccgctttaaaaagaatggcaccatacattccgccacaagcgggacctataaccggaatccaggcatatcgccaattcgaatcccctttgcctgggataggcaagaaaaagtgagcgattcttgggccaagatctcgagcaggattaatcgcataccccgtcgtaccaccaagagaaagtccgattgctacaataagaaaacctacgatgaatgggttcaacccatcagtaaaatcattggaaccaatcgcgagaagtccaatcaaaagcatcgctgttccaataaactcacttaaaaagttactaaacgtatgcggaatagcaggatcggtagaaaatacagctaatttaagcgctttatcgtcttctctacggaaatgaggaagaaaatgaaagtacacgatacatccgccgataaatgcaccaatcatttgtgccaatatgtagcctggtacatcactccacggaaaatcgccaacagctgcaaatccaagcgttacagcaggattcaaatgagccccacttacctgacctacagcgtaaacgcccattgcaacacctagtccccatccgagggctacaacaatccatcctcctccttgagctttcgaatcttttaagttaacgtttgcaacaacgccaccaccaaaaataattaaaatcatagtacctaatatttcaccaataaatggagacaaacctaatcaccttcctaatgagattagttaaaactcctttttgagcctattccctctttttatcattctaaaagagaaattaaaaaaaaccacaacaatctctcctatcaactgacaggatttgtgtgtggttctcctcatctcaggcacgagctattaacctaacacctatttaaccagacatatgtaagcgatgtcaagagattttaatcgggttggaaatgtttccacaattctttcttagaagtggtgaccgccgcagctccaccacttagagctgcctctacatcttcaattgtacgaataaatcctcccgcaaaaattggaacttttatttgttcatgaagttcttcaaacacctgcggaataatacctggcaaaacttcaacacagtcgggcttcgtatttttcaccatactatagctcgtatctaacgccatcgagtcgagcatgaacaagcgctgcacggagaggatgcctcttcttttggctactccaagcacactggatcttgtcgaaataaggcccgccggcttaatttcctgacagagaaactcggcaccatgttcatcatttcgtaagccttgaacaagatcagcgtgcaataaaatcttttttcccgctcgatttccttctcgtataactgattttaattggccgatatgcgtatctaaaagtacaatatatgtatacttactatttaataaaatttcaaaatcgcgcattttcctcacagccggtaggatgctttggttatgaaatgacatcgatcatccctccttttcttttcatcataccagaatatcgagaaacttccatctgaggcttaactgaacccaatagtggtcagagttctaccttctccttcctgtgtgtggccttcctatacgaaaaaaagcacgccctcaagaagagagcgtgcttttatgctttccgacgaatcggttccatgatgaacttctcaatcaataaatttaacaatccgatcacaatggcagcaagcatcgccattgcaaagccatctatgacgaatgcctctcccattagtgacgccgtaatcataagggtgatcgcatttatcacaacaaggaacaaacctagagtgaggatggtaacaggaagggtaagcaggataaggaccggcttaataaacacatttactagcgaaaggataacgctcgctagaatagcggatccaagcccttgaataaaaaatccatcaaaataacctgctactaccattaacacgacgctatttacaagtaaacttaaaagccagtgtcgcattatacccctccctatccatcgacctttttagtataagcgtttctttatcccttattctatcttctaaagataagaaactgaaattgaaccagctgttgaattagcttctatgcgatagctgtgttcagactcctcttcagttctaaacttcttcaagcgatgcgaaatctcttttttctcgcgaagaatactcatgttattaagatccgttgtaatcgctccgattgtcgactttagatctcctttaatattcatgcctttaggtacaacaatttgtattgtaccgttaaccgttttaaaatccgcactgccactaacagcattttgtagcgtatggcgaatggctccattcattgattgcgcatctgtttcaacaaatgtgccatcaatcgtaattggaccatttgccgtttcaagttcacaaacttcaccagttgactcttctaccacaatcgcgccatttcccgtttcagcttcaagtacttttacgttagattttcgaataccgattttcccgttagctgtttttaacttggcttttgctgatgtgacgctctcacctgttacatctccattaaacgtcgtgatccacactccttcatagttagaggcagggacataaatcactagattcacctttacatcagcacgttctgatttaaacgtcatttttccattatcaactgagaagtaagtatctcgtaacagcttatccattgcatcttgttgattcgatacccggtaaacattggcacgacaatcgattttcacatcgtttcgttcccaggtctgaaacgtaatttcaccatttcgaacatgcacatcaagcgtctctggtgtaacttccagttgttcataaacgtgagtcacttcttcagatgaaccaaaattaaaatcaagatccatatcttttactttttgaataagagattcgacaaactgccctactttatagctaggagcggttcgatcagtgtgagtgtctgtcgacttctcaaattttcgttcctctgatccttcatttgttccgacagcttttaatagcttggcaccttcatcagcggaaattttaccgtcttcaatcattttaagaatcattctacgttcttcattcattcaaaacatctcctttttgtttattcgcttaaactacttgaacaattaccaccggagaacctgaattccttttacaatgttccagataaagaccacaacattaagtaaactaaacaagataaaacctaaaatgatcaccacacctacatccatcacaaatacagctaaaatcgccagaatgatcgtaagaaatggaaggaggtgagaaacaatggagcgcttcgcatggtatgagacttcttcatctctcacaacaaaatagacaatgatcggaaaaagaaacggtgcgaaaaatacgctaaaataacaaagggaggacattactttttctacagacataattgcttcccctttcaatattctctacctaactatacgattcgtcaaaaagaaagtttcaaaaagaaataagaaaaaacgaaaagacagcgaatcgctgtcttaacagtttatactgactgagtttgctctaatttcttcttcatccggtttttatctcgctcaagaattggcgcaagatagcttcctgtataagaacgttcttctttaacaattttttcaggtgtcccagttgcaataacttcaccgccgccatcgccaccttcaggacctagatcaatgagatagtccgctgttttaatgacatccaaattatgctcaataatgagcacggagtcaccattttcaacgagacgttgaaggacttccaataaacgagatatatcatcaacatgcaatccagtcgtcggttcgtcaagaatataaagtgtctttccagttgatcgtttgtaaagctgtgaggcaagcttcacacgctgcgcttccccgcccgaaacagtcgtagctggctggccaagtttaatataacttaagcctacatcgtaaagggtttgaagcttacggttaatctttggtatgtttttaaagaaatcaaggccatcttctaccgtcatctccagaatatcagcaatattcatacctttatactcaatttctagcgtttctcggttatagcgtttcccatgacatacttcacaaggaacgtagacatcaggcaagaagtgcatttcaatcttaatgattccatcaccgcgacatgcttcacaacgaccgcctttaacattaaagctaaaccttccttttttataccctcgtacttttgcctcatttgtctgagcaaaaacatcacggatatcatcgaacacacctgtatacgttgctggattggatcgaggcgttctaccaataggagattggtcaatatctataaccttatcgacatgttcaaggccattgatttttttatgctcaccaggcttatcctttgctttatgaagcttctgagcaagcgctttgtacaagatttcattgataagcgtactttttcctgaaccagaaacccctgttacacaagtaaataaaccgatcgggatttttgctttcgtatttttaaggttattttcttttgccccaatgatttcgatgtacctgccatcaggctttcgacgctccgtcggcacaggaatgaatttcttaccagaaagatattctccagttaaagattcttcatcatccataatctcagccggcgatccttcagatgtaatgtagccaccatgtgctcccgctccaggaccgatatcaatgatatgatcagcagatagcattgtatcctcatcatgctctacgacaataagcgtattgccgaggtcacgcatattttgaagggttgaaattaaccgatcgttgtcacgttggtgaagaccaattgatggttcatctaaaatatacaacacacccattaatcgtgagcctacctgagtagcgagtcgaatgcgctgggcctccccacccgataacgtaccagcggaacgattgagcgttaaataatctaagccaacgttaacaaggaaaccaaggcgatcctgaatttcgcgtaaaatcatcttaccaattgtcgcttcttttgcagttagttccaattgatcgaaaaatcctgctgcatctttaatcgcatattcagtcgcttctccaatatgctttccgttaattaaaacagaacgagcttccttctttaaacggtagcctttacatgtgggacacggtttttgagccatataagcttccatttgctcacgaatgtagtcagaactcgtctcacgatagcgacgctcaacgtttggaataacaccctcaaatggcacattattctcgcgaacctgtccaaaatcattttcatatcggaaatacactttttctccatcgctaccataaagcactttatcaagctgcgctcttgggattttgtttacaggagtatccatgtcaataccgaaatgattgcacacactttcaagtaattgcggataatagtttgaactaacaggctcccatggagcaagtgcatgctcacgaagagacttatcccaatccggaatgactaaatcaaggtccacttcaagcttcagacctaaaccatcacaagaggggcaagcaccgaaaggactattaaacgaaaacagtctcggctctagctctccaatcgaaaaaccgcaatacggacacgaatggtgctgattaaagagcaattcttcttgtcccattacatcgacgattacttgtccaccaccgagattaagagcagtttcaagggaatctgctagtcttgattgaacgccatcttttactacaatccggtcaataacaacttcgattgaatgcttcttgtttttttctaatttgatttcgtcagctacttccatcatttcaccgtcgacacgaacgcgaacatagccctgcttcttaatatcttcaagcactttcacatgttcacctttacgtcctgatacgacaggcgatagtatctgtagcttcgtacgctcttcataagtaagaatacgatcgaccatttgctcaattgtttgtgacgtgatttcaacgccgtgacgcggacaaactggtcgaccaattcttgcaaataacaggcgaaggtagtcatagatttctgttaccgttcctactgttgatcgcgggttacgacttgttgttttttgatcaattgaaatcgctggtgaaagcccttcaatggcatccacgtccggcttatccatttgaccaagaaactgccttgcataagctgataatgattcaacatagcgacgctgtccctctgcataaattgtatcgaaagcaagggaggattttcccgagcctgataaacctgtaaccaccacaagtttatctctcggaatcgtaacatcaatattttttaaattatgggctctggcccctttgacgacgatctcatcgtttgccatttgttcgtcatccttccgctttaagctctaataataggtcacgaagttcagcagcgcgctcgaaattaaggtctcgcgcagcatccttcatttctttttctacattttcaatcacttttgcacgttcttgcttgttcatcttacctggcttaggtactgtatattcttcgccttcttcagccgtaatagtggctcggataccttcacgaacttttttcttaattgtcgttggagtaataccgtacttggtgttgtattcttgttgaatttcgcgacggcgacttgtttcattcatcgcaatttccatcgaattcgtcactttatcagcatataaaataacatgtccgctggaattacgagcggcacggccaatcgtttgaattaaggagcgttccgatctcaagaaaccttccttatccgcatccaaaatggcgacaagtgacacttcaggaatatcgagtccctctctaagaaggttaattccaactaatacatcaaatacccctaagcgtaaatcacgtataatctcaattcgttcaagcgtttttatttcagagtgcaggtaacgtacctttacccccatttcaagcaaataatccgttaagtcttctgacatttttttcgtgagggtagtaacaagcacacgttcattacgagccgatcgttgattaatttcatcaagtagatcatcaatctgaccttcgattggacgcatttcaatcgtaggatcaagaagtcccgttggacgaataatctgctccacaacttgcgtcgaatgctcgccttcatatggacccggcgttgctgatacatagacaaactgatgagctttctcttcaaactcttcaaatcgaagggggcggttatctttcgcagaaggtagtcggaagccgtgatcgaccagcacgccttttctcgcctggtcaccgttatacatacctcttacttgaggaagcgtaacatgagactcatcgaccataattaagaagtcatctgggaagtagtccatcaacgtatatggtgttgctcccgcttcacgaagcgttaaatgtcttgaatagttttcaattcctgaacagaatcccatctccgccatcatttcaatatcataccttgttcgctgctctagacgctgcgcttcaagaagttttccttcgtcattaagtactttaagcctttcttcaagctcagcttcaatacgttggatagcgatttttaacttttcttcacgggttacgaagtgagatgctgggaaaatggccacgtgctctcgctctcccagaatttcaccagttaacgaattcacttctgtaatacgatcaatttcgtccccaaaaaattcaatgcgaatgcagtgctcatcacgagatgctgggaaaatttccacaacatctcctcgaacgcgaaatgtcccgcgcgtaaaattaatatcattgcgcgcatattgaatatcgaccatatcccgcaatagctgatcgcgatctttctccattccttttcgaagggatagcactaagctcttgtactcttctggattaccgagaccataaatacaagaaacactcgctacgataataacatcatttcgctcaaataaactggatgttgctgagtggcgaagcttatcaatttcatcattaatacttgcatctttttcaataaatgtatcagattgaggtatgtacgcttcgggctgatagtaatcataatagctgacgaagtattccactgcattatgtgggaagtactctttaaattcgctatataactgtcccgccagcgttttattgtgcgcaataataagggtaggtttattcacctcttgaattacgtttgacatcgtaaacgttttaccagttccagttgcaccaagcaacgtttgatgacgctcattttgttgaacacctttcacgagcttcttgattgcttctggctggtcaccttgaggctcataatccgataccaactcaaactttttctccaccatcttcgcctccgttcctatctttcctgtggtttattataacacagatgttaggcaaaacttcaattaaagcgaacttatattcgcattttttactaactttctcttgcgatgaaactcctgtatgctgttaaaggtggacagagtgactcaccttctgtctactgttttacaagctttattaaaaaaggggttttattatttgctgcttttatgggctttaccaacaggcttagccattggagcgatctcgggatttttcggggtgggcggtggatttcttctcacgccaatccttctactgcttgggtattctccatcaaccgccatcacaatcagtttactttacagtatgagtacatcgatttctggagctttaacctatatacaaagtaagaaattcatattaaaaactacactatttctatcaattagtggcatgattggaactcagcttgctaagccacttgtcctctatcttactaaagaaggactagatgatacggttatctccctactatatatcctacttttagggtatttttcaatatcaatgctgttcgaagctaagaaaaacactgaaaatagaagtactactaccttttcccctcttaggccaattctaatcggcttactaggcggatttgtttcattaattcttggcgttggaggtggctttgtgatggtaccgttattaataagtgtattaggtataccagccccactagccgttggtacatcgcttacgtcaatcttcttcattgtatcgacaggttttttctcttacatacaaacggtctcgatcccgattacgcttgctactattcttgtgattggggcattagttggggctcgatttggcgcaagcgtaacagcttcttttcctgaaaaaatgatgaagaaattacttggcatactttatttgtttacgatgattagtatcgtattaaagctacttaaccaaacaattcctggcctactcatccttatgggatatattgtgatgttaatggggctatttctttaccagtattggacgaaaaagaagcgcctattcttttttgaatagacgctacttcatttttttcttattctttttttgggtttgcatcgaaaaataaaaacctacgagcgaagacagtacggttagtaaaatcaggtgaatgggatgatcaagtccaccgaatacagcccacataaataaaatggttaatccaaagctaacgtatgtgttatatgttactcgtgtaaacacgaccataattattgctggaactaataaagcaattaatattccctgcatacggatgagttcccctctctaaacacttctctccccatcttacaacaagatagggagagaaagctatgatgagtaaggaattctctctatttactcgatgaagctgattcgcgttttagtctttacaccccagtaaattgagcagcatcccacggttttggcgttccgaattcacgcgctaacttccgactttcgccctttcttcctttacgaagttctttacgttcagcagctgtttcattcaagaatttttcttcttccgtttcaggataaacaccaggtacttcaaccgggttcccttcttcatcaagggcaacaaacgttagaagcgctgttgcacaaacatgacgttcaccggtgaacattttttccgcaatagctttcacaaaaacttccatagatgttttatgtgtccacgtcaccattgattcaagacaaacgatgtctccctggtgaattggatgaagaaaatcgactgaatcggttgaagctgtcacacaaggtcttcttgaatgacgagttgctgaaataagggcaacatcatcaataaacgccattaattgacctccaaataacgtgccatgaatattcgtatgagttgggttaacgactgtcgctttcgccgttctagactcattcgttgacttcatgtggctattttctaattcattgttcattctaatcaccttttctttctttataaaaccgctcttttttataagagataattggacaagaccgctttatgactatatgactttggtattatatttaaagcatttttcgctaatacgactgattgggtattctgtagattcagctaacatcaacagaatattaaaaagtgatgactttgaaatcgtgatcccataatgcttttcgagtaaatctgagaggtaaagaggtcccataccgacttgtgaccgttccaaaattttcacgacttcctttgttggggcttctgttactaccgaagtgccgccattcatttgactcataatcgtttcacgctctatttcaaacttttgaagcaacttcatttctctcgcattgagatccatcaattgttgctgtagctgagtttctccagtcattgtgacatgctcctttacgttaagaatgatcaaattgtagcaagtgatttctgaacaaacaagactgtcgaaattggtgtaaacgcaaccatacaggtgttcagccgattctgacacttccatatatttcttgaatagaccctataacaaaatggcatagaaattcagacattttttcaaaaaggaggtttagcttacgttttggagataacaaagatcaaaaaaagaagaaggcagaggcggccttcttctttttattcaatatttattgagcttcttcctgatcttcaaagcgattttcttttacgaacaataaaccaagttcatgatgagtattgttataaagcgctttttgttcaaaccttatctctccattaatgtcgagaacctctaatttacaaaatgcggcattccgttgaagcgctgtataaaagtcgaggccttttcctaatgaaagaccattcacttttgaaatcacttcaccaacctgtaaactcatttgatcggcaggagaccccggaatgattcctaaaatcactaacccttcatttcgctcattgaaataggcgggcttgtttttgccacgatgaagaagtaatatgccagctcgtcctacaatgactagggaaaccgcagctaaagcgacccactcgttttccaaaaaataactgatcataccaaggatcaccgttccagcgccaagaagagcaacttgtctaccgtttgttttcatttcaggaagtggtagcgcatggtgaataagttttcgaaaaccaattgggaacggaaggagaagaaaggcataggtctgattaccgaaatccagaagcggccaccaagaaagagattcaacattacccaccggaagaaaaagaaacaatggtaaaagccataatctctgcatttcatgagaccccacaatctttccgcgcttactttcaacaagtcttggagatgtctgcttcccggcgttcgtagcaattaagtacccttctataaagactagaagcccaactaaaagggcgagcgctacaagcgaaacagatccaatcccttcttgcatcctattcagggtgctgttgccaagatcgcggggagtataaaacaacgcagcaaaaactggaagaatcatgacaaaagctggagacaaaaaccgaatttgtcctgtgattaaaagtaacaatgcagcgatgctcatcgcgatcgtcgtactgaaaggaaccgttagacctagaaacagattaaggatgaaaaatgcagctccaatgattaaacaaggtacaacagcaaacacgacgtcatccagaacatcgtgcactctcgtatgaaaatctctacggtcacgtttcactcgtgaccgcccaagaagaaaagctccgatgattgtgatatacgtgaggggatgtagaaaaaagcttataatccctttaagtatagataggccaaaagtgtccatttagtaatcctccatgcgtaagttcctatttatcaagaagtaataaatccaaatgcagtgcaaaacgcttgttaccttctgcaaaccgagaaattcgaaaaaaattccgcaggttttcctgcggaatagcttcgacatcaaccgtttaattccttcttacgattatttcgtaagaagctcaactgctgtttcgagctgcacatcgttatcaggattgcgaatggaatcaataatattctcctgaagtttttgagccgtcttttcgtctattttaccagatacatttatatcattcgaacgttgaaatgcttttacagcagtaactgttttatcactgaagtagccatctgttcgtcctggttcaaacccaagtccttttaacatcacttgagcagattccacttgttcattgttttgatcaaacgatagcgttttttcagaagacaatggattgacatagaagtaatcaggctgtttcgcttcaactgtaggcttaattccttccttatgaatccaattaccgtcaggtgttaaccatttaaacatcgttaatttaatgttgctgccatctccaaggtcgactgttgattgaacagttcctttaccaaatgaagactcaccgactaaatcatagccgcccgcttctttaagcgcaccagcaagaatttcagcagctgaagcactaccacgatcaataagtcctacgattggatagtcttttttctcttcaagcgaagaaacagatccctgtttctctccctcacgatcttctatttgaacatatggtttatcattcggaataagctcctcagccatatccgaaacgacattcagtagaccacccggattatttcgaacatcaaggacaagaccatcgattccctgatcttcgagcttttctaattctttagagaaacttttagcagtatcttctgaaaaggacgtcacttgtaagacaccgattgtctttccattttctttgatggtgtccgcatggactgtttcgattggaatctcgtcacgcgtcacttccaccgtcataacctctgaagccccaggacgttgaacaccaagcgtaacgactgttcctttttcaccacgtatttttaaaacagcatcatataaatccagaccttcagtgctttcgccatctattgtcataattttatcctttggacgaagacctgctttttctgctggagagtccttataaggggatacaatcgtaactcttccatccgtcatattcacttctgctccaattccttcaaaagaggaaccaagcgattgactaaattgctcagctgtctttggatccatataaaccgaataaggatcttctagcgtatcaaccatacctttaatggctccatctaacagatctttctgatcaacatcgctcacatagcgatctttaattaactcataagctttattaattttcgttagctcttctgactctatttcatttcctgatccaagagttaaagattgagcgcttccttcaggctcgtcctgaaatagcgtaaaggctgcatatgtaccacctgaaccgataaccagggcgatcaagacaagcaaagccacaactttcccctgtatcttcattgtactcacctcttctgatttgaaggaaaaggcaccccatcataacgatgcgatgccttttcatcttattgtactatatgattcagttgttttcattatgtttccatctcagaatgtgaggggaaagaaaaatggataaaacatgataaccagtttatcgaatgtagttcattgggttaacggcattcgacttactagagttccatgaacctttgtgaatttcaaagtgtagatgttgtccagtagaatgtccggagttacccattgtgcctaaataagttccctgactaacagtctgaccagtagatacagcgcgatttttcatatgagcgtaaacagtcgtgtacatttgtccgttaatgctatgtgtaatgaacacaacattaccgtatgaatctgagtgataagatcttaagacagttccatccgccgcagctgatacaggattgttaccaccttgagcaatatcaattcctgcatggaatgtgccccaacgttgtcctagtccagatgtaattggacctgcagcaggcttaatgaatgatgcgctacttgatggtgctggtgcaggagttggcgctggttcaggagctggcgctggtgctgagtttgaactgcttgagctgctagagttacttgagcttgaagctgcttcttttttagcttttgccgcggccgctgcttctgcttcagctttttcttttgccgctttagctgccgctgctttgcgctcttcttctgctttacgagctgcttcttcggcacgtttgatttcttgtttcacagctgattcttgagcagaaagaatttcagccgtttcgttcaagtccatcatatggttatgaagttcgccttcttcttcttcaagcgatttcattagcttatctttctgtgctttctttgcatcaagctcttgtttaagattctcaagctctgctttattttcttcaagagaggctaacttatcttcaacttgagctttcttttcttcaacggcttccttgtctgctttatgctcttcaagaattttcttatcttgatcggcgatcgtatttagagcaaggacgcgctctactaaatcactgaaatccgttgctccaagaagaacttccatatagtcaaccgttccgccaccgttttgttgcatggaacgaacacggtctttcagaagtttatcacgttcagcaattcgttcttccaatgctttaatttcttcttttagttgatcaatttcggcatttgtatctttaatctcttgttctttcgctgagattttctcgtcggtttcagcgacttctttgttaagcttctcaatttccgcttgaacgtcttcttgctctgcttttacatcagcaagttcagattcctttttctgcaactctttttcatttgacgactgcttttctttaacattattcagttgatcatcaagattttccgcactagctgtttgtggaagtgctgctgacagtccacttaatgctagcgttattgttagagctgttgccattattttttgcttcaatctttgttcctcccccaaaatagatcaatctatttatctgttactcttttcatttaaacttttaagaatttacgcattgacgtaagacttccccatacgccaataatgacaccgaggacaattaacaacccagatagctgatagacaaacggtgttactggtagtaaatcgataaataaagtcggaaaacgattcgctattaactcaattaaatagtagtacccatagattagaatacctattgggataattgaaccgaagattccgatcagaataccttctattagaaacggccagcgaatgaaccaattagtggctcctactagtttcataatttcgatttcatgacttctggcaacaattgttagtttaattgtgtttgaaatgaggaacatggctgtaaatagtaatccaacgacaagcgctagtccaacatttcttgcaatttcaagtactttaaacagtcgattaaccgtgtcttcagcaaattcaacgtcttgtacattatctagctgttgaatttgttttgccacctcattgacgtcctgaggatctgtagtcttaactaagaatgcatcgcttagaggattttcatcttttagcgattcaaacacttctccattatcgccgaggttctcaattaaattatccaatccttcttctttggattgaaaggttactgtttcaactcccgaaatgttttcgatgttttcctttaattcatcctgctggtcttgcttggcagttaaatcaatgaacgcactgatttcaacatcgctttcaagttgatccccaaatgcatttaaattcagaagcagcgcgagacaaactccaactagaaggagcgtaacggtcactgcagaaatagaagcgaaagtcatccagccatttcgtccaaggttcttaaaaccttcttttccgtgtcgaccaaacgttttaattttcatacccgtattcacctcttgcttcatcacgggtcactaaaccaccatcaattgcaataacacgttttctgaatgtattcacaatatctttattatgggttgccataataacagttgtaccgcgattgttgatttgatcaagtaaatccataataccccatgctgtttctggatccagatttccggttggttcatctgtaagcagaatgtgagggttattgacgatcgctcttgctattgaaaccctctgctgttctcctccagaaagttcatctggaaggaatcttgctttgtttttcaaattaacgagactcaacgtttccatgactctcttgcgcgtacttgctttgctttcttcgatgacttcaagagcaaaagcgacgttctcataaaccgttagccttggtaaaagcttgaaatcctgaaaaacaacgccgatttcgcgacgtagcttagggacatgcttattctttaatttgccaacgtcttttccattaataacgattgttccacttgtagccttttcttcccgatacatcattctcataaaggttgacttaccagcgccacttggcccaactatgtaaacaaactcgcctttatcaatcttaatatcgattccgttaatcgctttaatgccattgttatacgttttccaaacatctttcatttcgatcaaattgtaccacttcctacttgcttaaattctcgatgcaaattcttaggagtaaggttcttattgatagttcgtttttgaattagttcctttacatctgaagatattataacaaacaatttcgctattttaagacaaatttttattacatttttgtttcaagaatgctcaatatgacatcttctgcaataatgcattaataattaatagaatattacacaatctcgctccctattttggatgatctaatatggatcaatggatttacaaaaggtgattatcaggcactataactaaattaaaaaagcactcttttggagtgcttttaccattatttcatatctgctagccaggatgctaaattttcttcttgttctgtatctcctcttagaatgttccctggcatttggcctttcccattctgtatcacagctaggatttcatcttttgataaccgagagcctatgtctgaaagctgtggccctactttcccttgcaggttttcaccatgacagctcaagcaatttttttgataggtagcttctgctgctgttgcatcatattcgcccgacgtctctcctgcattttcgttttctgatgtattgtttgaagaactttcattgctgctttcatttccactatttcctccaccacatgctgcaaggctaaagagtaaaacaactgcaaataaaatcccgatccatttcttcattaccccacccttttcacttcgttttctatactatttccgggttattctcttttaaaaccttctcctaacacttcagttgcattcgagacaatcacaaatgccgagggatcaacgccttttacaagttcttttagttttgtaacttcattttgcgctacaactaccataagaattggacgtttatcgtttgtgtaaccaccctgaccagatattcttgttacccctcgatcaatgacagtaatgattccttctcgcaactcttcttctttatctgaaataatgagggccatttttgagtaaccaaggccgagctgcacaacgtcaatcgttttacctgttaagtacatcgcgatcagggcataaagggcttcttcaagactaaagacaaacgctgatgccacaacgatcagtccatcaatcataaagacacacgttccgagtgaaactcccgtatacttattcacgatctgagcggcaagatctgtcccacctgttgaggcttttcctctaaagacaattcctagaccaacacctacacctaaaccaccgaacagggcacctaataatggatcggttgtcgctggttcaacattttcagttaactttacgacaaaaggaagaaagagtgttcccacgaatgtctttggaccatattttttcccaagaaaaatcaagccgctaataaaaagagggatgttaaatgcccactggacataagctggtttccaatcaaataccccttttgtaattgtactgattccactcactccaccagaagcaatactgttaggaagaaggaaaaggttaaaggcgattgctacgatggctgatccaaccataacgcttacatattccagtatcctatgataaggtgaaacttttctcgctgtaaacttcgctaacgttgctatcataactctactcactcacttacttctatgattttcgtcactgcttattcctaagccaaagcctttcgtagtatatcaccgggtttatagggtgtaaaccgcattgtagcagcgcgttatcatgttgaagtgctgttctattctttattactttgccccatttccttcaaatcataatttcaagtactcccagttaaaataggaaaaagcccttctttcggcagaagggcttttccttaattttgttcatttaaacgagatcgtaagaacgcatcaataaacggatcaagatctccatccatgacagattgagtgttacccacttccatatttgtacgatggtctttcaccatactataggggtggaaaacatatgaacgaatttgactgccccagccgatttctttttgctcgcctcggatctcgtcaagctccgcttcttgttcttcaatttttaattgatatagctttgctttcaacattttcatcgcttgttcgcggttttttatctgcgagcgttctccctgacagctcacaacaacatttgttggaaggtgcgtaattcgaaccgcagagtccgttgtattaatgtgctgtccaccagctccacttgcacgatacgtatcgacttttaaatcttccgtacgaatatcaatttcaatttcatcgttaaattcaggcatcacttcacatgatacaaacgacgtatgacgtcgaccacttgaatcaaacggtgaaatacgaacaaggcgatgaacgcctttttcagctttcaaatagccgtaagcattatggcctttaaagtttagcgtgacgcttttcacacccgcctcatcgcccggaagataatcaagggtctccactttaaacccttttttctcaccataacgtgtgtacatccgaagcagcatcgatgcccagtcctgagattccgtaccgcccgcacctgggtgaagttcaaggatcgcattattcttatcatgctcttcacttaagagaagcgttaactcgaattgattcaccgctttttttagatctttaatttctacttcaagatcttcaaataactcctgatcgttctcttccttcactaattcataagaaacttcaaggttctcataattttcttgaagagaatcgaattcattcactgcttcttttaacatattggattcgttgatcactttttgagcagcattctggtcattccagaagtctggatctgtcatctgaatatctagttcatcaatgcgagctctcttattttcgaggtcaaagagaccccctaaaatcatttagtcgtgtttcgattgtatttagttcgcttctaatttcatgcatttccatcgtctgcacctcaagtttttcgttattttacatagaataggcaggtgttcatctttgaacacctgcccggcattattctgctttgccgtgacaattcttatatttcttgccacttccacaagggcaagggtcgtttcggccaatgtcctgttttttcttcacaggttttggcttcgagcttgcttcttcttttggattaacggcttttccttctgctactttttctcgcttcaaattgctttcaatttgagctctcatgatataggtcgatacttcttcttcgatctcagtaaccatatcttcgaacatttcgtatccttcgaattggtattcacgaaggggatcgttctgtccgtaggctcttaggtggatcccctggcgaagttgatccatcgcatcaatgtgatccatccatttgcgatccacactgcgaagaagaatcactttttcgaattcacgcatgcgttcaggttcaaactccgcttctttctcatcgtagtttactttcattttctcaacgagaagttctacaatctcttccttatcgaggcctttaatatctttcactgtcacttgaccttcctgaaggaaaattcctttcgcatgatctaggatagcctggtgatcccactcttcttgaatgtcttcatcacctgtgtgagcatctacaattcgcgtaatgacagaagttaacattgtttcaacaatctcacgtaaattatctgactcaagtacttcagcacgctgtgcgtaaataatctcacgctgctgtctcatgacatcatcgtattgaagaagctgtttacgtgcatcatagttgtttccttcaacacgtttttgtgctgattcgacagctcttgatacgagcttcgattcaatcggctggtcctcttccattccgaggcggttcatcatgttcatcatattatctgaaccgaatcttctcatcagttcatcttccattgaaatgtagaatcgtgattcaccagggtcaccttgacgacctgaacgtccgcgcaactggttatcaattctacgactttcatgacgttctgtacctagaatgaaaagaccaccaagatctaatacgccagcaccaagcttgatatctgttcctcgccccgccatgttcgttgcgatcgtaacagaacctttttggcctgccgactcaataatctccgcttctcgcgcatggttcttcgcatttaagatgttatgtggaattccacgtttctttaaaaattgagagattaactctgatgtttcaactgcaaccgtaccaactagaataggttgtccctttttatggcgctcctcaatttctctagcaagagcctggaacttaccgttcgttgatttgtatacaagatctggataatccattcgagcaattggtttatttgtcggtatcgcaataacattcatattataaatgttacggaattcttcttcctccgttttagctgtaccagtcataccagaaagcttctcatacattctaaagtagttctggaatgtaattgttgcaagcgtcatactttcacgctgaatgactaaaccttcttttgcttcaatcgcctggtgaagcccatcactatagcggcggcctgccatcaaacgacctgtaaaggaatcaacgataaccacttcttcatcctgaacgacataatccatatcaagctgcataatgaagttcgctttcatcgcctggttaatgtgatgattcaattgaacatgcttgtaatcatagaggttttcaatcgagaagaatttctctgcttttgtaatcccatcttcggttaattggacattctttgttttaatatcgacattatagtcatcttcttcttttaacgttctaacaaattgatttgcctgaatgtatagcgttgtggatttctccgcgctacctgaaataatcagcggtgttctcgcttcatctattaagacagagtcaacttcatcgataatggaataatgaagagggcgctgtaccatttcttctttgtataggaccatgttgtcgcgtaaatagtcaaacccaaattcattatttgttccatacgtaatatctgcagcataagcttctgctttctcttcttttgaaagaccgctaatgtttaatccaactgttagaccaaggaaatggtaaagttcacccatctcttcagcgtcacgcttcgcgaggtattcgttgaccgtaataacgtgaactcctttaccagttaacgcatttaggtagactggcattgttgcactaagtgttttaccttcacctgttttcatttcagcaatgtttccttcatgaagggcggctgcccccatgatttgtacagggaacgggcgcatacctagaacgcgatctgatgcttcgcgtacagtggcatacacttctggtaacattttatcgagcttttcacctttttcaattcgttctttgtattcttccgttttgttacgaagctgatcgtctgataactgcttcatttgatctgaaaaagcttccacttgatctgcaattttttgcaggcgggttatctgacgttcattgccgtttggtataatcttgcgtaataaacctttcatagaaacgctcctcttttgttgtcagtagagtgctatcatataactatacttagaattttatatactatgtagctattttaacaattagttgcgggaggcacaagaaagtaaaaaagctcactgtctgaaatactatattaatgaaggaaagaacaaattttcttacataggtaaagggcagaggttgccccctgccctggtttatatttattcgttagtcttgttcgattaggccgtattttccatctttacggcgatagacaacaccagtgcttcctgtcactgcgtttgagaagacgaagaagctatgacctagcatgtccatttgaagaatggcttcttcaacgtccattggtttaaatgtaaaacgcttcgttttgacaacttgcagatcgtcatcctcatccatgtcagcttcagcgacactcgtcgttgttgggttaagttcatcgcggaacatatattttacgctaccttcctgacggaatttgcgattaactttcgttttatgtttgcgaatttgacgctcaagtttctcaacaaccaaatcaattgctgcatacatatcctgatgctcttcttctgcgcgaagtagaaggtttggcattggaatcgtaacttcgatcatttgctgatcgttataaaccttcatatttacatgaacatcagaattaggtggagtatcgaaatacctttcaagtttacttaccttcttctcagtgtattctctcattgcaggtgtaactttaatgttttcaccacggatgttgaaattcatcatgtggcactcctccttccatgctatacctctattattcgttataccctaatcattcccctctataaactttaaaaaaactcatttatttttacgtttttttcacaaaacatcctaaaatacgacaatctttaacaagaatactcaatacttcctttttaatctcgcattccgctacaggaaatgaaaaaaataaaaagcccttatccaattggataaggactttaagcgtttgtttaaatttaagatactttttctacattagcagcttgtggcccacgagcgccttcaacaatctcgaattcaactgtctgaccttcttcaagagacttgaatccttcaccagtgattgctgaaaaatgtacaaacacgtcgtcgccatcttctctttcgataaacccaaaacctttttcattgttaaaccattttacttttccctgcatcttgttcaacattcccttcaaaaatcttcatggcagtgccatacatttactatacgtgggagcctaaaccctgtcaaaggggtttttttgttgatttaactcgaatgaaggcgctttctataaaaattctcgacacaaagttatcccctgctcaaagtaagagaaaaaactttagatgcacccgcatttttaagtgtaaatgctgcataatggatcgtcgttcctgttgtataaatatcatccagtaaaagaagctttttccccaatacatttgccccttctacgatttcgaacatttcttcatcgcggtttatcctcttttctctcgatcgtttactctgcttctcttcatttttcgttctcattagtggagagtcttgtacaaatttcgtgccctcgatccacacctcacattgattaaaccctctttcatacatcctctcctgactagcaggcattgggatgacttgatctatgaacgaataagatttttttaactcatgataaattaaacttgagaacactcttcctacttcaacatctcctctatatttataaagcgcaagaatctttttcaaaaaatcattgtactcgtagaatgatttgttatgagtaaggacctccccccatcccctttttccccatcttacacaatcagtacattgttttccttccacaaaccgttcatcgatttgttgaagtgaacgcccgcactttaaacaaactggtcctactataggaagaagttgatttcgacaagtttcacagcaatgaagtttgtttcttattccaaacaaaagctgccatgaaatttgattgctaacatcctctccacaccatgggcaacgctctagtgtagccaacctctctcctccgcttcctgattcatttttcgaatatgcataactgccgctaccatcgcatttgtttttccgtaatgaaagaatgaaacctctccttctggataagaagcacttcttccagctcttccggcaatttgtacgagagcactttccgtaaaaacaccatcctccgctcctaatatggctaccgcgatattctcaatcgttatcccacgctcaagtatggttgaagaaagtaagatcggaatttctcttcttcgaaactgaaggactttttcagcacggtttggatcctctgagtgaacggcttcacaagaaagctggtgttcgtcaaaaacggattttactttttcaatgattttgatggaaggaaaaaatagcaatactggttttttagcatccatttgttttttaatccaatctacaagaacataaggaatctgccgcttttcaattttctttcgccaattcccgctccattgaaaagtaggaaccggtagtggatagccgtgataccgggaagggattcgcaccacgtttagcgtttcttgatttagaaagttttcggatggtgttgctgttagataaatgagcgacccacttagttttcgggctttgtttacatgaaagtgaagagatggatcgacactatatggaaaagcatctacttcatcaataatcatgacatcaaaacattccttaaagcgaatgagctggtgagtggttgaaataacaagagaagaagtgggatctgaatgtccagcataaagcggagaaaccgtgagtcctgggaagactttttgcaatcgtggcgctaactctaaaacaacatctgtcctaggagtggctatgcataccgatttatgatgagagagggcgtgtgccaagccatgaaaaagcacttctgttttaccgctgccacaaacggcccaaataagaaccgaatgattgttttgaatagcactaataactgcatttgatgcctcttgttgcccttccgatagcttcccagaccactgtaacgttatgttttcaattgcttcatactgacggctcggtgcggaatataagggggaacaagaggtaactttccccattatgatacaatttcgacaatattggcagctcgcgcttttacaccttgcacaagaaaatgaggaaaatgtgtgattcccacatcgcatacacatctctcttccatgaaatttttgaatgccaggctctaacttaagatagccactaacatagtgggcatgaagttcttggagggaaaaggggatttcatctcgcaacaaatgtcttcctgaaagaaaatgaatgatcttcatattcggtttaaaccgctgattgattggtagttgagggaatgaagaataatggctaatcggaaaaaattcggggagcttagaagactgataaagaaattcaggtacgataatctcctgattgttgaacatgtcggaagcaaatctcattgatttgcttccatattcaatttcatgatcatacgcggtaccagcccaggccaagcgcaccttccccaaggtgagttgctatgacagggccaaagtaacttaaaatgatatttacattcgtatatttttcttcaagttcagcttttagattttctgcttcttccttgtttgtcgaataaattaaggtcgcttttatcatgtcgccgccttttgccgcctcatcaaaaagtgtcatgattttgttgagcgcttttttccgtgttctaattttttcatatggtacgatttgtttatcctcgaaggttagcactggctttatttggagaagacttccgacaacgagctgggctgcatttaaccgtccgcctctatgcaaatgactaaggtcatcaacaagaaaataggcgttcgtcccctgactcttaattttttgaagtctacctaaaatctctttacttccaaatccatcctgagccatacgagccgcttccaaaacataaaatccttgcatcatacagctgatttcagaatcgaaaacgtatacgtctgccccttcaatcatatcgccagctgagtgggctgactggtaagttccgctaattccactcgataatgtaattgtgataatttcatcatgtgtccgcgccaatgtttcatacgtttcgacaaaacttccgatcgaaggctgagaagtttttggtaaaacattttctttcttaaccttttcgaaaaaatcatccgcttgtatttctttttcttctaaataagattcgttatcaaatatcacgctaagtggaaccattgttatttcgtactcgcttaacattgatttaggaatatacgcggtactatctgttacaatagcaactgttttcatatgaacgcctcatttcaatctattaaatacatcatctaatatccattaaacccattaaagttaatgatagagtatttcccccttattgccaataaaagcttatagtatttttcacatattttgtcaaccattataccccatattttttaatgtaaatgtcgtaaaatgaatgttttagtaaattagacagggattctgttacatgattgtaatcttatattcatcgtcttgttatctcaatcatgtaaactagcaatcgtgatagagaaaataaaaggtttaaacttataaatcagggggaattataatatgtttaagaaagtcgtgatcactactacactcgcaggtactcttttactagcaccaaacgtaagtgaagcagctttaggcgaccgtaccctatacaatggcatgagcaactctgatgtaactgaacttcaaaacgttcttgacgataaaggttattttgactaccatacagcaacaggatatttcggcaatattactgaagaaggcgttcgtgacttccagcgcagtgcaggaattggcgttgatggcgttgttggacctcaaacagtaagcgcattaaaaggagcagcagtttctaaatcaagtagttcttctaatacatacagcggaacacttcgttatggtgaccgcggatcaagtgtaacaaacctacaaaatcagcttaaatcaaaaggttattacaactattctgtagacggaatttatggttccattacaaaacaagctgttcgtaatttccaaagtgctaacggtcttagcgtagatggaattgctggatcaaacacttttgcagctcttaatggttcttcggttagctcatcttcgtcttcacaagtaaagagtgcatcaacatctaactcttctgttgtgtcaatcgcgaagcaatacatgggtgtaccttatgtttgggcaggaacgtctccatcaggattcgactgcagtggtttcttacaatacgtatataataaagctggaacttcgattccacgtacagtagctagcatctgggacgcatcagataaagtttcttcaccatctgttggcgatcttgtcttctttgaaacttacaaaccaggaccatctcatgcaggtatttacctcggtaatggtcagttcattcactcttcttcttcttacggagtaacaatcagtagcatggacaactcatactggtctccacgttatcttggtgcaaagcgtccataatgcatacaaaaagaacctcacttcgaggttcttttttttgtcttctttttcatttataaaagaaaagaaaaaggcgcgcttcagcgcacctttacccaaccttttttgattgcctctacgacagcttgcgttcggtcatttacattcatcttctgcaaaatattcgatacgtggttttttactgttttctcactaatgtaaagatcttcaccgatcgagcgattgctttttccatctgtaagtaactggagcacttcacattctcgtcgtgtcaaaatgtgaagtggtttgcggtactccacttccttataaccaatttgggtagatggtctttttccttccgtagcgagacgacggtactcattcacaagattatgcgtcacttttgggtgaatgtaagctcctccagaagcgacaactttaacggcttcaactagcgaatttgcatccatctcttttaataaatagcccgcagcaccggtctttaccgcgtgggttacgtacgtttcgtcatcatggatcgataaaataatcaccttagtctcaggcacttgttcgatcagctgtctcgtagcttcaacgccgtttacatgtggcatattaatatccattaaaacaacatcaggcttattttcttcaacaagacgaagcgcttcgtctccatcatcaccttcagcaatcacttcgaaatcatcttccatatccaaaatacgcttaacaccttcgcggaacaagcgatggtcatctataataataattttagttttggtctttgctgcatacatctcttacacgccctcctgttcatgtatcgggattcttatcagtatatatgtacccttgtttggcgttgattgaacctgaatcgttccatttaataatccgacacgttctttcattccgattaatccaaatgattgatctttacgtacgttcacatcaaaaccgattccattatcttgaatggttaccacaatcttatcaccgtcaagtttcaggtcaacacttatttcagttgcttcagcatgcttaagagcattttgaacggcttcttgaacaagtcgaaaaatagccgcttcaaggcgaacgtgaagtctctggatcccctcatcataatcaaagtaaatggttgcctctgatcgatcatctactttatttaaatactttaacaatgttggcactaaaccgaggtcatcgagcgccattggacgaaggtcataaataagacgcctaacttcttttaacgcatcctcaatcaaagatttcatatctttgatttctttgaacgcttcatctttcccctttttctcataaatccgttcaattaattgtgatcgtaatagtacatttgcaagtacctgggcaggtccatcatgaatttctcgtgatagacgctttctttcttcttcctgtgcttcaataattttaagtccatattcttgttttcgcctagcatcctcgatgacctcaccgtattgccttagttctccgccaagataactaagaacggttgaaatttggctcataaatgactccgctttatccgaggtattttgaagagaagaaatacgttgttcgagatctgaaatttgatcttttagccgcgtttccttttccatgctaaccgaaagcttaatttgggcttctgaggccttttcataggcatttcgaatctctggctctttatagtcctgaaagttcttactgatctttacaagctctgcacgggccacacgatccatttgtagtctttcttgccttagacgatgaacggtttccagttcttcttttaataattgaagttgattattaaccttttggcactcgtcatgagaaagctctccaatttcgaacagttttgatttactactattaatactctccattgtcctgtcaagaatgacatctaatgaatttggatcaagcctttgaaaatccaagctcttacccctccattccttcaagggacggacgttaagaaaagatagtccaaaagtacttcttttacaaaattcgtatgtgaccgtctgtttatgacttgaggatatatatttgatggattaatttaagaaacttataataagaaagacgtataccgtacttcttatttttcactcttaaataactatgtttccctatgtactattcgatgataagatacaaatccctttcattcaccggaatgtgcaaggaatatctggaggttacttctatgcttacttcatattataccgttaaaaatgagggagaaaacgaaattgtgatacaaaaatctcggtttatcgctcacgtcaaacgaacaccaacagaagaagaagctcaagcatttattcaatccatcaaaaaaagacatgctagcgccacacacaattgctccgcctacttaattggtgagcaggatttggttcagaaggcgaacgacgatggtgaaccttccggcacggctggtgtgccaatgcttgaagtgctaaaaaaacgcaaactaaaagacacgactgtagtcgttacccgttactttggtggcattaaacttggtgcaggcggtttaattcgtgcgtatggccaatccgtctcagaagggctaaacgcaacgggaatcgtcgaacgaaagttgatgacgaaaataacgactcaaattgattatactttattaggtaaagtcgaaaacgaaatccgtacatcgaattatttattagatgagattgcgtatttggagaatgttcaagttcgaacccttgttgaaagtgggatggaggaaagctttactgaatggatgaccaatatcgcaaatggacaagcaacgataaccatgggggaacagttatataaagagtatgacgtgtaaaatgattacttatttaaacaaatgggtattggtaaataaatattctcccatcaatcaacatgaaaaatcctcattcggggaagatatttttagcagcaaaaatttctataataccttaataagaaacctcttgcaatacacacctattttgatatgatatgaaaggaatgaattactattcctcaattagagggggattttcttgtattcgttaacagagtatatgatcgcgtttttaatctctataagtgtcgctatcattgtcacaccaatcgttaaatacttatcacttaaatttaaaatagctgataaacctaatcaacgcaaagtgcacaaaggacttatgccatctgccggtggacttgctatcttcgctggaacagttgcaggttttttataccttagtccctactccccttatatgaccgaaattatcgttgctgggaccctcattattgttttaggcgtcttcgatgatcggtttgcagtctcgcctaaagtgaagttaattggtcaaattattgctgcaataatcgttgcgtcatccggactacaagtagagttcatttcactaccatttgttggtcgaattgaatttggatttcttagcttctatatcacagttttgtggatcgtcggcgttaccaattccatcaacttgattgatgggcttgatggccttgctgcaggtgtttctacaatagccttaggttcaatcttaacaatggcaatccttgaccaacaacttgttgtaatcgctttggcagtaattttaatcggtagtacactaggttttcttttcttcaattttcatccagcaagcatttttatgggagatacaggtgctctctttcttggattcgctatttcagtgatgtcaatgctagggctgtttaaaagtgtgacagtgtttagtttgattattcccgttattattctagcagttcccatttttgatactttctttgcgattgttaggcgtgtcttaagaaaacaaaaaatctcaacacctgacaaatttcatatccatcactgcttactagccattggattttcacatcaatcaaccgttatcattatttaccttctcagctttttcttcggtattacggctatattattctcagcgtctactttgtggggttcccttttcttactaattttagtgttacttgtcattcagttcacagcagaacttattggactaatcggtaatcagcgaaaaccccttattaatacgttaaagaaattattagtttttactagtaccatgaagcgttaaaaaagcatccgctgtgagcggatgctttttttgatggctatatctctgtcaaaatatagaacagtttcttcctataagaacttaatttttagagtttatttcgctgtatttagtatgctatttaatttctggcttagcttagctacgctttcttcatcgggcttaaagtaatacacgtcattaatccgttcatccgttccatcaattgaaagactttctatatcagaggaacttacatcggagtatgctttttgaagagcaaacaactcagttggctttaggttagtctcaatgttattaccaatgtgttgcgcaatatcatctaacttcatcagtcctgatgcagtcgaaacttcattcatggctgctttaataacttgcttttgtcgttcacttcgaccaaaatcaccacgaggatcatccttacgcattcgtgcataagctagggcttctgttccatccagggtcattgaaccttctgtgaaggttgctctccccccaggtacgtccgtatgggcaacgaaatcgaatggaacatccactgtaattccaccaatttcattgatgacatctttaaatccttcaaagtttacttttacataataatcaattggtatgtttaagaagttctcaactgtattaatggtcatttctgtaccaccataagcatgcgcatgagtaattttatcctcaatgccttttccgactatttcaactcgtgagtctcttggaatgctaagtaaattaactttcttcgtatctgggtcaactgtcgctaccattagcgtatctgttcgaccattttctccaccagttgagtaatcttctattcccattattaaaatggaaataggatcttttgtaacagctacttcagcgtcacggagctcagatttttctcctctggaaagtccttgataagacccagaggctgcatcataggcattgtacgcaaggtaggcaccgtacccaatcaggacaaggacaattaacaggacaaaagttaaaagtctgcgaaatatacttttctttcgccgtcttctaattcttgattgttttttcattctatttccccgcttctttcaagcttctttatttacaccgctacttattttagtaagttgcggtaaaattcaagcagttttttttcttcacaagtccagttgtatttcgtttcaaatgcttttcttgcattacgaccaagttcttttgtttgaataggattgcataagaggtggctaatcttcgttcctatatcttcaggatcttctggattaacaacaagacctccttgactatcctcaatcactttagtgtagtgcggaaaatttgaagagataattgcattgttagcagccatatactcaaataatttgttaggaagtgcaacaagatggtttggatatggtaaatatggaagaatcccaacagatgaccgctccacatatgttgatatttgttcgtagggtaccctactgataaaagttacattctcttttagtttaagctgatcaataagcttgtagacttcttctctaaattgatcagattcaaaactgccaaggaagagcaactttgcttgaggtgcactttttactgccaaaccaaatcctttaataagctgtaaaacacctcttatctttgtaataccgcctaaataaataatttgattctcatctttttcattcgatggttctgggaacatttccttcaaaggataattttcaattttgcaaccattatagttacgataacgtctcccaatttcctcggttgtatagataactccactaattttgataagggctagtttttcaatagctatataggcaagcttcattggaactttgactacagaaggaatatattcccttcccattattgtattcggataatgttcatgcacatcatagataacgggctttttaagtaacgactcaatcataacccctactatcattagctctggatcatgaaagtgataaagatcagcattttcatttttagcaagcttatataaatggaaaatagattgaatgcgcttctttattccgtttggccggttaaatgtaatgagcgggatttcctttgactcaaccacatcgggcttaggtgcaattagcacaacatcgtatcccgctttttttaaacttttacattgcttatggtaaatacgcccgtcgtaaggtgaatgaatggacgtgataacacacacttttgtcattgtgaccaaccttttacattatcctgagtagattccagtaaacgcgctaagttcttcgataattcctgtcgattatattttattaacattttgcttcgaacatctttttctaactgctccataatttcagggttagaagtagcctctaatacaacattcgctaatgaatccgcattttctggttcaaaaaagagtcctgcatttaagcttttaacaatttcttttgattctcccccgattccgagaagaatcggtttgttcattgctaggcaatcaaataattttgatggaatcgtaatatcaaaaagaggatgattttttaaaataacaagacaaaggtcagctgcagcatagaagccattcaactcctgcttcgctcgactatccagaattaaaacattgtgcaaatccttctctttttgataccttagaagcctttctttttcagcaccttcacctataagcacaaaagtaatcgaaggaacatcttttaaacgatatgctgcttctaacaccgtttgaagtccctgagcaatacccatattgccagcatacagaataagaaattgatcttctagacaatgttctttacggactctcacaccctcttcagggacaagcattcccatttcagttggattaacaccatttgtgatgacatcgattttattttcaggtatacctttttctatgagatagtctttatacccatgtgtcaccacaatgatatggtccgccttgttataaaggaaccactctaatttccgagccatcgttaatagctttttattattaatttgatttaaaacttcagcaaaatccacccataaatctcgcacttcaataacgaacttggcacgttttagtttactcaatacgtaacctgataagcctacgaaaagctgcggtgttgttgcaaagacaacgtcaggttttttagcaaatattcctgcgataatggaagttgtcataaacgaaaaataatttaacattcttcttaccgtactcttttttgtgtcctgtacaacaaaagaacgtatcacattcaaaccaaggtgctcactggaatgaaataactttttggaagaaatatgattaggaaaagcagtaacaaccgtaacctcacagccttcttctaccaaattcattgacatatcataggcacgtgcctgcgcagcgcctatctcgggcgggaaatgttgagatagatataaaatcttcatagtgaatcctttccctcttaacctgaatacgacataaaaacacttctttcattatacttcgtaatgaatcgaaagaaaagttgattaagaaaagcattggaagtgtaaacgaaattttacaattagttaataaacttattttattaagcgataacattttacttttgcacatgcaaaaagtccggtaaattcaccagactttctgaaccgtggataaatttcgtagtagttcaaaatattgtttaactacatgatggatggaatagtctttttttacttttttaataccgctgttgatttgtgttcttctctcctctttattatcaagaagacgatgaacaatagcttcacatgagtctaaatcatgtaacttgtacgttagcctttgaaggattccttcataaatttcagggatcgctccaactgttggggcaaccgctggacatccgcacgccatggcttcaatgaggctcattccaaaggattcaccttttgatgtacttacggtacagccaccgctattagccaccaatgaataaagatctggcatttcgttatattccatgcgatcaatccattggatatgaagattccgcttatttatctcttgaaagagatgcctcgttgctttaattgaagcggtttctcctccgataatccaaaacatacagtcatcacggtgtgcagaaattttttcagcaaggtttaaaaaaccttgccaatttttatgatcgtttaatttcccaacccaacaaataatttttttatttgtaagaggctcaacttctttaggtgagaataatgatgtatccaggcaattaggaataacatacgtttgttcttcaggagccgaatagtctgcaacgattcgttctttactataattagaaggaacaatatatccacgaaaatgacgctgctcatcccctaccaaatagttcagcttatatgaaatgccatgaacttcttgaatgataggaacctcacagtgtacgtctattaagtaatctgtcatttcctttgtatcaatagcgataattaaatcaaactgatacttttttacatagtcatgaacactagcagggtcatctgtcactttgatttgatcgaagtctccaaaggcggtcctacctccatgatcagaaagaaagataaagtgaggatcactgacagatctgagaaattcaagtctatttgccaattgagtggttacgccacctaataacaagtagcgataaatatataggattttcatcgtccttctctcccctcccacatgcaaatcgcttcttctaaaaatccacttaacgtctcctcttcatcaagtgaccatactttctgctcttgtatagaagcaccccaatcattagtaactaatagggggatacctaattttttcatcatcccaatggatacgattggctcactttgtcgaaatggaagaaagccaaacgtccacttttccactcttttccttagctcatcttcatttatatactcttttatcataagtctttttgtgttgattggaatagcatctggaagattataaccgataagttcaaccgccaccttttggtttgctaccaacatttccttaatggcactataatccactcgttccaggtttccaacgtaaccaacaacaattcgttgttcttcaacatggttagccatttcctttaattgctttggcttcgttccatatggaaggtagatgttcattcttgtaataaagctatcaggggtaagacttccaactaaaaagctatgaacctcttggtctgctatttcctctggaaaataatagacactccactttttccactgtaatcgcccaagccttttagctagctgaagatcttgtacggttacatacatttcaggagagtcgaataagtgaagatgctcatgaaattctgtactgctaatttggattaagtttgcccctgccctataaataggagcaaatgcccgagacccatttccatgtacataaacaacatttctccccttattatgagagagcacatccactagctgatgtgaaaatacaagactatttttgcgatataaatatgtttctccaaatacaatcgttatgtttccaattgcttgaaagcgactaagctggtcatgcaggtcgcattttttcgtatgtatcacggtttcattagatttttgagacagttcctttttttcttcaggtgataattctaattgagcaataagagcttcatgtttttttcttataaaaggaatgctgttcactaatttgttcttttcttgaagtcgtactagttcttctgtttttttctcttcaagcttttcatgtaacgccttagcgtaatctttgtttattctttcaattatttcttgcatctcatttaataaaatttctacctcgtcttctgaatactcaggtgcttttgttacatttcttagtacgacattaacatagtgttcatccacacgttgatcaatcttttcattgcttgaaaaaatagctccccactcatcttttaattggatcgcctgtctaagtttttccgttacgatgatttttccattcggcttaataagtctttgcacttcatcattatggacaggcagaatttcagctaaagcatcttcaataataagcacatcaaagtaattggttggaaatggaatttcttctgaaagatctcctgtccaaaatgagcttgtactatttacggttgacggatgatcgagaatagataaatcatcacaagtaacaataaggttcaccatgtctaattgagtatcttcattaacaatggaaagaattccaggtgtttggcttatatgaagaatatgttttcctgatgctctagagccacaccatcttaatctcgaccgttgatgttcaggaatggataaggtttcactttgtaaatgcactaactgattttttaacatgccactctcctgattctactgcacaggcagctaatgaattggataccatttatttgcattatagctgattctacagattcaaaaaaggattgtgggtcatttcctgatagtattacgtatttaaaataaattagagattataacctatcctttgcaaaaaagctgccggaaaatccgacagcttttcattccgtacgtttaaccccagaaattactaagaatttggttcttttcattttcatcttcaattaatccatcgatataacggttttcaaaagatgtagacatgttattcgagtgaatgacttgaacgtagtttcttggctctaataattcatggttaaggctgtgaacggatagatgacctttaaccggatgacgcttaccatcgagatactctgccacattataaatgagcgtataaaaaggtggtgatttgattttagctgttgccaccttatctgaatactcatcataaaagtagccgtactgattaataagcgcttcagtaccttctgcaggttgatggtttttcagaaattcaaagtagcctttatggtacatatcgtcagaatcaattcgtgcaaagtatacttcatcgtaatcctgaatttcacgctctaacgttttgttataagcatttttaggcacaaatttaatgttttctggaagtggatcatgctgtttcagcgcgttcattacgtgttcttcagaacgctgatcatattgaagaatcgttgtaaaatcttgatttgtttgtgctttaaggcttctacatgtgtatttcatgaaaatccccatacgatgatcgatccattccttcgttaaacgattatcattcacatcagttaacgcccaattattaaatgcgattggtaccaagatttttcgtttcatcttcatcactctcccattttaatttctactgattcactgttgcgttttgtacaatcatttccgccatttgttgtgccccattttctttcattaatgaaagagcacttcttctcatgttttgattgttttcttcatcaagcgcttctttaatagctttttcaaaatcagctgcaccaggatctcttaaaacgatcgcagctccagcctttccagcaatcatagctcttgccacttgatcatcagtttttgtattttcattcggaattaagattgatggcactccgaaatacataacttcgtggaaagtgttgtaaccagtagctgttacaatcaaatcaaatgcattgaaataaatggaatttggatagtctctcaatgtaagaacccgatccatttttaaatccattcgattaccaataatggattctccaataacgacgaagacatcgtctctttttaacaactcattcaataggatggaaattgttgagtgaatatcattgattttcccagctccaagctgagcgtataccattttcataccttctggaatgttccactggcgacggacactttcacggtctttcagttcttctcgatctagatataaaactggttcacagaatgtttttattccttcttttctcatactgttttccccaccagcttcaccaggaacatacacttcatcgaattctgcttctttggtttccactaactcagccttaccttccttatgctgaccacgctttacccaaatctttcttaatccttctttttttcgcatcgaagcaaccagacctgcatatgggaaggcgccatcaaacacaattgtttcaggttggtgaatgccaatgaccgtttcaagatgatcacgtaacattgcgttccactgcttggcactcatttcttttggaaacagcatcttagatggtaagtgatagccaagaaaaccttcctgcaagatcaaatgcatcgctgaactggtcgtatggaaaataatttttttcgatggatcaatgcgcttcactcgtctcgcaatcgcaagaagtcttgttaaatggccaagacccgcaccattagttggcacaaaaagaatagcattcccatcattaattggttcaatttcaaacgagccagacccatttttgatccgtccaattttcccacttttagcatctcgataaatgcgaagtaacctttttggtaaccgaattgctcgcccaaatgacttcgttgatcccattaccgcatcaccaatcaaataccgggtagatgcatttgaatccatatggtttacgatgtgttgagcgcgattatattttcttgtcacttgagacagttgcttttccttcttatttgaatcacgttttagattcttaagttgttcgttcaaatctctaatttggaactgttgctggatcatttgctccatgttttgattcgctactgctgtggcaatcgcgtcatctttttcttcactactaggcttatttttcaccagaactgcggtcaacttctgatgagctttttcaagctttaaaatagctgctaacaggccacttgtcacttcttgtttaattcggtcttcaggaagtgcggtccgcggttcaccgatgaagaatagatagccgtcttcaaatcccattgaagtggcaataaagaattgatttaaacttagaacaacttccgaaatatcttctgtaatttcttcattaatcggaaattttaccgccaggctgccattcaattcttctgccaaaatacgatgaagtgccaaaagaaagccttcctcgtaaaatcttcgtgtgaaatttccttcaagaagaaccatttcagaatggtacgcttccagttctactgcacgatagtaattcactttttgaaggtttatattctcttgaagctcctgaggtaaggagctaaccatttttctcttcttttgtaaatcctcatcaaaacgaacaagttctgtcacacgttgatctacccttgctagttctaatgaagcttgtgtttccccatcaccagaaagaataagaagggaatttgcttttcttccgtttgcgatcagtttgttatttaagcaaccctcattgatcaatacctcaatattttctgtataaaatgggctaacatcaaatttcatgtagaattctccttttacatcaattacttagggtttacacttgaattttcttcaacattcgtaggtaaatcaaagttttgctggccaccaagtagcgtcactttacctttcgaatctttgtagttcttagttacattccgcgtgtcataaattagcttcgcgcgatcaatgacataatcataatccactgttgtatgatcagttgcaatcacaacaagatcagcgtcatcaagattctggtcatttaactcaacggaataaacaacttcttcaccattcttaaagcttgaaacaaacggatcatggtaatacacatgtgctcccttatcttcaagaaggcgatagatttcaagtgctggagattcgcgaagatcatcgatgttcttcttataagccatacctaaaataaagatttttgatcctttaatggatttctcattatcatttaaaatatctgcagcctgattcagcgcatagcgcggcatgtttccattcacgtcactggcaagctcaataaatcggttatagaagttaaacatttttgctttccaagagagatatgctggatcaagtgggatgcagtgaccgccaattcctggtcccggatagaaaggcatatacccaaatggctttgtagcagcagcatcaatcacttcccatgcattgattcccatacgatcgcacatcatcgttagttcgtttactaggccaatgttaacgctccggaacgtgttctcaagaagcttcaccatttcagcaacgcttgttgaactaactggaacaatattttctaggaatgaactataaagagatacgcctagctcaagacatggtttcgttgcaccgccaagtactttaggtgtattttttgtattaaattgctggttacctgggtcaacacgctctggtgagaaacaaaggaagaagtcctctcctgcacggaaagaagtcttttcttcaatgacagctttaattaattcatctgttgtacctggataagttgtactttcaagaacaacaagcgtaccttctgtcatataatcaactaacttttcaacaacagcattgatataagaaacgtctggttcttttgttttggcaagtggtgtcggaacacaaatactaacagcatctaatttagagataactgaaaagtcatctcctgggaaaaagttctttccgataatggcttctacttgttcatcggaaatatccatcacataactcttcccgttatttagaatgtccattttttctttagatacatcgattccatatacttcaaaacccttttgtgccatttccaccgcaaggggaagtcctacatagccaagtccaataactcctacacgtgcattacctgtttcaaacttcgttaacaatgcttccttcatctcattcatcctttataaatgtaataaattcgtgttgatttgggatttccccactttttcatattgaaagccagcttcttctgcctgttgtttacttattatattcttcgtatcataaagcaacgtatggcgcattaacgctgctaatgtttcaagtttcaaattcttatattcattatgatctgttaaaatcaccagacaatctgaatgtcgtaccgtatcttcaatcgtatctaattgattcgcaatcctcttatccatgacataaggatcatgaaccgcacattcaatccccatatcttcaagttcttgcaatatggtaagtgaaggactttcacgcgcatcaccaatattacctttataggcaagtccaagcagagaaactttcgggttcataagcccttctgttcgttccttaatttgattcgcaatctttttgggaactccatcattaatggctcttgctgtttgaatgagctttgcatcccctggacttgcttctactagaaaccatggatcaacagctatgcaatgcccaccaactccaggtcctggggagtgtacattcacccttggatggcagttcgctaattcaacagctttccaaatatcacaccctacctgttctgcaatacgtgccaattcgttagctaacgcaatatttacatcacgatacgtattctccattaattttaccatttctgcagtcgtggcatcagtctggtgaatcattccttttacaaagattttgtaaatttcctctgttctgatactagaggctggattcactccaccaacaatacgattattattcacaagttcatcaagcagcttaccaggtaaaacacgttcaggagaataggcaacatacaggtctttccccaccttaagtcctgaggattcgagaattggtgaaagcaccttcagcgttgtgccgggaggacttgtcgattcaagaataacgagattcccttcctttaacaaaggctgaatcatttcagcagcagagcgtacataatttaagtttgctgttttatctggattgacaggagtaggcaccgcaataatgaatccatctgccgcgatcggctctgtcccgaacgttaaacggccagagtcgactgcttcaacaagcatatcccctaaacctggttcttcaatatgaagtgttttattctttaacgtctcaatcacttgctcattaatgtccacaccatgcacttgaacgccgtgccttgcaaacataacagctgtcggtaacccgatgtatccaaggcccattacgacaagtttcataatcacaactcctcactcacagtaacttcagaaatgaatgtggtaaccacatttcattgttgtttaagaaaataattcattgtacaagtgaattaacttttttgattcatttggccaatttagtactttgcttgcctcgtcacatttttgaacataataattacttctttgctgaatagcttcaattccttttacgatcgcctcttcattctcatccactgctaccccaaaatcatactcttctaatagataagctttccctggatgattagaagatactaccggaagtcccatcaacatatactcaaaaattttattcggtgttgaatagtaattattttcactcacattctcatacatcacgagcccaatatcggcttccttggttagagataatatttctgaaggtggtaccttcggatgaaaatgaaccctggaagtaagcttttctccttcaactaattgcataagggcttcctttatatcaccatctccaagcaaaacaagatgatagtgatcaggcaattgattcattgatttaacacatagctcaatacccctgttccttgagaatcccccttgatacaaaagaatgattctatcagttggtattccataaagatgatgaaaataatgagcatttttccgctcttgctcaagaccaagaagcggtatattctgcaaataaatcgaaggtggtaatttcccataccgcttactaaatttatcgattaaataaggatttacagttataaatcgatcaacatgcctcattaactttgcctctaatgcataaccaaaacgacgatcaacggcatttcgaccagtcatttcattaaaaagttcatgcgagtcataaatcaacttgctctgaaaatgttcctttaagcgtttaccagtatcaagcgtgtttaaatcgtgacagtgaatggcatgaatggtttcagatcccatcgttatctttacttttttataaaattcgtagctcgcatattgatccttcgcaagtttaatgagtggatgccgaaccattttcgctagtactgttggttttcgagatgagccactagcgatccctttctttgcttgctttgttgaaatggtgagcttataaatattgatcaagttatgcaaaaagggaggatctgtatcaaattcattcaggcaacaaatcgtcacctgataaccagtctctgcaagagcaatcgcttctcgctgtactctggcatcgtaatcgatatctttaaaaagaaccattagaatatgcttcattttttcttcgccttcataaactcatcgtactgttcaacgatttctttcgtatcaccaaccgctttttgttcaccgcgatgaatccatacaacacgatcacatatctgtttcactagtcctgaagagtgtgtaaccagaatcactgtacgatcttgctgaatcttttcaaggatcgcatctttacatttcttttgaaacgctgagtctccaacacctaatacctcatcaattaatagaatttctggatcaagcataatcgcagttgaaaaagctagccttgctttcattccagatgaatacgttctaacaggcttataaataaaatcatccagctcggaaaattcaataattgcttcaaggttttcatcaattttcttcttacggttcccaagtagaagggcattcaagtaaatattttcaataccagaaagttcaggctgaaaccccgctccaagagaaagtaacatcggacgctttccttcgacctggtaagacccctgatctggttcaattaaaccgctcattagcttcaaaagagtactttttcctgatccattacgcccaataattccgagaacttcaccttttttaacagtaaaatcaaggccttttaatgcccagaactgctttttatccttactaagcaattgcttcaatggattatcagaatgctcaggatacgagacccaaatatcttttagttcaatgatgtcctttttcaattaaatcaccttagcatattgtttgtcgtatttgttcaaaatgcgtagtccaataaacaacaggactagtgagagcgctaatataatcaagaggttatcccatagtggctgtccttgataaagaaagatgttacggtacgaaacgagaaagttagtgaaaggattaaggtaaagaagatctctaatgtttgcaggtaccgattccattcggaaaagtactggtgacagataaagcaatgtccgtgaaatgtattgcatcatgtttttaatatcttttaagtacacgccaatatgagccatgatgatcatgattgggagcaatagaagaaggttaagtatgattaagataaagaaattcaatgcatttacggttaagtcaacaccactaaagtagaggaataaaaccataatgactgaacttacaagaaacttaaatgtattcacaccaagcctcaccagaataaaagtaagctttggcacataaacctgttgaagaatacgagcttttgatgaaatagccgtagtggcatcaaccatacaagcagttgcccattttaacgggatcaggcctgtaaacagataaacagcgtagtcgtctccgccacgatctaaaacgattcctactagaaaataataaatcgccatatacaggatcggatcgacaatccaccataatgttccgaggtacgttctagcagtattcgatttcagttcggatacggttaggtggtaaagcaaatctttgttatttcgccaatcgttgagtaattttttaaacattcgcttgttaactcctaatctcactgcatttatattttcaacgtcatattatattttatataattccgcttctgtcgtctaccagtatcagaagcctgtcattttgggtactaacccttgataaggcgccttttctctacattttttcgctaatctccccctttattcaaccgtaatttacaaaatcttaacgtttctcatgaatttagaaacgattaacttattctttcataattcaacctgaattgccatcttttgtcgaataacatttattgagatatccaacacgaaaaaagcaaccaagatggctgcttttttcgtgtttcattgaatttcaactaattctgccacttctttttctgagttgtctgttgtttcatatacttgcttgatcattcctactccctttgcataaaagattgtcatgatcatttggtcttgcttctttgtcacctttatgacgtcatgaaaacttccataaggaacttctacagtatccaacgtagtcatctctaccccttcttgttgctgggaaagattcaaaagtgcttccacttcttctactgattcatatccgtcaagtatactttctttactacttgattgactttcttctacaacggcagctcggtcttctgtccatttgacgatctgagtcgtttgcatatctccaagtgtaataattctttggagatattcagcattctgatcaacaacatattcggtaaagaactgcttcccctgagatgtaaatgtctttgtgacaccagtttcaggtctgtagtcaatcaaatccacttcattaatcgtgcttatttcgttagtacctcctttcgcttcggttacttcactcgagctattctctgttgaacctgtaccacacccagtcgctataaataacattaaaagtaaacttattgtggtttttttcatatttgcctccaagttaatggttaatatgtgcctaatataatctgttagctacctgacttttcggtttttcctgaacttttccaccaactgtgaacaaggtggttacacggttttccataccatattcaaaaagaacgtcctgcacggatgagttcaatgtatcatgtacgagaattagcggtgcaccagtttgaacggctaatgaggaagaaacgagagcatcaggaaaatcctgaccaatggacagaagcacagtatctgataccatttcgtcgctgtattcatttaaaatagcagcaagcgtttcatatcgtgtctccccagccaaacgcttcacattagaaccatttaaatttttcagctgctcttctagatttgaagaaataaccgcttctccaccgagtatcgctgtatcttgtccttttacatacgaaagagcttccgctgataattctttcttatcggttaggagtattgcccaatcggatgctgaagcgattggcgagcttgctagcgcatctgcataacttaagccgttcgctacaaacactccctcaacatgatcaagtttttcgttaatcattaagtttgtttcatatcgattggctccacccagtctttctgctgttacccctaatcccttgacttgcttttcaaccgttgttgaaatggcactctttccaccaatcaataagactttgtcagcacctaatcgcttgatttcttgctcagcaaaaggatcaagtgaagagcctctagttaaaagaatgggcgcatttcctagctgcgcagcaagaggacctacagatagagcatctgcataacctaatccatttgtaagtacaactgttttttcatttttattatctttaaaaccttcaggataaatttcttttgaaatcttaacggctgtttcaaatcgatcgcttccagcaagagctttcacgttaagcgtctttgtcacttgttctccagaaatatttgtccaaagcgtatcagcagacgatcgatttacaacttttacatccttcatagctttagccgctgaaatagcctggcttttttcgaagtaactccctttacttgagccatctttactccgaatttgataaggacgcgttaaataattcgaccactcaactgtgcctttcttcttatcaatgacttttgtatttttacgatcttttgcataattgatcgcatccgaaagctctgtaaaagaaacagctttactatttcctttaatataaacatcatagtttactttagtagagtcatagatcgtttcctgcttatctttatcaaataccgtcacgttgttaagggtttttgcgaatgtaatcgcatcatctcgtgaagtgaattgcttaatttctttcccactactatccttcacttcaaacactttaaagaagttaatagcagcttgcgcaagcgcttctgcggcatcgttttggaaacgacttgttttaattaagctttcttctgagggattagacatataaccaagctccacgagcacagacggcatctgtgcatttcgaatgacaaagaaagcctgatcattttgaattcccttatcgagcaatccagttttattcagcacctgcggatgaacgatgctagcaagtcggcggctttctgattcaaaattaacctgcattggatctggcggatattcttcatcccacgccgcggctttactataataataagtttcatatcccttaacgagcgtgctaaaagggtacgcattatgatgaatggaaataaaaagtgaattgtcattattccccttcacgtatccgtttgcaaccttcattctttcaataagatcctcttttgaatcattcgcaaaatctcgatccgtttgtcttgtcataaaaactttaatatccgttccttctaactttccctttagctttaaaccgatttcaagcgttccaactttttcataaaagccggtttctgttccagaataacccgaggttccagtaaacttgcctccatgccctggatcaatcactatgtatttttcagctgaagcaaaagacggactgtgtatcatcacgaccattaaaataaaaaaactaacaagtaaactctttttcatatcccactctcctctcttggcaatctattacattttattataggtgagtgagaacttctacgttcattagctaattcttctaagataagaaaataggactatttattcagcttcctctcccttttccctccattaataaagaatagataacgtaagaaaccttcctgcttattgcagaaaggtttttgaacggttgttattcagtaaacgggtttggtttaatagttgaagcaccaaagtaatataagatcgctttaacaattcgatttgatgcttctccatctccataaggattagcagcttgggacattttatgatactcctcctcatttgtgagaagtgttgatgcagtagaatagattgcttcttcatctgtcccaacaagcttaagtgttccagctgaaacgccttcaggcctctctgtattctctcttaaaacaagaaccggtgagccgagtgaaggcgcttcttcttgaacaccaccagaatcggttaaaatcaacgttgcttttgaagcaaaattatgaaaatcaatgacatcaagaggttcaattaaatgaacatgagaatgcgtgccaagtactttatcagcaagctctctaattagtggatttaaatgaacaggaaaaaccacatgaacatcatcatgttcgttaacaatccgcttaaccgcttggaaaatacgtgtcattggttcaccatgattttctcgccggtgagatgtgagtaaaatcattcgtttccccctaattttcgataatagaggatgatcgtagtcttcttggaccgtatttttcaatgcatcaatcgctgtatttcctgttatataaatacgatctgctgtttttccttcatttaataaattttctgaagcttgaatggtaggtgcaaagtgcagatcagcaagatttccagttagcattcgattcatttcttcaggaaaaggagaccatttatcatatgagcgtagccccgcttctatatgacctactgaaatttgattataaaatgctgcaagacttgcagcaaaggttgttgtcgtatccccatggactagcacaagatcaggcttttcttccttcataattgtatcaagaccattcagcactcttgtagtaatatcagcaagtgactgtttgcttttcataatatttaaatcgtaatctggctcgatctcaaagattgataatacttgatcaagcatttctcgatgctgggctgttacagcaacaagcggcgtaatatgttgcggaaatttctttaactcattcacaagcggcgccatttttattgcttcaggtcttgtcccaaaaacactcattactttaacaggtgccatgttgactctccttttgttcaaatggtaaaactcattcccattacatcttattaaaacacccaacaaaaagcaaaaagcccccctacataacaggaaggctagtatttagttaccgcttaaataatcgacgatgaaatcgccccatacttcaaacccttgttcattcggtctggaatctactaaataatcgttaatttcttcactatcaactgctggccattctttcctatgatccaaatatatgaggtcatttgcttccgcatatttttcaagagcactgatttgaagtgcgtaatagcccggatcagcaatcggatttgacggcatcagcatgatacttacactcggaattgcttcttttaattccaacataaaagtagaaagattttggtgcccctcatcaataaccacaacaccattatcatttaacgtaaacgcttctaataggacgatatctggtttttcttcaatgacgttttcatataattcgtcctcaacgatcgactttgttgtggcgtctttaaaagtaatttgtttaactttaaaagccccattccaataggattcctctaatcccttttcaataatttgcttgagtccttctttacttgtaccgattgattccgagccgacaatggcaactgaaatcggttcgttaaaagacatcatcttctcttgaaggttctctgggaaattggtaacaagctttttaagttccttattacttaccggtatttcatcaattccttcactttgctttgtggcccctgatgcagaatcaacttctgcacttacagtctcacctgtttgttcaagcttatcatcccaatgaaacttcccagcaacaaccactgctaggcatacaataagagcgatcaaaaagagtacatttttcataacttcccccctggaaatctgtcgaataatggtatctaataatattattgtaataaagggaaattgattgcaagtaaaaattaaaaagccgctcacttttcggagcggcttttttggcatcttacttatttaaccatttgttaaatttatctttcacatctttgtttacagcactgtcaccaccaagaactttcgctcctgatacatctgttgttgtaaagtacttaacaagataagattcaatctctttcgggatttcatcgctcttcacaaggaacatgctacctttatctttcacaacaagtggtgcagctgcaagggcatctgggaagttcatgccgttagcaacaaacagttgatctgtatttgtcccaagttctttatgaatttctacaagggtaccgaatcggtttgctccagcaaggcgttttgttgtaagcgataactcatcagccatatcaacaacctcatcagagatgaccgcatctccacctagcacgtaaacttgctttccagccattacctttttcgcatcttccgtaaccgttttgccatccgtcaagacaattggcatatcatttgcacctgcgatagatgcagcactcaaggcatctgcgaagtttgttcctgtcgcaaggaagacagcttcgcttgtcgcacctttttcagctagtttattaataatctgaacgttcgtatcataacgagtatttccgctaagtcgttcaatatcagctgtacttacgcctatgttcgcaagctgcgtagttactttcttcgagattgcattttcaccaccaagaatcatcacattcttagctttaaggcgagaaatctcgtttagaacctcatcagaaagcataccgtctttattagcaagcaaaattggggcatcataagcacttgctaacggaccagcagatagtgcatctgggaagttaaaaccagttgcgataaacaccgtatccgcggttgttccttcaggatacatctgttttgatacttcgattgccgtttcaaaacgagtgtctccagctaccacttctaccatgtcgccatcagtttcaaccggcacgatcgaaagcacttcacctgtcgctttatctttcaagaaaatcccagctgtatacttaccgctaacttctggtgtcgtgattttcacatcagttgttgctttcttacctactcctaaatcaaagctagatttaccagttacttcaattttaccagcgccttcttctccagcctcaagtactttcgcttctgtaacagagaaatcaaaatctgtcgtttctccaaccgttgaataaccgtcgacgcgaatggtgtattcaccatctggaaggtttttcacagagaatgattcttcagaatcaccgtccgcatcaatggcaatataatctccaattgttttaccatcttttgaacgatagagataaagatcaaggtcatcaccagcatcgttcgtattgccaattgctacatcaagagaaatgttatttttaagggtaatcgttttatcgtagacaccgccatcagcaacagtttctctagatttatccgtttccggcttactaaatgcaccgcctactacttctactgaacgtttcgtagataagtagttttcaaacgtaacagattgagatacttcactaccaggcattacgctaccaagttcaattctacccgggctagcaacaacatcctggacgaatgcttctagcttaaacttgttcatttccaaaccatcttgtggaccagctgttccataaacagctacttcccaaacacctgatttaggacttttagcaacataatcttctactccaagaccatcataacccgcatacccttgaaatgcgttaacctgatctccatcaggattcataacaagcatgcgcacacgtccctggaactcatcgttttctttaagagcttccagtgcaaatcgtacttcttgcgctccttcttctacattaaagaagtaactctttgtttttgaagactgaacttcatcttcatgggttaagcggaatcgatcttcagacgtaaagtcttctccaagtacgattgtctggaatgaacgagcttctgcataagccgtatctggatcatcgattaatagtgtaccagcgtttacgccaatctccatcttgctcttatcatatttcacagtcatttctttaaactcaccaggcgcaagcttaatactactaacggaaggagtaaaccaatcagaatttgaagaaatgtttaggttcttcgtttcatccgttgggttttctaccatgaccgttacttcttcaggaacttctttgttgcgaacataaagtcctggtccacccgaaactttctcaccatggtaaaccgtaacatttacttccttcacttcattgatataatgcttacgaatgtattcataagctgctgggacatcgattagtccagcaccttcttctacgcgattatatccatcaacatgtacagctgtttgaatcaatgcttcacgagcaagttcataatcaaaaggaatacgatccttcagcgctgcttgttttaatgttgctactgcaccagctacatatggagaggacatacttgttccttgaagcacttcgtaattacctaaatgcaatgggaatgaagcataagcagatcccggtgccacgaagtctggtttttgttgaccatcttctgttggtccgtttgccgagaagtaccataggccttcaccttgaactggagaaccatccgaattctttccataaggatagtaaccatattcagttgcccacattttactgttaatatatgccccgatcgaaagagctttcattccatcaccaggagcacctacagaatccacaccaggtccatcattaccagcagaagtgacataaatcgtatcgaatagctcacccatatcttcaataattttcgcatatgcacctgatccgtcgttgagatctggtgaagagccaaggctcatgttcacaacatctgtaccaaatccacccaattcttcagggacagctgcaagatacattgcattcgcaatactccatccgtacgttctgccagcagaatcaaatacttttaaaccatatagatctgcaccaggagccaccccttctgcagctacagccccagtttcattttcatttgcaggaccatttgctgctgtaattcccgatacatgtgttccgtgaccatctccatcaaagaaaactgtagctactgggaatggataaagagttgaatctggaaattcatgtccaggatacgttgggctagggctagcaatcctaaagttagcaccttctacttcatcatcaggattaaggtccatgttatcaacatcgccttctccatacgccttttcatcagtgaagtctttatcctgatcaacgtcaatatagacttgatcgtctaccagaagaacatcaaaattagcatctcctgttccatctccatttaagtctctatataaaggctttccttctccatcaacatcatatgaggctggattcaacgtactgaaataatatgtatcgtcttcagcatcgataccttctgttttatatgtgccctcttctacagtaatagagtcgtcctcagctacttcttgctggaaccaaacgtctccctctccaactgtatcaacgacgcctttgattttagaagaaacaacttcgccttctttattatattgagtaaaggcttcatgaccaggatcgacacctgtgtcaataatccccacttttactcctgttccatcatatttatcgtgaaactcatcaacaccagttgccgaatgagtttcttcagttgcaggttttaccacatcttcagggtttttaacttttggtttaagatcagtatcttcttttgcaccttcatccagcacgatttcactgttcgctccaagcatgccaacagaatctagacgatagacttggagaactttacttgtgggaacttcagcaagatacaagtaattgtttgtatttttctttactttcacgccaagtttctcaagttcttttgtaaggtcaggtcctccatgttcatttgcaacaataattaattcctgttttgattgttcacttgcagcaagtgaggcaatctcctgcgtaacaggaagcttaaatttcttcgtttctgataaagcagcctcagccttttctggattatacgtcattcccgcgaatgaagaagcaacaagagaagcacctgcaacaatagtcaggacttttttcttaaacgtcatttagtaaaatcccccttaatagtttgtgaaatccctacaatcgatcccccttttacgtgaaacaattataacaattcactattttcagtttaattataaagagattaagagtcaatctttaactgttaaaattgtgaaattttttgataatttgtagatattttaggacttttgtccataaaagcgaaataattccgtaatgataaaacatgatggttaatttattaaaaaaaacgcagcgtcaatgacgctacgtttttaatcatcaagaagttgatcgatatgccaagcttttgtctcactaatcgcagctggcccacctaaaatacggtagttactcactccttgattatttaaatataagatagacttatttaatgcttcattttctctatccggatgaacgatgataatcgattgacctgatcttgatgcagctgctccaccagtgagggcatctggaaacttaagccctgtggcaaaataaattccatcactctcttcttctattccaaaccttaataagactttaaagtttgtatcaaatcgatcttctccaccgattcgctctgagtccaaggatggaatttcagaaagcacacttttaccgataactgtttcgccgccgatcacatatgtttttttgagacctagctcgtttaaataagctttcgtagcatcaggtaaagaatcactttttgtaaaaagaacaggagattcaaaccttgacgcaaaagaggaaatagacaaagcatctggaaaattttctcctgaaacgataaaagcttccgttgttttttcgtttgcaacgattttcgcaatttcagtagccgtttcataacgattatctccagcgattctcgttgttgctattccctccgatttcaactgatctacaatagcttcaggaagggcattttcaccaccaattattaaaacatgattggcagaaaggcgatttaattcatctaggacgctcttcgacaaaacactttttttcgataataatattggacttcctagtttagaagcaagaggcgaggctgctaaactatctggaaatgcatcagaacgagcgagcacgacaaatttaccatttatattcttcccatcaatttgaacagtctgttgatccagtgcattccagctgttttgggatatttcaatagccgtctcaatagatgtctcaccatatatacgattgtactctgtcacgcttgtgatagccgcttcaacatttaagagaccactaccgagttgataagagccagcgagaggatcagcagtttcttttagtagtttaactgtttgtttgtttgttaaatacggtgcatacgtctttaataaaacccctgatgaagcgacaattggagcagacatgctcgtccctttatcataagcgtaatccccttctaaagaggtgctataaatatctgttccaggggcagcgagatctacgagagagccgtaattggaaaaggatgctttctctttactacctgtctgaacagaagcgactgctattacttccggataggctgctggaaaaactactgctgaatcgttgtcgttacccgcagcacccaccatcaagatgtcttttgctgccgcttcctcaattactgttcttaaagcaaatgaattattatagttaccaagacttaaattaatcacatcagcatcatgatcaatcgcatagcgtatcccttctacaactgttgataaatttcccgttccgttctccgtcacttttatcggcataatagaaaccccacgcgccggagaagcaatcccgatttggttgtttgttactgctccaatcagccctgcaacttttgtgccatgtccatctaaatcttgaaccgactgattatcattcacaaggttaaccccatcaatgagattggcttttaggtcttgatgagtaaggtcaacacccgaatcaattaccgcaacctttgaagaacttttttgattaccgacaagctcccatccatttagtaaatgaatctgatccatccacgttttttgatatgaaagcaaagcatcgtctggtagatcaacatccattaaataaactggttgatctttttctacatgcttcacttcacggttagacttcaaacgatcaatcgtttcgttgacttcttgctctggcacttcaattacttctactttagtggaatatttggaatgccttgagggacttttggcttcaccatatgtaacaaggatacgctctgtttcttgatctgattgtgcttcagagactataggagccaaagggaataatagaataaaggacattaaaagaataatagttttacttttcagttgtgacacctcttccatgattgattgtcatacgcttttcacaagtttataacgaatctttcgacaaatcactagaatagtatcacattaacagtttgaaaaaaatggttttaagtggggataaagtctcgatatgttatgagattacttgtaaaaagaggggttatacacgttcatggagaaggttctgatgctgttgttgaagcgtttgaagtttttcctcgaggttatgctgttcttttctcatactccctatgatttggattaaactcgtaatcattgtttctacacgttcaattcgatcttcttgcaaattcgacacctccttttcattttcatcattttaccatataatggtcagtatcgatccgaaattctttcgacatttttatgttaggaaagtattttcaaaaactggcgattaaacgctataaattcgtccatatttcccaacctctaaactattctcttttctgagaatttttagtaaactgtaatcaaatagttctaggagaaaggaagcaaagaatgattggagcaaaaatccgatacttcaggcagatgaaaggcatcacacaagaacaactcgcttccggaatctgttctattccgtatttaagtaaaattgaacacggtcttgcccagccaagtgaagaacttgttggacatctttgcaaagagttaggcgtttccctagatcaggttgatgacgaggataaaatgaacaaacttcacaatgatctagactcctggtataaagaaatgcgtctaagaaactttgaagaagttgttagttacaaaaacctgatagacgaagaaattgatggtgtagaagatcctgatatgctcacaaaatatctactcttaacatttagataccatattttatttagagaaactgataaagcgaatgatattttagagagattatatcatgtacaggaaaggctttctgaaaatcttgagtacttttatttttactttcttggactgtactactatcaaaatcgaaagttccgtgaagccggtgaaaagtacaaaaaagcaaataaacttttaatgtctatgaaatcgaataatgccgaatgggctgaattttattatcaacaagcacttgtccacaatcgtcttagtcaaattacactttcaaacaatttagcgattaagtgtcttgatttatttaacaaagagtacaacttcaaacgcgctgctgatacagaaattcttctaggtgttaataatagagttatcttaaactatggagaagcagaacaccattttcaaaatgcattaaagtacgctgaatcctttaatgataaacgacttaaaagcatcatatatcatgatctaggctatgtttattcttgtcaaaatgaatctaaagtagctctagagtactaccactctggtcttcaaaataatgaagatcacgaaatagaagatcgagcaaaaacagtttatcttattgctacagagtaccttaaaataaatgatacaaaattagccaaacactggattgaagaaggtatgagaattgttaagaagaccgaatttcttgaatatatataccactacaatatccttgaattaaaactcaatgatattgaagatgaatatacagagttggctttaaaagatgctgttaactatttcaaagaaaaaaattattggaattatgtatctgaatatggggaaatgctggctgattactattttaatagtggtcaatataaaaactccagcttttactttaaactagccaatgatgctagaaaaaaaattatgaattagaaaggaagaaaatctatgaaaaaatttcttattaacatgctattagttactggtgttgttggaatggttattgtacctaatcatgataaggtgccagattctcatgacaaagtacctgactcaagcccatcaaaaactgaaattcatatgtaataatcggaacccggcttattttagccgggtttttatttgctccgactccccccacaacgctatactaaacatagtttaactagaataggagtgtgctgagatggctttttatatgtttgatgtcgacggtgttttaacagatgaaaatgctagacctgatgaagatgttgtgaaaatgattgaacaattagcaaaagatgagcacatcctatcttttgtgaccggccgatcaagaggctggctttctgatcatctctttccactctttgatgatgacattgactggtcttccctttattgcgtatctgaacacggtgctattaaaggacgtggaacagatatttcttcatgggatctagatgaagaatatgtgatcgctgatgaagtaaaagacaagttatacaaagtgagtcaaaaagagaagtatgaaggtctgattcaatgggaccaaacgaaagaatccatgggtacggttgaggccgttcacggtgatcctggagataaggaacatttaaagaaaacacgcgaatcgcttcaggaatacgcagatgacgtacaatcgatttcttctgaatcgggtaataaaaccgctgtatctacttatggggttgatgtcattcatcccgatttatccaagaaaattggagctacgtggatacttgatgaaattcaatctgctgaggaagtatttgtttttggagatagtagtggtgatatggtgatggctgttactgcaagagaacatggattagagaacattacgttttattgggttggcgaaggtgagacgccagaggaagaaaatatcacctctatttcaagtgaagcttcctattcagagggaacgaaagagatattagaaaagcacattggctaatccaatgtgcttttttctgtattaaactagttcaactggccgattttgtttaatcgactcatagcaagcttcaatagcttttaagttatttactgtcgcctcacctgagtaagacggcgtttgattgttttgaacgcagtgtgcgaagtgttctaccatgagcgtatactgctcgccttcagccgtttcttctctcaccttgccttcgctattcttaatttgaatcgaaccattcgctcctggagcgtcaggacggtaagcgaacggtaggcgaatgctaccttttgtaccaagaatctcataagaattgctcatctgacgttcgaaactacaatcaaacgaagcggtaacgccgttcgcaaatgtaaagatgcctgatgcggagaggtcaactccaccaccttccggaatagctgcttcagcatacaccttaagtggttcattgccaaggatgaagcgagacgaatgaatgcaataacatcccacgtcccaaatgcttcccccacctaattcactgctgaggcgaatgttatttggtttgtctccaaggtagaatgaaaaattcgctcgcatgtgcttcacatcaccaatttcacctgacgcgatcacatcccttacaacttcgtgctgagggtggaattgatacataaaggcttccatgaatataacaccattttcttcacaagcttccaccatctccattgcgtcacgagccgtaatcgccgctggtttttcacaaaggacgtgtttccctttcttggcagctgcaatggtccactttttgtgaagcgtgtttggcagtggaatatagaccgcatcaattgattcatcttccaacatcgcttcatagctatcatgataatgtggaatgctcatttcttctgcaaattctttggcttttccgctaccactagctacactaataacttcagcacctgtagcattttggatcgcaggtataacggcttttcttgcaatattcgccgtacccattattccaaatctcaatcccatttcatgcacttcccttctatgtattcattacccattttaccattctgtcgagttaacttccctgatgatgtttccatatttacctttcatctacccccaacgtaacatgctataaaccgaaacattaagtaatccctttaatccccccttttgattataaggaaaacaagagccgccctcgaccgagggcggctcttttcatcaatcaacaaatcttcgaatcacttccatgagttctggacgaatacttttctccaaatccataagttgagattgattgcggtattttttttcaatgatatcgcgctgtttactattttcaagcatccaatgcaaccatttttgatcagctgtttcggtgaatagctcatcattttcatattttccatgcaaatctcttaacaattgccccatatttttttcagggtgctcattccaataagttcttaacgcatcagaaagaatttcaatttccttttttccatgcattcaaccacatccttatctataacgatttttctattatatgaactaatgatcctttgaaattttgatcattagcgagataaatgaaagccattttaattataataacacaaaaccacctctctttttatgagaggtggttaaagattattttgagagtttacttacggtttcttcaactggtttactaatggctgcctcgccacccaggaagtagtattccctgctcattgaggtctctacgtactgctcagcctcataggaaagtgaactttgttttgttaaaataaccggagcacccatagcagcagcataaggggatccaggaagagcatcaataaacacatctccattcgcaaagaaaacacttttgttttcgaaagcaaaggtttcagcgattttcacgcttgtttcatagcgattacttccagctacgcgcttaactgttgaagtgctattaagtttatcttctaccatacttgatacagcattctctcctccaatgatggtagctgcaactggttgtacggtagtaatgtgagctgatgtagcttcacttaatttcttactgttcgttaacaatataggaatttgtttagacgcggcgtatggcgcgattgaaagagcatcaggtgaagtatcatctccagttgtaacaatcacctggttgctgttcccaacttcctcagcgacagcgattgacgtttcatatcgattatcgccactaattctttcaacatctgaaagataaccttttgtcgacagctggttaactactgtctccgaaatcgctgctggtccgccaagaatatatattttttctggctgtaatcgattgatctcgtcttcaacgactgacggaagttcatcactcttcgttaaaaggagtggggcattgtactttttagccaaaacactacctgtaagagcatcgacagaaagatcccctcttcccagaacaaccacatctgaagattccttccagccgttttgagaaattgccacgctcgtttcataacggttgtttccagcaagtcttgtaatcaaatctgattcagtagacttaactaaatccgttattggataatagaatgatagaatttgatcaaaattgcgcccctctttagactgctgataggctccatactgactcataccgattccatgcccaaaaccgcttccagaaacaacgaaagaatccttcgtatctttaatctcttttacgtacggacttttcataatggtcgtaccaatcataaatcgaatattataggaggtatcttcaattttcattgtttgggttttgatctgaccatttgaatttttcacaaaaccatctttcgtttttaaaaagtagtcaaattctacactacctcttaacacttgatcagattgaaatggtggaacagtaaattcaacatgcttaatattcgtgatttttatttcatcagatgacttaacttttccttttgaaacaagccatgatttcatatttttgatttctattacatttgaacttaattctgacacgttcgaccaccatgattcaggctttttaaggtccaacttctctatatctatttgctgttttccaagcttgtaatcccagtagtcgtagcttgttatcattctttcatcgtaaggatcgactttcgtctgcaaatatgggatccagctactgccccaagaatttgtatttgacatcaccattccaccattcgtggaagaatagaaggcacctatgtaatctccatcaaacatcaatgcttctccggctgttgcatcaacagcttcattcgtcgtttgataccagtcatatcctttatatacttggctagactggctatccgtcaagttttcttttctaggaaatgcaaatgtcctcgctgcaaccgcctgtgcttttaaggcttccattccaccattcgttccccagtatgccggcatttcactaggcacaaccccttttaagtactcttccatcggaagcgtgttaaccgggcgaatgtatttcccctcaaccgtaaatttcatttcaccaagatactttttatcaccgatttcaacgaagctatccatcgcgttagtgattgttggtacaagcgtcatcgaactcccaaaattccttagctttgtgtttcctcgatagagcaccacatcgcctgattcggctttgacgctgtattcccccacatttgaactctcaatttcaatctcactaccttgaatttgataacttcctgttacattaaattttaaaaccgtcgtatcttttacatagtttactagtttgacggtaacggtttccccagatgcctgcacaccatgcatcgacaaagcaaatgctaaaatgccaatcaaaagtgacgtaaaaagtttcaaatcttttccccctaagattttttaagaaaatattagttctattctccctttttaacactttagcataaatttgacattaaaatagtcactctatgacgaatcttacaaaaataacatagaatacctataattactgtcgaaaaactaggtgttttttcctataaaagtacctaaaaactttacaattgctcataacaaaaagctcccgctatgcaagagcttttcgtaatcggcataaagaccatattttcatgagaataatactatgtagacaccccgttatatcaacgaatacgtctgttatgagcgctgtacgatttggcaaaaacgcttgtataaattcatctgtcacagcgatgacgctaacaatcagcaggacaagaagcgtcctaaaaacagagtctctcgctttaaataggtgaaataaaagtatagctaaaaagctgtaaacaaaaaaatgaccgatttttcgtataataaaatgagcaaaaccactttcgccattgtttagtaaacttattgttaacggaccatactgaagttctcttgcttggataacttgcgcgagtcccttaacgataatcggagcaggttcttgccctagtaacgtaagcgaagcgatacacgaaagaacaaatccgataacgagccagcactggatactcaccattacgattgtacgagaaacagccatatcctccgcctccttttcaagcacgttacagtatcgcctgaattgaagtcacttatacagctgcttccgccattttctttaactccatagctcttttttctagtaaatttttcatataatttttaagaaagagtacgttagcaatgttacccaaaataccaaaaggcgctttatatacaaattgatcaaccattaacgttacaccattcagatcttcaaatcgatgggtatgaacaaatgatttaaatgcaccttttgtcatttcgtcaataaaccagtcgggttcattcatccctgtaattttagctgttaaccgttgcttcattccaaaatgagtggcttcccatgtaactgtatcccctgcctgcatcaagccttctgttactccgtcaatcgctttttcttttgtttgttctgtacttttcatatgtgcatcgacatttcttgcataatcaaaacacgtttgaataggggcgtcgatgagcgtttctaaatagatcacaggcattgcgaacgtctccctccaacttttaacctaattaataacctaatttattgaaaaaaagtaggtcataacgattatttcttaaaaatcgacaaattatcctaaattcgttataactttcaaccgataacttaattaaacagttctattacgtagtctactttattttcctaatactttgtagagataacagagggcggttcatatgaaaaggcactggaaaacacctgaagaaattcaatatcaaaaaaacgcaaggaaaagatgcttttccttgccattcctttgttatcgattttataaggggtaagctttgctgttctaacgaatcgatgatgatattcagctttccttttttcttgatcgttttggagtttcagagtttgggatactctctttaggagtttgattattcgttaacgcagcgttcggttgtgctttgcgctttttcattaagaccaacctcccttccacctctagtcttgtctatcttgattttttcatgcgtaaatgggtaaaaaagcagctagtacttactgtaaaacgattcgtactttaatctaaacggttccatccgacattgggaaacctgctttacaaattcttaataaagagatgcatattatcagcattttcccaatatacacggtaaacagaataggttatacttagaattgaagtcatttttcgacaatttttactttttcatgacaccgtttaccttatgactacttataaatgttcgaatcgtacgagaatggcaaaatcactgaaaagtgatgacgcaaagctatagggacttcacggactgttaatccgacagtcagccagctgccgaatacggcctccgctgcgatttcagcaagaaccagggggagatttaattatgaaagaatcatggctaacgcctgaagaaatccaataccgtagacagcgtaaggagaagatgatttatcttttgctacccgtgtctgctatcgtcattggagcggctattgcctttctgacgcaaatgacttactaatcccgaaagaagagagcgatcgttctcttctttttattatgaaaaaaagataaccccatacaggttatctacttcgtgtgttcttgtttgaatttgatttatgtaagctttttacacccattaccagaaggcgaatggctaaatagacaaggaacaaaacgacaaatccctgcaatcctaccacggcatcggcaaactccatatttcctctgccagtgattttctgctgaatctcaatggcaaagacgatcacgagcactaccgttattgtatagatgaaagaaatagctgtgatgctccattttgaaagcaatcgaaataaaaattgaacaaccacaaatcctcccattcccattaaaccaatgacccagaaatggagatccttatcagtgaccgaaaaacccatcccgttcataataccaatgacaatgtcatgtagctcattaacaatcgccacaatcagcttaataaaatctcccatatcacacaatccttttcgagcaactttaatctagtcaaatcaaggaccagtgatcagcctctgtttatttaaatgccatgttaaaacaaaaattatttctttattgtttctgcactataaagataatcctcattatttgcagggatttttgtaagatcttttccgcaataaggacaaatccactctccttgataattactactatacgaaggcttttgacatttgtcacacgttttctccaccatcttatcactccattcaatcgcacttttaaaaaatgctagttgttatccttctaagcataccaacaaacatattttaccaaagtaaatgattttttcaagtattaatattctgaactcgagacatttaaccgtgtacatacaaaaaaataatgagataagcagcataagctgttaacctcattatttaatagaaaaagacatttttcgttgattcattgtaggacggccgattgacacatagtggatggggtgtttctctacttcatctaacgaataacaatttcgtccatctataataattggagaagccatccacttcacatagttacttaaatcgagtgtcttgatttcattccattcggttaagatcagcgccacgtctgcttcttctaacgcttcgattaacgaatcttgatagaggacatcttgtggtaaatgtttttttgcattcgtaatcgcaatcggatcataagcaacgatttcagcaccgtgcttctttaaagcatgcgcaatcagaatggacgctgcttcccgcatgtcgtcagtgttaggtttaaaagcgagacctagcagcgctactcttttcccttgtagtactcccactgcttcacgggttttttcaattaatttcttttgctgagtatgattcacttcaatcactgacttaagtaatttaaagttatggtgattgttaccagccaattgcacaagcgcattcgtatcttttggaaaacaggagccaccatagccaattcccgctttaagaaactgctcaccaattcgacgatcttttcccatgcctcgtgcaacatcttcaacgttggcccccaccttttcacaaattgcagaaatttcattgataaagctaatctttgtagcaagaaacgcgttggaggcatatttaatcatttcagcactattgagatctgtatgataaattgggatatgaaacggttcgttgatacgctcgagcacttttgctgcttcctgactatttgctccaatgacaatgcgatctccatggaacgtatctgtaacagctgaaccttcgcgaagaaattcgggatttgagacgatgtctactcttatctcgttcattgacatctcatcaattaatgctttaattcgggcatttgttccaacagggaccgtactttttgtgacgacaataatatcattttgggatgaagttgcaatatcgcaagcagcctgttcaatgtattgtaaatcagctgttccatcaggaagctggggagtccctacagcaatgtagatcacttctactccgtcaaaacccttctgatgagaagtcgtgaaatgaagccgatcctttcgcaaattctttctcatcatatcttctaagcgaggttcgtagattggtgaatggccatctgccatcatcgctactttcttatgatccatatcaatgcacgtcacgcaatgacctatttcagcaagactaacgcctgtgactaaaccgacatagccagcaccaattattgcgattttcatcacaaatctcctttgcattatgatttcctttttattataagtgggcacatatcatttcaggcctctttcacttgatcaacacaaaaagttaacattttttctataaaccactccctattatgcatgattttcggtatgatagggattaaattgcttaagaaagaaagtggaaaatagatgaaattcataacaaagaggaaattttcttttttggctattgcgatgatgatcattcttttcatatcttcccatacgccttatcaaaagcaggatatgaaaccgtttttcaaaggaatgatcacgattcaagaggaaaacttgcctccgattgtattcacttatgatggagcgcttgtcacaccgtcagctccttatgaatatgtcgagttttttcttagaaaaggtgcccatgttgcctcgttcgctctgctcgcttttttatgtatcatggcattaaaagaacataatcgaaaagcacctgttctctttggctcaggcatggcatttctttatgcgctttttgatgaatttcaccaaagtctcgttgcaggaagaactggtcatttaatcgatgtttttgtaccagacactttcggtattctaattaccttcatgctttttctgattttctcacgaacagaacacggtaaacagccccgccattgaacggcggggctgttccaatatcacaagctaaatatcctgtctcatttcagaaggctgagacttatcgtttacttgctcttcgttctccgtatctttccccattccttttaaaaaggtcatcagaatggtaagagatcggttaatttcaggatcctttaaggcacgaagcagatcaaggtaccctgtcttctccgttccctctgaatgctctgctacattctcaatccccgcattcacttttaataatatcggttccagatcctgcacgttaattttacccgctgccccaaaaaggagcataaggttttttaatgcagttgtattctcaggaacatttaataaatcaacgagaacttttaaaacgcgatctccttcgccaaatagaccatttagaagggtaagaataccacgttctttcattccaccaaccacatttaatgtttcaagaagggcatctttattttcaatcaacgcatcttcaatttccttgagatcattcgctcgcttctcttcttctgaaatttcaatccgcttaatttgtttaatggcttttgccataattaatgccctcctttttcaccatttctcctgggaatagataatcttttctagcccatttccgctcaaccatcacacctttttgcggctgtggatttccaaagcgatgattcaccttaggtaggggcgaagtgcctttatctttcaaaatctccatctttgctttcacttctttgtatacaggagtatccgtatctttatccgcataactactcgttaataaatttattgccgcatcttcctgatcatttagtggaatgtaaacttctttcccctgcacgcgatccgtcacaagacacttgattttcacggcgccgtacggtgaagacaatctcaccaacgttccgtcagttagccctctttcttctgccaattcaggagaaacttcaacgaacgtactcggtgttttcgctttaatgccttcgttttggtacgtcatatttccttcatggaaatgttccaacagacgaccgttattcacatgaagatcgtactgctcatcgtattcaattggtttcgtccactcaacagggaatagtcttgcttttccatctggaaacggaaaatcctctgtaaatagaagcggtgaatctgtgccatctgctgccactggccactgctgactcttataaccttcgagtcgctcataagaaacgcctgcaaacatatctgcgagttgaacagcttccgtcataatgtcactcggactgtcataatcccagcctgctcccatttcattagcaatctccataatgatttgccaatccggcttcgaatctccaagtggctctagcgcctgataaagacgttggaagcgacgttccgtgtttgtgaaggttccttccttctcaagactaggacttgcgggtaacaccacatctgcgaattgagccgtttttgtaaggaacagatcctggacaacgaagaattcaagcttctcaaaagcagcgtgaacatgattgatgtttgaatccacgattcccatgtcttctccttttaagtacattgcttttagtttcccttcatgaatgtgttcaaccatttcatgattatttaagccgatttcttcagggagtggcgtaccccatgctttttcatatttatcacgaacttttttatctgtcacattctcataaccaggcattttatccggcatgcttccaaaatcacttgcaccctgaacgttattatgtccgcgtagtggataagcacctgtaccaggctttccatagttacctgtaacaagaaggaggtttgaaatcgctgtactcgtatcagagccaccgccatgctgtgttacacccatcgcccaaagcgcaaccgttgtcttggcttcgtgaatcatttccgcgatttgaattaattccgactcttcgatcccggttacttcagatgcatagctcattgtatatttctcaagactagcaatataatcatcaagaccattaacgcgatcttttaagaaagcttcatctgcccagccttgatcaataatatatttcgttacagcagagagccagacaagatcggaacctgaagatggacgaatgaagagatcagatcgctcggccatttcatgttttcgaaggtcggaaacaatgagcttctgaccgtacaatttgttcgcacgcttcacgcgcgttgaaaggactggatgagattccgatgtatttgatccgatgacaataacaagctcagacatttcgatatctttaatcgacccagcatcaccaccgtgtccaacagtacggaataacccaactgttgccggcgtttggcaatagcgcgagcagttatcgatgttgttcgtaccgatcacgcttcttccaaacttctgcattaagtaggattcctcattcgtacacttagatgaactaataaaagaaagagcattagccccatgattttccttcacatcagaaaacttttgactaatcaatttcagtgcttcttcccattccgcttctctaaatgaatccccttcacgaatcaatggctttgttaaacgttcttcactgttcacataatcccagccaaatttccctttgatacacgtggagattccattagcaggggcttctacctgtggctcaacttttaaaatatctcgcccttttgtccaaacatcgaagctacagccaacaccacagtaggtgcaaacggtttttgttttcttaatctcattttcacgcatcgcagattccatatcagagatggcaagaatcgaattatagccagtttcgacatttttcgttagctcgatcatcggacgaagcgtatcctgttgaatgctcgttaataatccagcttctccttccatccccttttccatcatcgcattacacggacaaactgttgagcaatggccacaagaaacacaagaagattcgtcaatgggaacatcattgtcccaaataacgcgtgggcgttctctctcccagtcaatcgttaacgtttctgtcacttgaacatcctgacatgcttcgacgcagcgtccgcaaaggatacattgatctggatcatagcgatagaaagaattcgagttatccactgggtccggtttgtgttcgaacggaatcgcctggtgattcattttcatttgtttcacagtattatgtacttcacatgtgccgttattgtaatcacaaactgtgcaatagagctcatgattgtgaaggatgcgatccatggcgatcgattgcgcttctttcacgtgcgtggctgttgtattgatgctatcaccatttgaaatagatgttgaacaccctctaacaatttcaccgttcacttccaccatacaagtatcacatgtttcaattgcccctagacttggatggtagcatacgctaggcaaatccaggctattttcattaagtgcttcaagcacgcttttttcacttgatacggctacgctctctccgttaatcgttacgtggatggaatccgacaactgacatcaccctttttattatttttcaaatgatctactagttccaataccctaaattaaattagcttagacactattctgaaaaaaattaacacttcaaaaaaagatattctctttacatcttttctccatttctatataaaaaaacggtcagctccttatccgctgacccgctcttctaaatttttcactccgacgcttacgttaagcgtttgagcaccgccgatatagaccccttttaacggagaaatatcgcgatagtctcgtcctactgctatgcgaatatgctgctctctagcaatcgcattattcgttggatcgagtccaatccatgctaatcccggaactttcacctcaacccacgcatgcgttgctgcatcgccgcgataagctgagttttctccgatgtaaatgtacccactcacatagcgtgctggaatccctcgatgccgacagagagcaagcattaaatgggtgtaatcctgacaaaccccagtacgatgagttaagattttttcagctgttgtttccacgttcgttgctccagacacatactccattgtgttataaatatgctcatttaactttactgcaaaatcaagttcatctcgcgcattagcccagagttcttgcgtttcctcttccattacatgctttgaaatcgtcgtataatccgtctcaatcatatattcggtataagcctgtttaaacgattctgaatgaagctccgttcgctgattattcgtcaatggtaacgtaacatctaagcgtagcggatgaacttcaaccgttgaaacggtttcaatctcaagatcttgatgctcgccccaaaggtagaacgtctcgacatagttgccccaataatccgtatgcccgtaagttttgctatcaggttgaatgcaaacgcgataatcatgaagcgtttgctgcacatcatgaaggggtcgcaatctaaactgattaatactctgtcttactggcaactcatattcataagtgttcgtttgggtaacttcgtatttcatggtatcacaacttcccccaggtaataggttttcgtaatgtgcatgccgatcgtcatacagcggtgttgaaaactttgaagaaacgcatgggcaccttgattgagaatttcttcaatcgaaaaatcatacaagtcattggcaagatgttcgagctcttgtgcaagtgactcggaataatgttcaacatgaccatcttcgagcgctacgaaagcatttcgtactttttgaacacagtacatcattgaccttggaaattcagcatttaaaatgaaaaactcagcaacattccgactcttaatcaacggacgatacgttttaatataagcttcgtgcccactaaccgactgaagaacagaccaccagtgatgatactctacaatttctttgttctgatagcactctaaatctttatgataatatacatctaggatgcgggcagctttttcagccctttccaggtgtttacccatttccatgaaaaggtaagcatcccctcgtggcattgtcgcttcaacaataccttgaaagagaagagaatccttttttacaaactcacaaatgtcactaacttcttccattgtccagggggtatgactctgcttctttaatttcaaataatatgaattgatgctctcccataattcattcggaataatttctcgaacggctctagcattttctcttgcgatcgtaattgtatttagaatagaattagggttttttaatgagaacaataaaaactccatcacatttcgatccattggatgttgatattcctcatcaaaaacctctttaaatccgctaatttcaataagctcataccagttttgattcgtttcatcaatcggattagcattttcaagacggctcgttaatttaaccgctattaatcgcgcattattttctgctctttccacattccgggttaaccaatacagtgaatcagctactctgcttagcatcgacagcgctccccttttaaatatgaattggattttcttcaagcacccatgtatctttcgcgcccccaccttgcgaggaattgacgacaagggaaccttcttttagcgcgacacgtgttaagcccccagggaaaacgtgcgtcttttctcctccaaaaataaaaacgcgaagatcaacgtgacatgcggcaaagcggtcttctttaaaagccggcaagcgagatagcttgattgttggctgagcgataaattcggatgggtttttaagaatttgttgccgatatgcttcaatttcttccttagaagcatgagggccgattagcatattgtagccacctgaagcgttcgtgtgttttacgactagctctgaaagatgatcgaggacatattctagctgatcgtcatatcgtaaaagatatgtatcaacgtttttgactagtggctcttcctttaagtaataacgaatcatgtcaggaacaaaatgatagatcgctttatcatcagcaaccccgttgccaattccatttaaaatcgatacatttcctgcacgatagacgtcgatcaagcccggcacgccaagtaaggaatcttcacgaaattcaagtggatccagaaactcatcatcgatccgtcgataaataacatcaacttttttcaaccctcgagcggttttcatatagacttgtcgttcccttacaacaagatctcttccctcaacaagctcaataccagttcgctgagcgataaaagaatgatcatagtaagctgaattatgaacgccaggtgttaagaggacaattgtcggtgatgaactgccttctggagcaagtgaagccatcgcagaatgaagataggaaaactgctgttcaagagactgaacagaatattgattaaaaaattcaggatacacttttctcatgacataacgattttgaaaaacataggagaggcccgaggggttacgaaggttatcttctaaaacgcgatactcgccgttatcgtctcgaattaaatcaatgcccgccataaaaatgtgctgccttcttggaagatcgatccctgctacttgctgaaagaaatgctggcaatttacgacgagatcacggggaataatgccttcttttaggatgttttgttcgtgatacacatcatctagaaaagcatttaaggcgtcgaagcgttgcataagacctcgctcaagctcctgccattcatctggtggaataatctttggtacaaaatcgaacggcatcgttcgttccgttccttcgttatcgctataaaccgtaaatgtaatgccctgcctaagaaaatcactttgcgctaattcatagcgcgattgcaattcttccggcgccacttcgattaatttttcatggaacggtttgcaatgtcctctcggcttcttgccttcctgaagcatttcgtcaaaataaccatctacatgataagaatgaaacatcggcactccccctccatttaagtacgttcacatattaattttaccatttttctaactattctaacaaatttcaagataaaaaggcgaaattcctctatttgtgggaagaacctctatttttataaagcaaaaaagaacagcataagctgctctttcaggcgctatccttttactgaccctgcaagtaatcctttcacaaaaaactttccgagaaaaatgtacacgagaagagtaggaagtgcggctagtagcgcccctgccatttggacgttccattgcacaatttggcttccggataaattctgtagcgcaaccattacgggctgctgatccgatgtcgtaatcgttacggcaaataagaattcattccaaatattcgtaaactgccagatcgctacaaccacaaagcctgtaatcgataggggaatcataataaaacggtagacccctagaaatccagcaccatcgattttcgcggattcaatcattgaatccggaatgcttgcatagaagtttcgaaacataagtgttgtaatcgggatgccatacacaacgtgaacaaacacaagtcctgtgattgaattatacaatccgatttctctcagaaactgaattagcgggataaggatactctgataagggataaacatgccaaataaaataacagtaaacagtgtattggcgcctttgaacttccattttgataggacatacccgttcaatgaacctaagagagctgaaagaagcgtggccggtatgacgagataaaaactatttaatagattaggtgctagtttcgtaaatgcctcggaatagctactaaaatctaaagatgttggcagctgccacatttgacttaatgtgacttcttcaagtggcttcagactcgtaatgatcatcacatatacaggcataaggtaaaaacaagaaagtgcaataagtagaacgtagagaatgggacgtgtgaacgatcgtatagccactaggcttcccccttccgactcgaccagaggtaaggaacgataaagattgcgacggccaagagcatgacgacggcaatcgctgcgccgttcgcgtaataatttcctctgaacgtcgtttcatacatatacacaccaggtacgtcggtgacaaagtttgcacccggccccgtcatcgcataaatcaaatcgaaaattttaagcgaaatgtgagccatgataataatcacgctaacggtaattggacgaaggattggcataatgattttccaatacacctgaaattcatttgcaccatccatccgagccgcttcccttacttcttccggtacgcctcttaacccagcaaggtacatagctactgaaaaaccggtcatttgccagacggccgcaatgacaacagcgatcatcgcgatcgggattccaaattcaattttcccccagccaatcgcagggaaaatcgttgtatcggtataccacttagaatcgagaccaagtttgccaaggaataaattaacccctgtggaaggattcaatagccactgccatacaacccctgtgactacaaaagaaagcgccattggaaagaaaaaaatgttccgaaacagcgactcttgctggatcttttggtctaaaagaacagccagaaactgacccaccacgatcacggctaaaataaacatgacggtaaaaaagagcgtatttcgtaagtcagcttgaaagcgaaaatcactaaacagataaagataatttttcaatccgacaaaagaaaagtctgggactagcgaattccaattgcttaatgatacgtagcccgtccatccgataaagccataaacaaaaacaccaactaaaagaaccgatggaataagaaagccgatcgcaagcatatggtcctttgtaagcgaccgtttttttcgcgttgatactgtgaccgatctcatcgctgtttctgtcttcatcatcatcccccttaccattcaaaaagggagaagagccattcttctccctactcattttacttaagatcaccagaagcatcttcaagggtaccaatcaattgatcaacatcctgctgcgtcacaaaaatattaatcgcctggtttacttttgtaacaaaaccttcaggtgcagccgatccgtgtgcaagactcggtgcgagactcgcactcttgaaatcttcaatcgtttcttttccatattcatcatagtttgatagatcagcatcaacacgagctggaatggaaccttttaaaggattaaacgcatcctgtccttcaacagagccaagaacagataaaaatttcttaacgtcttcagggtttgatacgccctttggcaaaccaaacgtatcggtaatcaccataaacattccttcagtacctggcgttgccacccaaccaaagtcctcttttactttcaaattaagatcgttcacaaagtaacccttagcccaatctcccattacgttcatcgcggcttctccatctgcgacgagctgtgaagcatcttgccagttacgagagctatggtcttcgtttacgtagcttagcatctttttataattctcagccgcttctttcactttaggatcactaaacgacagttcgcctgtgaaaagctttttgtaatcatcagccccaagtgtgcctaataacgctgtttcaaaaagatgcgttgctgtccagggttctttgtcaccaagtgcaagtggcgtaacgcctgcttcctgtagctgatccgctgcagtaaaaaactcatcgaacgtagtcggcggctcaacgccattttcttcaaaaacgctcgtgttataccagagaacgtttccacgatgaatattaactggaacggagtaaatgtcgccatctttactaacaagatcaattaaatcttctggaaacttattttcccaaccttctgactcataaaggtcgttaagcgtttccatttttccagctgcaacccaaccgtcatttaactcagaaccaccatgaacttgaaacgttgcaggaggatcgtcaccctgcatgcgacttgctagtacagcctttgcattcgttcctgcaccgccagcaacggctgcgttttctacctcaatatcagggtattcttctttaaataaatcaataagcgcattcaatccatcttcttccccagcacctgtccaccagctgaaaatatcaagcgtttcttcgttacttgatccgctactgccgtttgtttccccagaactggaacaagcagaaagtggtacaagagctaacactagaattaaaaaccaaccggtaaatgatttaagccttcccttcatacgatcgatccccccatatcttttgttattcttactctatcaaaataaatccttacaaatttatgtaagcgccttcatatttttgtggttaccttcacttttttgtggtcgttttcataagctagtacaagacaaatgaaagaagggtcttctcatccaaagagagaatgataagataagcagatatttctgttcgatcgaggtgaaagtgaagtgaaattatccgaattagatccagacactctctcaagagaagaaattacaacattaatgtttcatgacaccatagatgattatcaaaccggtgaatgtattcttgtgtttggtgccaaaacgattcaccgcgtcattaaagcagcagacctctatcatgataagcgcgcccctaaaattcttgtttctggatccgcagcaagatggggggaaaatgaagaacctgaagccatatggatgagagatcggttagtcgagcttggtgtaccacctgaagatatccttctggagcttgaagccgcaaatacaacagagaatgtactcgcctcgctcatggtgctacaacgctctattggacttaaccgaatcaatcgactcctgatcgtcagctctccctatcatatgaaaaggtgccacctcacacttacaacgtatatgccagactggatctcctatagtttttgtagtgacgatcgagaatcaggacagcgaaacaactggtggaaagatgaacgagagaaggcacgagtgatgaaagaactccagtcgattcagcggtatgtaaaggacggtattttaaaagatggggatgtgcgcagataaacaaggatagaattcgattatttccgtcaatagctaaatgcccagccacatattggctgggcattttttattgaagaatcatcttcacattaagtgattttatgacatttataaagcaggagaaatgcttgtctgtgcacaatttctcttaaaaaacgccatggaagcaacattaaattctctaggtttttcaacattacaaacgtgaccacactgctctaaaattaaatggcttgcctgttcatcacttctagtatcttctagcaaaggcatcagaaaaaggtgatcctgttctcctgaaatgtatagtttcgggatgtttccactattttcttggacatccaaataagtttcttttacgtgaggagccagtttataccacgcaagaaaatcgcttcgattcattttcagggcttctctaataaagagcgttcgtgaacgcgcatgattcgattttggcatcatcacataagcaaacaatttgtataaccacatatacggaataaaagatttcactgcatttccagccaaaagtaagaaggaagctaatggattgaatcgcgtaatcgctcctccaagcacagcactttgaacacgttcaggtgcctgttgcagcaagtgatgcaccgcaactgaacctagtgaaatgcccactaaatgagctttcgtaatcttcaattgatcgagaagagcgagaatttcattagcaattaattcactagtaaaaggcttatcatagctagatgtactaggtgattggccatgacctggtaagtttatcgctaacacatgatacttctttttgtatgtccctatttggttacagaaaatcccatagtttcctccaagaccatgtagcaacacgatcgtttcactgccactggacttgtttttgtaaagcttataatcaagcatgatgataattcctctctgtttaagggatgttgcgtcccatagttgggtctcaggacagtataactttagaatggtggataaggaaataggtaaatgggtaatgacaagaatccgtcaataacttgctaccaatcaacgagaagacgctaagcacccaattccctttctatactagtttcataccaacaacttctcacgatattgcgaaggcgacaaaccggcttttcgtttaaatactcgactaaaataattcggatctttatatccaacgttgaaacaaatttcttttaaacttttggaggcatccagcatttctcgttttgcttcaccgatccgaacttctgtaacgtaatcaataaatgtcatgccactcttatctttaaataatttacttacgtaataggggctaagttctacgtgctccgctgcttcttcaagggtgagctgtttatgaaaatgagctcgaatgtattgctttacctgttcaagacgatccccaccatggagcgcacgccattcaaggacatgctcacttaacttccgtagcttttctctcgccaggttggtagcttcatactcatcttccgcacggatgtatgtataagaagataagacaattccattgttttgaagaatacgttcagcgacaagaaaaagttcattcagtttttgaacataagtggaagttggttcaactgaaatcatttctaaatacacatcaagttctttcatcgctcttgtgaagtcaccattgttgatcgcattaatcacaaacgactcctgctcctgtgtgcgatcatgccgaggtacgttagcacttttcccttcatgataaaaggcataagtgacatcttgttcaacatccagatcacgaacagtatgaagagcttcccgataagatgcgacaaattgctcagcttccttatatggcctccctaccccaatacaaactgctaccccaaaatgctgattgaattcatgaagaaggtttcgtaacataggctgtaatttcgcctttagctgcttgtctttctcctgaaggctgtcactaaaaagaaagcagggtaaatagtattcatctcttactccaattaaagcctccccagggagggtacttttcactttctgtttgatccactgaaccatttcattgaagcgatccagtttatttggaaatttaaaaacaatggcataacctgctgtcgtttgaaagccaagcagttcgctccattcagcaggactgaactctgttacttgattcattaagatcgcattcatccactcaccttcaagtaagtgaacggcttttgcaagctgcgcttgaacgtgatctttttttgcagcttcttctcgctctatttcaagttctgttgagacgcgtgtgagggcagctaaaatttccttcttacgccctggcttcagcaaatattctttcaccccttgctgcatcacgtctcttgcatagttaaatgtgtcaaaagcagaaagcataataaatcgaatgttcggatggtagctcttaatcgttctaactgcctctaccccatcgaccccgggcattttaatgtccataaaaacaatatgcggttgaaattcgcctacaaatgaaatcgcttctctcccatttttcgcttttaatagttttaccttgtcgccatattctcgtgttatcatcatttcgattgcatcccgctctagctgctcgtcatcgacaatcatgattttaagcaaattgttcatctcctttttgctttctataaggtaaattcagtctaaccgttgttccaacttctttagaagaatgaacggtcatggaaccggcctgctgggagaacaattcgattcgtttcttcacattttgcatgccaagacccgtggaatgtccctgtctattctcaataagcgaatgttcatcattggaaaataattgtgacagccttgtcgtttccattcctactccgttgtcggccacctcaataatgacatcgtcttgttccgcataaatgcgaatgataatttcaccgccctcttcatacgtttccacaccgtgtataaaagcattttcaacaatcggctgaagcgttagcacagggattttgcagtccagaacgttctcgtctgcgatcacatcaaatttcactcgttccccaaaccgcgacttctgaataaaaaaatattccctcacaatcgttaattcgtcttttaatgtcacatcttttgctagattaccaagattgtaacgtagaagagccgctaccgattcaatgagctcgctcgtttgttcagccccttcaatataagcacgtcttgaaatcgtattaagagtattaaaaagaaagtgaggattcatctgactttgaagactttttaactccatttctttcaaaaggtgatcgagctctgatttttgcttcatttcgataatcaatccttgtatattttcctgcatgcgataaaaggtttctgccaacaaccgcagttcacttctcgactttacgacaactttatttgccgtaaaatctccctttgctagttttttagccgcagccgcaagttcatgaatcggttttgtaataccgcgcgaaaaccagaaagccattaagaggctaaataaaatcatggaaacaaataatgaaatccccatccactgaagatatgaacttttttgatccatttcattgtaaaaggtgcggtaatccgttaattcagaattaataagcgttaaggttgtttcctgaataaaggcagagatttgcgccgcttcgtttaagtgacctgaatattgattaatttcctgcctctgaaaagcttgcactgtaatgtcgcattcaagtaaaaagctctcgatcatgttttcataatttgtgacgatttgatcgtttccttcatttttcactgtatcgaggagctcttccttttcttgcgaaagaatttttcgctcagtggcataagcggttaattctgcttgcgttcgtgccgttaaatacgtattcatcgcttcatagaccgtattcgtttgttgcgagatttcatttaagacgataaaccgctcaaaactcgtgtgataatcatcaatcgtacgctgactactatgaaacaaataaaacgcgacaccgttcatcaaaataacaagcaatgtaaaaaagagaataaatctcgcttgaattttcattgttgtttcatccctcccggcgtcattgtttctgtttgagtcaagtctttctgccgcactacatccgtcatcgtgtggtgataggtggaaaccttttcaccttcaagcacttgaatcatcaattctaccgcgtcgtatcccatctcatatggtttttgttcaacagtcgcttcaagcttcccatctttaagaagttgaagtgtttctgggagaacatcaaacccaatcacatagacgcgatcagtcatgccaatgctttcaagaacttgaacgatgccgatcgcatcaagggcactcgttccgtaaaaggcattaacgtcagggtaatctttaatcatctcatacgttttttcagctgcttgtattcgtgtaatttgagattcatcgatagcaactacgttcacgcgatcgctacctttaattgcatctttaaatccctcgacccgaagtttttgattcgctgagtcaaaccggcccgtaatgatgccaaccttcacttcaccttctgtatcttttagtaacgcttgtccggcgagaaatccggcatagtaattatccgttccaacgtacgccactcgcttactttcaggagcatccgtatccacagttagaaaaggaatacctttttctgatacgcgattaatgagcgccggtgacacttcttgattcaatccctgcgcgatgattccatccacttttgatgcagccgccatttcaatcatttttatatgttcatctaggttagcttgtttggggccggtatactgtaacgaaacattgtacttctccgctgcagcgcgtgctcctttttctacaagtcgccagtaatcattatcaacctcttccgtaacaagaacgaaacgataatccggagctttataagaggcagaagggcggtctggagttaaattgaaagcccttacagaatagaatagaaaaaaagaaaatgttaccgttactagcaaaccaccaatcacgtatatccagcgcgccattgatttacctcctttttggggtcaggttcgttaccggtgacgtcaccggtaacgaacctgaccccctcaacagacacatgtcctccctcagaggacttcccttatgtcattatatatcgaacgctccacggggaatcaacttgtttttttgataagctaaaaaagactgtcccccaaacggtgatcaaccccccgttcagcgagacagcttttttcaattaacgccattgtttccattttgctataagctgttgcttcttcacttgtaacagcgtatctccttcttcgtttttattttgcttctgccactcgtagaaactggctacagaaatcaaagtggcacctgcgattaacaggtaagcccaccacggcatgttgccccagtaaggccttgtttgcaagagaagatttaagagaagcacgctacatccgatcaagaagtaagatttgatacgatagtaaaagcctgcaacaaccgaagcaagggaaagccctccagcaatgagcgcatcataaatggtattactactaagcgcatcgaatacaagaattgccgctacggccaaaagaacgccccattcgataacactcataatttgtttgctttgaacccacgtccgttttgataaataaatacttagcgcaagccacggcaatacatacacttccgtcacaatgtatgcgttgatttcaaggtgatgaagaagcgtgtaatacgggacaaatagcgagagagccgcagcggttttcaccacttgtgcaggaactccacctggaaccctttttatttgtaaaaagaaaaaggcaacgataaagagagctcttagctcatccgcccaaagagaggcaagcgtcaggttttgatataggtttagcacgaataaaaaggcaataccagcgtaccaatcgatatgcttttcattcattcgctttgcccgaagagaatagagcgttcgatgaataaagagtccagccgttagcataacggcagctgcgccaacgtataccatcgtttgaatctcaatcgtctcgattggcagaaggaagatcatcgattgaacaaaaagaagcggaacaatcgagaacagctgccaaccggattgatgcatcacgtaaagaagcagagcggcataaaagagaccagcggctaaaggtatcaactgaatttcctcgtacgcgttgataaaagggaaaagtccaagtacggcaaacggcaccgcataccatttaattcgttctttccatatctcaccaagaacaaaccataaaccaaacataattaaactcggtacaaaccctatatacgtatacgcctcgttttgcatttctaacgaatcaatgatcgcgatataaagaaaaggaagaaccgtaaacgcagcatataaaaaggtgcgaatttcccattcgattttcttcgtcaacattgaataaacatagacgaaaagcgcgacgacgtataaaaccggctcgtttccatgctcagaaacggtataaaagagagcggcgggtaaataaagatgacccagatagaagtaagcacgctgcatcacgctatctttttttccaagcgtatcggcaatcaagatcaggagaactgctcctgggagccactggaacatcccttgaatagggaaagcttccgcaatcgaaagataggttcctagtgtaaaaagactaagtagcggccataacgtttcttctttcgtacgcttaaaaataagataaagcatcccaacgctaccgagcaacagtcctgaacgaacaaacaattcatctaccgtcgctgcaagtaagagaagtaacgatagtccataaaagctgacacccgtccaaaaggccatcacttccaatacttgcatacctttttttcgccaaaaatagtgaactccgaggatcaagatcgctacgattgctgtatgatacggcgcaccaaaagtagtttcataaaaatcgcctctcgcaaatgggggatagagcgcaagtaatgcgagtccccacgtaactggattcattagcgagccagtaaagcgaagccatttccacttccctttttgataaattgataaatgcaaaaagccgagtacgagtaataagctactttccagccaccatcgaccactaatgagcccaagtaaaagtgacaagaggatgggtccaaacgaaatagcgagtgcccccgttttcattctctttgttactttccaatcattccagtagaaaccacctgcatataagaggacccctgttgcaaacatgtggaccatcaccgtttcggttgagggttccgtatacaataagatcatcgagtaaaggccagctgcagcaagaaataacggcgccaaaaatccaaagatccggtaacgcgttaaattcgcaagagcgacataattggtgctaatgatcacataaccgagtacaagaagccacgacggatcatcataacgtaagattaatcctttatacgtaataaagataaaggcgcagagcgatacggcgccactcgttaactgaaacgcttttttcatatatggattttgcaaacggtccaccgactgtagtccaataaaaataaaccctacaagcgcatatagcataacgtctgccgactcaaggacagaatgctcaattagctgatagattccatatacgagcaaaaacgtaaacacgaaatgatattctttttgtttgccaatatagatcatggcaagatacagaaatgccgtcacaatgacattgaaactataaaaaacttcactttcgtaaaagaacaggagaagcaaggttgagagaatgagattcccctgcgcataaatcggaagttctttcgtgaaaagaacgaggtgctcatacttctttgctcgtgcataaaagagcagcaatagtccattaaagatcacaattccaagataaaacagatccactgtcggctgaaacacttgaataaaaaaagctgcgccgatgctcaacgtcacaaatgaaaaccaaacaaataaccgcgattgctgacgcttagcttggataaaataaagcggtaaacaaataaatacaccaatcaaaccaagtacttcatttcccgcgccgctgacggatagccattcaccaaagagctgaaagtatcctgctgaaaaaacaacgatcgggagaaaaagacttccaagaactaaaaatgaaaaagccgttttttcgatacggagcttatgtccacttagccagctgattccaaaaaacacagctgcaattcctccaataagagcggtcttcatgattgatgtcattacatcccacgtactagtggcgagaacaagtgccccaagtaacaaaaacacaacgccaataattaatatccacgttaaatttcgatccctaagctcctgcgtggatttcactttcttctcttttactggcgccggcttagctgggaccttttctggtggagcaagtacttgctcgttctcttccactgcttcaaccacttcaatagaaggatgaaccattttttcataagcgttagacacgatctcgtatgtttgatcagttatgtaatcttttagactgagccgctttagttcagagcgaaacacctcttctctttcttgctcattcatgtttcccacccccgtgattaacaacattttccttattttcttcttgctcttagtttactcatactcgtttctcccttgcaatatgatttctgcaatctgttgtttcttcgcaaaaaagcgattgtccgcctgtggtggacaatcgcttagttttgtctttggagggggtcaggttccgacctgaccccacaaataacctttttgctctaataattgttcatgcgtgcctttttcaataatcttcccttgatcgagggcgataatttgatcggctcgttggatcgtatttaaacggtgggcgataataaagctcgttctaccttccattaacgaccagagcgctttttggatttgaatttccgttcgcgtatcaatgctgcttgttgcttcgtcgaggatcaaaatcgcaggatcggcaagcaccgctcttgcgatggaaagaagttgtctttgaccgaaactaatccctcccccgtcttgattcaggaccgtatcatatccttctgataatttcgaaataaatgtgtgcgcatttgctactcgcgccgcttcttctacttcttcatccattgcatccagacgtccatagcgaatgttttcacgaacggttccattaaacaaaaaggtatcttgaagaacaaaacccatgttttgtctcaggctttctcttttaactttcgtaacgtcgtgatcatcgacttcgattgtgcccccattcagttcgtagaagcgcatgagcaggttcacgattgttgttttccctgctcctgttggtccaataatcgcaaccgattcacctggttttgcttcaaacgaaatgttcgtaagcgtcgcaccgtctttttcataaccaaaagaaacgttccgaaacgccactttccctttcacctgttggagtgacaccgcatttccttcatctggacgctcttctttctcatccaaaatatgaaagacgcgttccgcaccagctacagcagataatatcgtattaaattggtttgccagatcattcagcggtcttgtgaaaagacgcgaatactgaataaacgctacaatgacaccgattgaaaccaaacctttaagtgacagaaatcctccagctgctgcgataagtaagaaactgacattattcaatacgttcatcaatttcggaataaatcctgaatacgtcattgcccagaaccccgacgttcgtagcgcttcatttttttcatccaattgcgttaagacatgcttttcttgagaaaaagatttaataatttgctgtcctgatagcgtctcctcaatgacgctattcatttcgccaaggtttcgctgctgttctttaaaataatgcccggttcgattcgtaatccacttcattccaagaaacataaggggaatgatcgtgaacgtaatcaacgttaaaagcggacttaaccataacatcagccctactgtaccaatcagagtaaggacacttgagaagatctggatgaccgaactatttaacgtacgactaacattttcaatatcgtttgttagtcggctcataagttcaccgtgcgttttcttatcaaaaaaaggaatgggcaggcggtgaagatgatgaaacaaatcttttctcatgcgataaaccgttttctgagcaataccgatcatccagaagttctggaaaaaggttgctgctgattgcaacacatagacggcgacaagcagaccaagaataaacggcagaccttttaactctcctggcacaagatagttatctatggctacgcttgttaaataaggaccaagcaaactaaatcctgaactaaacacaaccatcacaataacaagaaaaagccagcctttttggatggataaatagcgccaaattcgcgcaaccgctcccttcaaatcatccggtcgttttcgtttagagggttttttgtttgagctcatgggccgcctcctctccgtactgagaaacgtagatctcgcgataaaccgcatttttttcaagaagttgatcatgagttccttctccgataatcgctccatcctcgagaaggataatcttatctgcttctttaatcgaactgattttctgagcaattaataaaatcatactttcctgatgctttagtgcttgttgcaactgtgcctcagtattaagatcaagggcactagtactgtcatcaagaatcaatatttccggatttcggatcagagctctggcgatggataaccgctgcttctggcctccagaaaggttgattcctttttgtcctagaaccgtatcgtactgatttggaagcgtcagaataaacgaatgaatttgagccgctttagccgctgtttccacttcttctctgcttgcatcctcttttccccagcgaatattatcaccaatggttccactaaaaagaaccacttcctgcgggacaacgccgattcgacttctgagttcatccaggtgaatggccgtttcgttaacaccattgaacataacgtttccttctgtcggttcatacaaccttggaataagctgaatcatcgaagattttccagatcccgtggcccccatgaccccaatcagctgacctttttctgctgtgaaactaagatctctgagaacatcttcttctgaattaggatagcggaagctcacatgctgaaattcaagcttttctaatgcggctggcttaactcctgattctttttcaacatacgtctctgtctgcaacacttcctgcatccgatgagcagaagctcttgctcgtgaaagaagcataagaataaatgaaaacatcgtaagcgccaccgtaatccgcgtaccatatgtaatgatggctgaaatttcaccaacctgcgctgtaccagcaacaactttcacgccgccaaaccagagcacagcaacaatcgctacgttcatcaaaattagaagaactggcgtagcaagttcaattaaacgaagagacgtaacggtttggctcataaggttttcatttacctttttaaaccttttttgttcgtgtttacttctaaggtaggctttaatgagtctaacgccaactaagttctccctcatcaccccgttgactcggtctaacttctcttgaacagagctaaaaagtggaacgccttttttcatgacaaaataaagaaagacaatgacgagtggaatcgcagcggttaatagaagagccagctgaacatccacaacaaaagccataacgacaccaccaacaacaagcaatggggcacgtaccatgattcgaaggcccataaaaacgacaagttgcacctgatttacatcgttcgttagcctcgttaacagggatgaagttggaaaacgattaaagtctgcaaaagcaaacgactgtactttttcaaaaagcgcttttcgtaaatcaaatccgaaatgctgactgacgtaagaagcaagataggtgttaataatcgaagcaacgaaagaaataaccgttagaacgatcatccaaatccctaattcagtaatcacactgaggttttcctttgcaattccgttatcaataatatctgccatgaacagtggcaaccagagctcaacggccaattcaacaagcattaaaagggccgctacaatcgccgccactttgtaaggtttaataaaggttactacttttcgcatggcatcctccctcattgtccttccttttctcttatttttacattatacaggatatttaggggctcgaacaaaaatgagctttttcacaaaatggttaaaaaaacaaaagccagctcacatttttgagctggctacaacctatgctttttcgctttttgaaacgatcatttcaagatcaccttctaatttgcatgctttcatggttgccgggatgatcagatgatcgccctgctttacagcatgagaagattcgctagatgcaatcacgccttctccacttagcacacttacaagcaaataagcgtggtctccttgaagagaatactctccatcaagctcccacttatatacggtgaaatattccgaagatacaagctctacctgcttcaatccatctttttctgttacaacaggtgaaaacggtggatcttcatgtgggatcgtcgatacatcaatcgaacgttcaatatgaagctctcgtgtatttccattagcgtcggttcgatcataatcatagacgcggtacgttgtatctgaactttgctgcgtttcaagaatcatcgtccctgaaccgatggcatgaatcgttccacttggtacaaaataaaattcacctggttcaattggaatgcggcgtagcaagttatcccaatccccagccgcaatcatctctttgaaagattcttttgactgagcgtgatggccaaagattaattcggagccagggtcacaatcaataatataccagcattctgtttttccgtaagcctctccctctacttctctcgcatacgaatcatcagggtgaacttgaaccgaaagatcctgatcagcatcaagaattttaactaaaagtggaaagtgatcgccatcttcatggccaaatagttcacgatgactatcccaaacttcatttaatttctttccagcaagcggaccattacgcacctcacttgcgccattttggtgagctgaaatcccccagcattcaccagtcgtttcagttggaatcgtatacccaaaaacatctcgtagcttcgttccaccccaaagacgatccttaaattcgggtgttagaaaaagtggttcgttttgatacatgtatcttcctcctactcttttttcagtttctcatcatcaaatttttgccgtccatgcatcgccgccccaataatgccagctttatcatggagctgaacgggttcgatcgcaattttcccacgaagtccttcatacacataggcatcgactttttttcgtaacatcggcaaaatcatgtcttttgcctgcatcacgccgccgccgagaataaagatagacggatcgacagtatgaacaagattagcaatcccaaccgcaagtgcatccactgcttcatcaataatcgcgagcgcttcctcattttcttctttagcaaggtgaaacacatcttctgctcctaaagttttgccaagtcgcgcctttccttctctcgcaatcgatgtacctgaagcaagcgcttcaagagatccagcattcatattcgcatgcttctgaccaccaggctggataatcatattaccaatctccgcactatagccatgttcgccttgcatcagacgattattttgcacgtaaccgccaccaacgcctgtgctaactgttatgtaaaaagtgctttctcgaccctttcccccgccatataatgcttcacctagcgcagcggcatcagcgtcattgaccaggtacgtcgggatgccgattgcttcttcaatcattgcggtaatcggcacatccttccatccagggagattaggtggggacaccacgaggccatcaaatggatttaaaggtcctggtgaaccaatcccaatggaaaccgctgaatacgcttttttcacttcttttattaaattagtcattcgctcaataatcgattcgtaaccctgttcggcttctgtcggtatttgtttcacttgcagaattcgtccattttcatcgacaatacccacgcgaaggtttgtccccccaaggtctactccgatatacacgttttccatttctctacctccctatcattctttcctatatcctaccacgaatccttctgttagaaggagctgaacaaaaaatgtgatggaatctccaggttttcagcaaaattcaaatcgattattgtcatttttaagaaaattcttcctaatcgtctaaccctctgctaaactaataataaaatgacacaaatcgggtgacttcaatggtttttgacggcattttactagcaattcttgtcggatacttaagaaaaggaagtttaaaaggctttgcttatctctcatttcgagctggatggatctttccactgctgcttgtcattgaggtgcttatcttttcctttcaatctacttacgcatggataggaaaactaagcgcaccgctatttatgctgatttacatcgtcggattaacatttctttggttaaatcgaaaaatgaacattgggatcatgattcttttcatcggtgttctcttaaattttatcgtaatggctctaaatggaggcagaatgcctgtatctctcgaagcagcgaatattcttgatcctgcatacgcagaagccatcaaaaatggactttatggaaaacatgctgtgttgaccgatcgcactgccctctggtttctcggtgacgtaattccaattacggacccttatccaaaagatcaggtgattagtattggtgacataatcatgaatattggtatttttattttcatccagcgcgttatggttaagaccaaacatccagaaaccctcatacaaacgccagcgcctcacaaaggtacttgaaaggaggtggacattaatggaacggaaagagggaattaaactaacaggcatccttacgaatattgcaattattactactgctgttatcgcactaacttctggatttaaattggtttaatcacaaaggagaggcgctgcttctcctaaaaaaactaaatttaaatgagagtgatcgagacatgaagggcatctttcagaaattcactaatgtggtaagtgtatatcttgcactcacaacaatcgcaggaagttctattttccttactcagtacttactgacatttcatcaaattaactggagtctggccttcacgttcgtagcggcaatcctgttattgaatcactatacaatcctattgccaccaagcgggaactcgctatcaatggattcagcgatttatctggcagtcctatttgtatttgatctccatatgacgctaactcttttgcttgtaacctcgatcatctatgctctgtataacaaaaaagttgtcttgtggaaacatttatttaactttgcaatttatagctccatgatcatcggtgcatatgaagtttttattctctccggtggatcaatcggcgcgctaacgttcttcaacgttgcctcttatatgttttctctagtcgtctactttagtttaaatgtgcttttaataggggttttcttccttttatccgcatctgaaaacttatatcaaattgtgcaaggtatgttgaaagaaacgatatcaagttatttcattacgcttggtctttccttaattctcgttttattaatgcaacaacaaatcattcttggcatgctattgtttttatctgtagctgtagtgctatccgtttcttttaaacagtattttgaactttatcaagaagtttcacagaaagcggacattgatcatctcacggagctatacaatcacggttatttcaaatcgcttttagaggatgaaataaaaaccgcaaaagccacaggacaacctttatcaatcggtttaatcgatcttgatgacttcaaaaaatacaatgatcagcacggtcatttacagggcgacaggcttttaaaacacttcggtgccgaactaaaaaggaatgcgaaagatgtgtttacagccgctcgatatggtggagaagaatttgcactattaatgtcgggaaaaacagagcgggaagcgtatcacgtcatcaaccatcttcggaaagaagtaaacgaccattattttgaaggtgttgaagtgcttccacacggctgtttatctttctcagcgggcgttattcaatacaatcgggacatgtatgattcgtcagaagtacttgagaaagctgaccaagcgatgtatttttccaaaacaaaaggaaagaacaacgtttgtatttatgatgcgaatcacgttctttccaaaacgttttacaaccataaagaaatggaacttctagagcaacaattaaaaatttttctatccaaagatgtctatacgtacaaacatagtaaacgagtttatgagtatgcaattgagttcagcaaccatttaaatttgaatgcaaatgatcagaaaacccttgtaatgggcgccttaattcacgatatcgggaaacttgaaattccgcgagatgttatcaacaaaaaaggcaagctgacgaaagaagaatgggaaatggttcaaaagcacgttacatggggcagagaaattgtatcgacaaatcgggaactccacgacctactccctctcgtcgaactccaccatgaacgttttgatggaaaaggttatccttatgggctcagcggtgaagaacttccaaaacttgtacgcatgttaacgattattgattcgtttgatgccatgacaacggaacgcccctaccaaaaaacaaaatcgatcagcgaagcgatcgatgagctagagaaatgtgcgggtacccagtttgatcccgaactcgtccttgaatttatcaaagtcattaaagaaaatcctgcttttaatgaaaatcagattcaaattacgatttaaataagcgaatgctggggcgttcgcttatttttactgttgaaaagacattaactgttaccttatacctttcatgtttatcttaattgattgagaaatgaaagcagcctgcttccctttgcaacaaatatgtaggcataacgagtcgattaccacatcggctcgttacgatcggtcacacgataaaaaaatggtaaaatgcagattgaagcgagagccgtcgcgagttcaaacggaaaaataatggaaagtgggaaaccaaaggcaagcatcggtagccagagaaaggcgacaatactcggaatcacggccagattattcctcgtccgtcgcgtagggtactgcttactaccgcaatatggacaaacgttgtattttttaaaatgaatcaccgcgcgaaaggtttctttccacgtccattctgtctgacattgttgacaggtagccatgttcattcccccttactctttatacgagtggcgctggcaccgggtttcaaaatgaaaaaaagctgaatgaacagctcagcttttagaatactcatgtgcgtttccttctaaatcggaaagagtatgaatcataatcttaatagcatctcgaatactcgtaaatggaaaaccagtatgtgctgaatgatgaagcgtcatctcaaaagttggcggcacgtgaacgaagcctgcaggaatagagagattcctttgttcaagagcataaagcacgctatacatgacgttattgcagaggtaagttccagccgtattggagatttctgctggaataccgttttgtaaaagcgcatctgtcattttcttaacgggcagcgtggaaaaataagcggctggtcctccttcaacaatcggttggtcttcaggggcatgtcccgcgttatcctctgcactgtcattcacgttaatcgcaatgcgctctggcgttatttttgttcgatcggcagcgagtccaagcataatgaccgcaaacggctcacactgttcaacatatccaatgagcatttctgccgctcgttcataatcaacaggcaacacccgcgaaataatttcaaacccaccaatcgtttcttcatccagttccatgacgatctgctcggttggattatgacgatgctcaagaaaaggttcaaatccagttaacaataaaggcttcactccactctcccctttcgctttaaaccagtcctagtgaagatacaattcttctacattacctttctataaccttatttcatgagatttaacctagaaattttagtaaaattttaccataattacataaagtaatgttttatgagaagttcttcacgttctaaatgaagggatttctttataaaatcacgaacctctgtcgtatagggcttatcacaaaaggaggcaacaccatatgtctttttcaaaacttgttttcacgccactcagctacacaggttggggatcactagaacagctcttacctgaagttgagaagcactcgccccagcgtatccttgttgttactgatcctgttttaaacgaactgggtctcgttgaccgagttcgtttaccgatggaagaggccggatatactgtcgacatttacaccgacattgttccagagccaccgctcgctattggtgaaaagctcgtgaattatacgaaagaaaatgagtatgatctcgtaatcggattaggtggcggaagtgcgttagatctcgtcaagttaacggcagttctttccgcgcatgaaggctctgctgctgattatctcaatttatcaggaagccgagagattacaaaaaaaggactgcctaaaattctaattcctacaacctcagggactggttctgaagtaaccaatatcgccgtgctatctcttgaaagctcaaaagatgtggttacacacgactatcttctcgcagatgccgcaattgttgacccagaactaaccatttccgttcctgcaaaggttactgccgcaacaggtgttgatgcgctgacccatgcgattgaagcttacgtctctgtcaacgcaagtccgacgacggatggacttgccttacaagcaatccggctaattagccgctccattcgacgtgttgttacgaatggagaagatcgggaagcacgcatcgatatgagtaacggcagctatatcgcaggtcttgccttttttaatgcaggagtggcaggggttcatgcgctcgcctatcctcttggtggccagtttcatatcgctcatggggattccaatgcggtgttgcttccatatgtgatggggtatattcgaaaaagctgtacaaagcgaatgggggatattttgaacgcgctcggtggaaattctcaatttctttcagaagaggaagcttcctatgaatgcgttcgccagttagaaagacttgttcaagatgtcggcattccgagtacacttggcggattcgatattccaagttctgcgcttgaatccctcactgaagatggtttgaagcagaaaagattgctggctaggagtcctctacctctttacgaagcagatattcgtgccatctatcaatctgcttttaacggagaagttgtcgaagcgtcacttgcgaatattcaacacccttaaatcaatcataaaagcccgctacctaagcggacttttatgattgatacatctattgttagggaacaccagttaaaacggaaacaggtggtgtcatacttgggttactttctattactgattctttcacttgccatcatgatctttctcataagggttccactaaccgatcgcttccccccagcgattcgcaaaatgggtgtgatctttcttgcgttaatctcgcttgtctttcttgcattattaattgcttcctttataggatgatagaaaaggcgaaagtgtccgctccgagtggacactttcgcctttttgtttgtgaagggggtcaggctcgaggctgacccccttttaaaaaacctctctttaaacaaacgtcgtcgctaaataaatcaccacaggcaccgtcactaagctcgacacggtggaaacgagcgtggcgcttgatacgttttgaggttccgtatgaaattgaatggcgtacatggtcgtattggcggcagtcggagttgccgccataatgatcataatttgctttgttaatggatcaacaggcataaatacaacgattccagcagcaataagcggcgcaaccattaatttaagcgatagtgctgttgaaagcttttgccaatcaatcgctcgcaaccgtatattggcaagctgcatgccaagcgtcaccataataacgggaatggctgcgtccgctatcaaatccacgccatcacggatcgttccaagtggaatgtgtaaccattgaaacataagaccaacaatggcaccgtaaaccattggcatttttctaactgctctaagggctgctttaatcccgtcgtgatctggacttccttttgccgcatagtagacgccaagcgtactcattaacaactgctgtagcaccattaacacaatcgctgtttccattccaatcgttccaaatagaaacaggacaagcggagtgccataatttccattattcataaatgcgcttgataaaaccaaaccgcaccgttctgattcggtatagccgtatattttcgataaaatgctcacaattgcaataagtgcaaagcacagaccaagcatgtagatcgataaatacccgtaggacgaatcaatttcttgttcatagaacgttcgaaaaacgagaagcggcacgagcacatataaagcaagattcgaaagtactttcgtctctaattttaaaaagcgctgcgcaagatacccgacgccaaatacgaaaaagatcggtagcagtatggttatgatcgacatcttcattctccttcagcttctaaaagcgatagcgtcctattacaggatgaaaagggacccgattcgattcatcggccccctttctactctcatccgttaaaaacgataattttttcttctgtcatttcttcaatcgcatagcgtggaccttctttgcccgttccacttttcttcacgccaccgtatggcatatgatcaacgcgatagcctgacgtatcattaataatcagtccacctacatgaacctcattgatcgcttttaacgtaaaagcgaggtcattcgtaaagagtccagcttgaagaccatactctgaatcattcactctcgcaatcacatcatctgttgaacggtacgtgctaaccgctacgaccggaccaaaaacttcttgacgacagaccttcatatcatcgtttacattcgtcaaaatcgtaggttgatagaaaacgccatctcgtttaccacctgtttcaatcacagctccctgatcaaccgcttcttgtacccagctctcaacgcgaatcgcttcacgttcagcaatcatcgggccgatatcagtcgctgcatccattggatcacctaaaacaagtccttctgttacttccttcatttttgcaaggaagcgctcgtaaatatcatcatgaacatagacgcgctggactgaaatacaaacctgaccagcgttattaaagcttttttgcgcagactgcgttgcggctgtttcaacatctgcgtcatgatgcacaattgttgctgaattgtttcctagctctaatgccactttgcgtaatccagctttttcgcgaataagctggccaacacgcgggcttcccgtaaacgtaaacatattcacatcttgattcgaaagaagccattcgcctaccgttgctccctctcccgtaatcaggttcagacgtcctgctggaagtcccgcttcttcaaatatttcagttaaaagaatcgcacaaacaggcgtcacttcagctggttttaacacaacgctatttcctgctgcaagcgcagggccaattttgtggcacacaagattcaacggtacgttaaatggcgtgattgctgcgacaacgccgattgggaagcgtcttgtatatgcctgacgctgttcagatccaggcgcagcttccaccggaatgccttcgccgtgaattcgctttgcttcttctgccgaaacttccaatgttaaagcagctctccctacttcacctttacactccgctaaaggttttccaacttctcttgcaagcacttctccaagttcatcctgacgtgctcgaagtgttgcagcagctttaatcaaaacagtgtaccgatcgtaaggggaaaaaggagattttagagccttcttagctgcttgcactgcatcgtttacgtcctgttcatcagctgtagctgttttcgctgctacttcctgcgtatatttatttagcacgtcatctgttgctgttttttctcgccatttcccattaatatataatccatatgttcgtactgaagtttgtgtagccacgttaacatcatcctccttttttataacgttacgacctttttgtctaataaaagttcttctgcttttcccccgctaccaaatacacgaatcttttcttgtactttttctttcatacgtaaacgaccgagaccaagtgaactagcgagcacaatatcatccggattttctgaaaatgcttcttgaacgcctctcgtaaacgcttgacgaagctccgtatctacattaatttttgcaatccctagtgaaatcgcccgttgcacttgttcatctggcacatctgatccgccgtgaagaacgacaggacgctgaacggcttctacaatttcttttagtcgttcaaaacgaaggttaggcgtttctttataaatgccgtgtgccgttccaatcgatacggctaagtaatcaacatcggtcgcttctacgaaagcaaccgcttcttctgttgtcgtaataagcgcatccttctcatcaaccgtaatgtcatcttccgttccaccgattttaccgatttctccttcagatccaattccaagtgctcttgcaatatcaactacttttttcgtcgtcaccgtgttttcttcaaaagataaaccagatccatcaaacatgacggattggaagcccatttgtacagcttgcatcgtttgctcgaactgacggctgtgatcgagatgaatcgcgactggaacatcgaattctttttcatacgtatcgatcaacccttttaatgcttccatgccaagtgtttgaatcactttctgccccacctgtatcataataggtgccttctcctccgctgctgcttcaaaaatcgctagaacggtttccgcattatgtgcgctaaatgcccctactccatatccattttgaaaagcatgatccagcattgtttttccgttaataaatggcatcatcatttctcccttctatcgcttcaattcaatattgtaatggtactgatcacttcgatatttcgtttttgtatactcgattggatggtcattcaatccatagctgagacgcgtcatttcaagtagcgcttcacccggccgaatcgccaatgaatctgcttcgtcaatcgtggcgttaatcgcggcaattcgctcttttgctttgtttaaataaacctgatagttttctagaatttcatagtatttcgcttcatttaaatcatgctgcataagtatctttccaatcatctctggccagcacgttcgttcaagggcaacaggcgtctcatctgcaaaccgtatgcgttcaacgagaagaatcggcgctccttcagccacttgaagcatttcactctcatgaaaaaggttatccttaaattcagctcgtatcagtttggacgaaggaacctgccctttttccattacttcttccgcaaaaccttttaactgcccaaggttaccaaccaattgatgtggctttacgatcgtgccatggccctgtttcttttcaagcaaaccattttgaacgagaatcgcaattgcctgccgaatcgtcgtccggctaacaccaaattccttgatgagcgcttgctctgttggaatgatcgtatttggtttccaggttccaccttgaatgcgatcgatcagaacatcttttatttgaagataaagcgcctctccgttctgattaatcgacatacatttcagtcctttgtaatggcggtgggtacgacctaatgtcttcaccgatgagcggttttagccattcataatacgctttccgatcttcaatgaacacctcaggcatcacccgttctccagcagccaccacttttcgaagttcaattggggtcatccttactgaatagcgatggtgagcacttcgttggatggagaccatcacatttgaaagcccttcacgaatccattcgcctccaacgctccccacacgataagcttcttctcgatcaacatccgaaacgacttcagaaaaacttcgctgattcatgcctaaaagttcagctcttgtcatgacgtttaactcactttttaaaaagccggctacctcatttgaaatcccgccaaggactgttctgccagcgacatttcctctcgctacctgacccgtctttccaaaacaaacaccttcactcacaacgaccgtggcatagccaaaccgatttaatgcggtgttaacattttcaagaagtaattctgcttgaattggccgctctggaatgccgataaaatgcggcccttcttcttcatactcctgaagaagaccagatgcggcggccagccatcctgcatttcttcccattgtctcaagtacacggaccttttcaaaattctgcatggaagcgaggtcgcggctcatatctcgcgtcgcctgagcaacatatcgtgcggagcttccaaaaccaggggcatggtctgttccaccaaggtcattatccaccgttttcggaaggccaagaacttgaagagaaatgttttgccttctcgcttccgcttctattttcgccagcgcctccatcgtgccgttcccgccgataaaaacaagtacatcaactccctgcgcctttagcagtcgcaaacctttttcaatatgctcatctttcagtggaaaccgccctgatccaaggcacgcaccaggtatgtcttgatgaagatgaatgcgacgtagcatctcatcatcaccgtctaaatacatgccatgcgctaatccttcataaccattttgtataaaaagcagagaatgatcgcgttcgatctctttcacaaaccctgcgagggtagcatttattacggccgtaggtcccccggcctgaccaatggcgacctttttcatgcaactgtctcccttcagttcttcgtatagatcgtcgtcttcagaccaagctgctttccaagttcaacgagctcatcggctacatcatcataaacaatggcatagtgtggttcgaatccttcttccattaacccatataacgtgtcattgatttcggtttctagttccacttcaacagaagttccattgaagcgctgaggcgtatcgagtgcgtttcctcgcatcacaagcaagcgatatccttctggtgtatagccaacgcggaacatcgtcacgcgacctggttttaacccaaattccatcgtaaagccgagctttcggtttggatgaacgcctggacgtgcgccttgatcaggatgggccagcgaatatgcaccagctccgcaatgccagaacacaaccgaattacttgcttcattcacatgaaccatatctccaagataaggtgcacttcctgttagctgttgcagaataaacattgataccgaaccgtgaatatctgattcacatgatgacacaacgccatcttctgtaaattgagaaagagttgagcatgccgcagcgccaagctcattgaaaaagtccggccagcagcgaatcgcaagcgctgatacgtcttctgcatcaatttgttcctgtacatacgttgtgaactgagcaaatcgctgtaccgtttcttcattccgattcagcccaatcacctgttgctccgcacgttcaatcgcgccttcccatttttcacgaggtagcttgacgcattcctcaaacgctttgtttaaatcaaagtttttcaccgtcacgccaagctgtttttgaagctcttcttcatccgttcctgagaagaaaaagcctggtgggtgttccccaatcacacctatcgtaagacctttcagatcttcaatcaccttttgcactttaagttgaactttaattctcttttgtacctgcgcctcatccgcatttccaaatacaaagctaaatgggtggttcgcacaccgtagcacatgacttgtgctgtttccgcctgttaaggaatttaagcgaagtcttcctccaacacttggctcacgtacggaccaaacgatcactggcgcttccacttttttaattaacgcttcaataaattccccatccgcaaacgtaacgctctgatagatgcttacaatgatatcttcgctgttaacgttttcaagaaaagcctcaagatcttcaggagacgtaatgatctcctctggttcaataacgttctcagtcacgctatgcagaaactctgaacttttctttcgctgtagctctcctgcttctagatcaaacgtttttctcccaattggtacgtatagaatgctcgttttcagcacgattggtcacaacctttctcctctgtttgttacaaacactatatcatacattattatgttttaaaataggtagtaacctttaatttcactttcttattttagcgctgctttttggaaaatatgtgcgtaagtcgaacgcttgcgatagaaaactggcgtttcaccaattggcgcgttcacttcgatcttgccaccgcgcgtttcctgaccactccataaatgaacccactcatcttcaggcaagtacaccgaccacgtttcttttccttcttcataaaccggtgctacaaccaaatctgacccaagcatatattgatattgaatattataagaggctagatcatgctcatattccataaacataggacgctgaatcggaatccctttttcagcattctctttgcttaacgcttttaggtaaggcttcagtgctgtatacacattcgtcattttcacaaaatgctcgagcgtctcttcgtcttgatcaaactggaagcaatcatcaggtcggttgccttcgtgcgttcgcatgacgggtgtgaatgccgccatatcaacccagcgaagcaacaattccttattccgcttgtttccatgaagacttgtatatcctccgatatcactatgatgaacgccattcccactcattccagcagatagcgcggctggaataacagatgcaaggccatcgtcaagactccaatcgacactttgatcaccagcccataatagcggacagtagccttgactacctgagtacccagcacgcataaagtaaacaatgtcgccccagcgtccagctttttgaaccgcgttatgatttaccttcgcccacatcactggccatgcattgtgcatttttgtcgctggttctccgttatgaagctttaaatccgtcggcaaatattcaccaaaatcagccatccatccgtccattccaaaatcaatcatgttcttttgaatgacgtcttcataccattcacacgctgcttcgttcgtgaaatcaacaacgccacaattaaactcaccaaagtccacaacataatcaccgccatctaacgccgtagcaagataccctttttcataagcttcgcggtacagatctccttcgattgcgacataggggttgatgtaacccatgaaacgaatcccttttttcttccattctttcactttttgatcgagttcaggatattcatccggattccatttccaattccacatcaatcgtttaccaaatgacgtcactcgcttaccttgccagtcctgacaccaaacggccccaattttcattcctttttcaagagcacgatcaagctttcgttccacaaggtctgttcccccctgcattccgagccagatcccatcaaacgtccaatctggaagctctggttgccgaccgagacgagcggttagcttttcaacgagatctttatatgttggccccgtttcaaataaaagggaggccggtgcttcccaaatgtgaagctcatgaaaatcatctcgttgaaagtcaaagtcagcgaaagccgttgtctccacatgacaatagtatttattcgtagatacataggttggctgcggataattcgtattgtaatagtcgccaccagcctgatctttcacatcggcttgccaggtggtatacgttgatttatttcgaccaactcctggttcagacgtccaaagtgggaagttcttccctcttaaattaaaataggaaagctgttctccacagccgtaaattttctcatcggcatcagcggcaacgcgtaaccagaaacgattaaaaagaggatcgactagttcgaaggaaacgcgaagcccttctttgtcttgcgttaataccattgttaacagctcatgatcgtgagaaaagtggcgaaatccgatgcgacacgtctctccttcgtaccgtaccgttgcatagcgaagagctacccgttctacaacgtaatcttttattttgaaatttcctctgtacatatcaatcgtttcttcaccactaccaacgaaaataaacgggtgggctggtgaatgacgaaacagtaagcgaccgtcaagatgaacgtcaaattcttctccattttgcttcacttcaaaactcggtttgatcgattttgtatgcaacatgatttccccctacattcttatcgtttatgcgcttctaaacttcttttcagcgttaaccgcttcttcgtgtttcttagtaacaaagcctgaatattttttattccagtattttagtgcgagcaggtaacaaacccctccagcaattgctgttgctagtatcgatggccagaaccatccggacaccattccaccttcgaaggcaaatccaattggggagaagagaatgtagaccatcacaacaagactaattagcacaactgaaaccggaatcgtaaacttccatggcaccatatccacttttgggttcgctcggaattcatacgcttcaggaaggggacgaatgcggccaacaaccatcatgatggcaacttcaattaggaaaagaatcgctgagatgtgaataaagttcatcgtaatttcaatgttaaacagctggtttaatccccacacaagcatgtaatacgtaatcacgtggaagataattgcgattttcgctccaagtgcagggatgcgttttgaaacaatcccaacaagaacaatggcaataatcggtatgttaaagaatcctgtaaagcggcgaatcaaatcccataatccatctggggcgttcataagcattggcgcaataaagaaagagacaagcgcgagaacgcttccaaaatatttactaacattgatcagctgacgatctgttgcgtttttattaataccagctttgtaaacatcaagcgcaaacatcgttgccgcactgtttaatagtgagttgaagcttgagaacacggcaccgagaagcacagctagaaagagtccagacataaacgtcggtagcagattcgacacaaccgttggataagcgagatccactggatccattgagcttccatagagatggaaagcaataacccctggaatcatcatcataaatggaaccgttaatttatagaatccagagagcagaacccctttttgaccttctgcaaggttcttcgctccaagcgttcgctgaatcacgtactgattcgttccccagtagaacatgttcataaaaatcattcccgtaaaaatggttgaaaacggtacagaatctgtactggatcctatcgcatttaacttctcaggattttccgtcgtaatcgttttgattccttctaacatgtccccgtttccaagggcaaaaaagccgaggatgggaacaattaagccaataaagagaagccctattccgttcaacgtatcggataccgctactgcttttaacccaccaaagatggcatagatagcgccgataatcccaataacccaaatgacgagccagacagacgattcaaatgaaattccgagtagctctggtacatcaaaaagacgaagaatggcaagtgctccagagtaaaggactgatggaatcgtcacaaacatatacccaagcatgaacagaataacggtatatctgcgaacgctttcatcataccgtttacttaaaaactcaggtaaggttgaaaaggcaccgccaagatagcgaggtagcaagataagcgccataatgacgatcgcaaatgctgctgtaacttcccaggccatgttggaaaggttcgttcgataggcttgtccattcaaaccgattaactgttcggcagataagtttgtaagtaaaagagaacctgcaataaatccacccgttaaccctcgacctgcaagaaagtaaccatctgagtcattgactgaatttcttgtttttaagtatgaaacccaggcgacgagcgccataaagaagacgcatgaaactaatgtgaacgtgatacccgacataaggttgtcctcctttatcccttgctgtaagcaactgttatatttttaccgacaattccgttgtgagcgccaagcgacataaatcgttcatgctctggatgagcaagtagccatttatttttcataaaaaggagcggatcctgtcctttttgagcatcttctaatggggtattcgttccttctggcaaaatcaccgtacatttaaatccttcatcgctcactttacatggagcaaggtgaagcgttgtttgaaacatttcaatcgcggtaccctctggaacataaaacgccttaatattcttcacatcgtatgtatgatttgtaatgtcattggtatgaccgagaaggagcacaaaatccgttatagcaacgttaatttcgcttcccttatgaaattcaaggccacctaacgcggaatttttcccgttacagtacccaatctgtaccggcatccctccatagtagctgttttcaacgaacgctttaaccgactccccttcaagctcttcttttgaaggatcatagtgatttccctgttcaggaatttccgtttccttcattaactccgccatctgctcatatgggaaatctgaaagaacccttccaaacattcgaaaagcttcagaatctactgactgcacttttaaatgtggatttacctcgcgtaacacttcaatcatatccgtacctccgatataagtagtaatgtttaaacaaacatcataaccttttatcacattatattgtaaacgtattcataattgcaatagtttttttgaaattatcagtattttcataatgggggtcaggttcgaacctgacccccgctacgctaccactttaatagactacagcattcgttaaatcaacgtaatccacttcttctcggctgtcaatcaaccatttccctccgcttttcacaagtttatagtgaaaaccacttgaggtaacttccgtctttacgttgctttcacctcgctcatgattcgctgaatccatcgtaacgagaacgtcgatttctgctttctttccagatgaattgatagataagctgtcaagatcaaaggctgcttccacaacctctccggtaaaagcggcattattttctttcactgatcggaagcgctcatcaaaatacgattgtagctctggggttaggtttgaaaagtaatctgtttcaagattttcataggcatagatccagtcatttaagtacgtattaacagcggaaatgatcaaatttatttcatcctgattctgcaccgcttctgactgatcagcggctacttctttttcgatcacaacaggctctggttcgcgatagtcgatcgaaaagaacggagcttctccttcaaagtgaacggaagggcttttcacaacgcctgcttcaaacgttttctctgcatgcataacaacagacccatccgttggataaggaccgatttctccggcatcacctaccgcgatgccagtgtcttttccatttataaataagcgagcatcttcgtagttcgaatctggcatcacaaacgcgccattaacaggcaaatcaacctgcacggtttcctcagatggaacgagttcgatctccgcttctccacgcatcgtgtacccttcattttctaattttgtttcaaaatgatagctccctggcagaaatggcccgatttttttaccatcttctccaatcgttccgctctcttctttattaatgaaaagcgttgttttattgaattgtgttcctacctctacatagatcggggcaggagcaattacataatccttaaatagataaaaagccttcccatcttccattaacgtcatttgaaggagcaagctttcgttcggtttgataagcgtatgatcgcttaagcctctagcctgtctctccaaatcttgaacaaggagtgttcgttggtcagggtgatctttcaaaagcgaaacaaaactcgcaagttcagcttcctgtgaaagcaatggatttgtgtcaggaatgaacttcccgatcgcctcgtaatcctcttccaaaagcgcatcgcgaaaccgttccactgttcgttcaggagatgttacccattttaacgttagaaaactaccaatcaagacaaggataatccctccaatgattgctccccataaaaggcctctcgatttgtttaatggcgtttccctcgttctcgatactttctgtccacacttgacgcaaaacgctccagcctcgctcctcttacactgattgcaccaattcatctatccacctccgcccattattccaaatcatatgggcgagattcctatttatgactgctattccaaaccgtttttttaacatgatttagatcttttatcatatctatgaaaaggtcgggaaaagcactcgttctgctcttaacctattaagatcgaacagtaaaaggaggagaaggcatgtcggatctacaaacgaaaataggcggaggtttatcaaagcttcaagacggcctaaaccaaggaaaaacgaaactccaaacagcacaggaagtttctcagttaaagaagcatgcaagtgatgctgcttcaaatcgaatgaaagtcatcaaccagcttggagagcttacttatcgcctccttcgaaaaggagaaatccagcattctgatttaacagaacaagttgagcgccttcttccatacgacctggaactttatcaagcgaatcgtgccctgatcctaatgaaaaaagaagcaagtgaacacgtttgcgaatgcggagcccccattcaagtagaggatacgttttgtggaagctgtggaagcaaagtcctcatagcagaacccgctcaaacgctcgcaactcaaccgtgtgaactgtgtaaggaagaagtacctgagtctgcacgattctgcggttgttgcggtttgaaaaatggctaggaggtggtgataatcacgtactgtacaacatgtggcaacgaggttagcgacaattactgtccttttgatgggacttttcagcttcatgcagagactccaagcattacttcgggcgccaaaccaaaattttgttcagattgcggtatagagaatagccatcacgagcaatattgtatgcagtgtggttcttttcaacttcccctcgtcccttttaaagcggaacgcacccaggaaaaggtggcgacgtctcatacgattcccgatttcagcagcatcaataaaagaatggccatactctgcgcttttcttgcctttcttgcggttggcatcatgtctttcgtggtatcagaagggcttcagcagcaagccgcttcctttcaacaaaccctaaatgagctcgaggttggcccaacacaagtcgtaaacgatttttatgataactacggtactgaaaacgcacctttaaccgatcccttctttggaatgaccgattattggatggcagctcatctccttaattcaacactttccttcaatttaacagaagctggtgagcgatttggaggagacctcgagcttcattctggcctgctgatcctgcttttactgccccttatttcgctactgatcgccggatatctatacggtcgaagagcttcaggaacgtttcaacattattggctatcttcgctattaatcggccttgtttatggcgtgctaacggcactgatcgctctgatcgcaggattccaattcgatgcttcagcacaagatagcggcatggttgcgagcttatcaattgaaaacaactacccgttcataaaagctctgtttgccgggttgttccttggtacaatcttttcttttattggtagtttgtatggaagtggcacgatgaaacaactaacttcttctccactaaaagaaggcatcagaacaatcacattcggtatcgcgctctcctctgcagtgattattctgttactctatcgtttcatgtctgacgctaaccctgttcttagctttgatgatattcccgcaacctatttcctaatcatcgcgtttcaaggcggttttcttctatggaatgcgctcaacctttcttctcttacgttagatatgaatatactagatgagaaactgcaggtaatgtattctgcacttggcgggataaaaatggagacaaatgatcctttctcactctttagcttcctatcaagtaatccaggtaacttaagactctatatgatcatcgggttgctcatcccaattggtttattcctatgggcaggatacaggctacatcagggaggcgccattcaacttcatcggtttgtcgtctttggtttactatatgcttttatgatgtctttactaactgctggttcaaatactggattcacatttaaattagatttctcagctagagaatttcaagacatgacagacgtaccatttctttttattggttcctccgccatcgctacattcttcaaatgctttatcttttccacgctgctcgctatttgtggcgcttattggaagaagcggaaagcggagtgagcgtccgctgtggatggatttttgaggttttttgtttgcgaagggggtcaggctcgagcctgacccccttcactttcatttacctcactaacactgaattcctcaaatacggaacgccttctacctcaacttcctgatacacccattctccggtatttctaaaaataaacgcaccttctcaatactcatgactgatctccatacccttcaggatgattttggtgccagctccacgcgtgcgctacaatttgcgaaagctctggatagacaggcttccatccaagttcattcatcgctttcgacgacgaagcaattaatgtcgctggatctccagcgcgacgcggcgttacttctgcctcaatcggtttttctgtcacgctacgacacgtatcaatcacttctttcaccgtaaatcctttgccattgccaaggttataaatgccgctctcattcgtttctttcatctttttcaacgcgaggtagtgagcctgcgcaaggtcaagcacatgaatataatcacggacacatgtgccatctttcgtattataatcatcaccaaaaatcgatactttctcgcgctgaccaagcgccgcctgaaggacgattggaatgagatgagactccggttgatggtcttccccaattttcccctctggatctgcaccagctgcattaaagtagcgaagcgaagtggattttaagccataagcatcgtcacaccagcgcagcatcttctcaatcgcaagcttcgtctctccatacggattggttggatttgttgcgtcattttcctcaatcggcgttcgctctggatttccgtaagtggcagccgtcgatgagaacacgatgtatttcacatcatgttcaacgagtttcgttacaagtgcatgagaacccgctacgttatttcgataatattcaagcggatttgtaacgctctcgccaacaagtgagcttgcagcaaagtgaatcacagaatcgatatcgtgatcggcaaaaatttgatcgatcacttttccgtctgttaaatctcctttatacaaaggaacgttaagcacagcttgttcatgtccttttgttaaattatcaagcacgacaacatcttcattttgctctcgtaaatacataaccgtatggctcccgatatatccggcaccaccagtgactaaaatcgccatattttcccctccatatcaatcattaatcgtcgaatcctatcgttatttcccggaaaatactaggtaagcttcagcacatatgaaccaagcggcgcgactgtcatttctcctcgatattcctcgtgtgaaacggcatcgttccacgtaccgtctggaagtgtgagcgtaccatcatgattcgttgaatggtttacaacggataaaaatatcgctccatcttttcctgtacgcgtaacagcttccacgttttcacttgaagcgatcgtagtaacatctgttgcttcgaaaacttctgcataaatagcgtccatcatctcttcttcaagagccgatccgatgtagtacaccgtaccttttccatacttattcttcgtaatagccgcggttttttcatagaaacagcctcgatattcagcaagaacttccgcggttttcgggtcaacgagatcgcaccagattgaagcgacagagttcacacccttaatcgctccctgaaccccttcaacctcattgctttgaccaagctgaagcgattcatactcattaatttccacacctgcaagctcacgtagtgcgcctggaagcgtatcttctacgacaaaattgttctgttctttcacccctgcacgataagaaagaatcacagttccaccttgctccgcaaagcgtgaaattttttcattaactgctggatcagttaggaaataaacgggtacaacaagcaccttatagccgtccaaattgctttcttttgtcacaatatccgtcatcacgttcatgcgatgagcaggactgtagaagcgaaggaactcttgcttgtattcaaacgcattgctttgcggttggatgccccacgcccatgcgttttcgacatcataataaaccgctacatccgctttgtacgtcgaagcaatccagtcatcaccaaacacgctaagggaatcgatgacctctttcacttcattgtatttgcgctttggctttccatcatgatcaagaacaccgtggcaaaactcttccgttccaaagcgagcggcgcgccagcggaagtacacaatcgcttcagctccgcgagcaatggcctgatacgtccaaagcttaatatgacccggacgtggcaaataaccaatacgactccacccttgcgctcctgaaagttcttccatcacccagaagcctttcccgtctttagaagaacgacaaagatcatgctgatgagcaatcgccgcaggcgcaattggctcaggtaaaccgccccataccgggtagttatcgaatgaaataaaatcaagttcttttgacatatcccactgattaatcgcctgatcagtgtacacaaagttatgcgtaatccactgatcggagcgaatatgctttcgaagaagatccgtttgaagcttattgtaagatgtatacgcatcggcacagaaacgatcaaaatctagaagcaagcttggattatgctcctggaatactttacgcggcaccggaatttgtgaccatgccgtatacgtttgactccagaaaacagtgccccatgcttcgtttaacatatctaacgtttcatatttttgctgtagccagacttgaaaagcctgctgatcgacatcaccatagctacgatctgatttttcatgaccgtattcattgtctacctgccaaccgataatcccttcatgctgaccgtatcgctttgccatttcttctacaatttttgctgaaaacttacggtacacttcgctgtttaccgtatagtgacgtcttgcaccaaaggaaataaccgtaccattcggatcgacaggcaaaatttctggatacttttctaccatccatgcaggtggtgtcgctgtcggtgtaccaagaacaaccttgatcccgtttttcgtcatcaagtcagtcgcttcatcataaagtgcgaaatcatacgtcccttcctgcggctccataagctgccatccaaattcagcgatgcgcacaacattcacaccgagttctttcattaatcttacgtcttctgtccagcgttctttcggccactgttccgggtaataatcgacacctacatacattgtgttagctccttttgccgttttgtagtttaaattcaatgtgaaaagaagctcaccagattcggcaagctcttattggtttaaatgggtgttaagcgcctctgtaaatcggtcaaacgcttcttgacctagtactgttcgtttaaagacaccagcatggcttaaaatatcagagaagataagtccgacttcatcccgcaaccgtccctgtatatttgatgagtccaggtccgaatatttttcaagaagggattctgcccatacaacatgcttgttaatccgctcatcacgttcaatttgtattagcggattttcacctatgagagattcaccaagtaagtgaagttcttcttgtagccgacctggcagcactgccagtcccatcacttcaattaaaccgatgttttctttcttaatatgatgtacctccgcatgagggtgaaacagtcccattggatgctcttttgttgtgcgattgtttcgtagcacaagatcaagctcatagtcgtcaccattccgacgagcgatcggcgtaatcgtgttatgcggctcttcgtctgtaaacgcatgaacctcggcaccctcatcactgtactctttccagtattgaagaattgcgtcggcaagttcaccaagctcttcgcgatcattgctttgaagacgcagcactgacatcggccacttcacaatgccagctttcacattcggataagcggataagacaacatctcgctctacctctgcttttgccatcgggaagtcatgctttcctccctgaaaatgatcatgacttaaaatcgaaccgccaacgattggcagatctgcgttcgagccgataaaatagtgagggaatttcccaacaaattcaagcagtcgatcaaacgtgccgcgcgagattttcattggttcgtgttctccatataagacaatcgcatgttcgttgtaatacacgtatggagaatactgcaaataccattgtttctcttcaagcgcgacaggaatcaaccgaaggttttgtcgcgccggatgattgattcgtcccgcatatcctacgttttctttacaaagcaagcattcaggataaccgcttgacttcatcgttttcgcagccgcaatggctttcggatccttctctggtttggaaagattaatcgtgatttccatctcaccatattccgtcttcgttagccaatcctcatttttagcaatgcgatctgtacgaatgtagtgaacatcttttgaatattgataaaagttagccgttgctgcttctgggcctgcctgttcataagtcgtttcaaacttctcaatcacgcctgatggtctttccgttaagcatcccatgattttcgtatcgaacaaatcacgataagtaaccgaattttcaacgagtcttccgttttcataggcccaatctaaaatttgatctaaaatcgtcacggggctgtcaggtatattcgaaggaacatcacttggatcgatttcttcaagctgaagtacttctagaatttgattacgcgcgtatgacaaatcccactcatgaatcagatgcttattcaatccatattggaggagacggttaatctctttgtcgatgatgcttctcatggtttctctccactcctctccagacttacagcgcttctgaaagctgattgatttctcttgctcctgcaccgatttccacaacgtaaaattcaggtgttaagcccgtttcctctttataggttttggctacattcgtttgaaatgaattcaaaaattgattttcaacaatgctgattgtacagccgccaaaccctgctcctgtcatacgggatccgatcacaccttcttctgcccatgctgcttcaactaaagcatccagttcgagaccagttacttcatagtcatcgcgcaaggatttgtgcgactcattcattagctgtccgaaagcgtcaatttcaccagcttttaaccgtttggctgcttcaatcgtccgaacgttttcataaaccgcatgcttcgctcgtttctgatcaatcggatttgtgatgtgctgcttatttgcttcaaacgattcaatcgttaaatcaccaagcgcttgaattggaaggtgttgctgaagctgtgctagcgcgcgctcacattccgatcgacgctcattgtattttgaatccgcaagccctcttcgtttattcgaattcgcgatgacaagagacgcattctcaagaacaactgggctatagctatattcaagcgtgttgcaatcaagaagaactgccgcttcttctttccccatcccaatcgcaaattgatccataatcccgcagtttacgccaacaaactcattttccgcacgctggctcattttcaccatgtcaaccatcacaaggttaagatgattcagttcatttaataagacggctgttgccaattcgattgatgctgaagaagataaccctgcgccgttaggaatattgccaaaataaagcacatcaaatccgctaacatcataacctgagtgcttcacaatcgatacgacgccttttggatagtttgcccagtcatgttcagcatcatagacaagcttatccgcattaaccgtcatgacgcctttctctgcaaagttcatggaataaaaacgaagaatagaatcctctcgttttctaacaaccgcataggtcccaatgctaagagagcatggaaaaacatgtcccccgttataatctgtatgttcgccaattaaattgacgcgtcctggcgagaagaagcttctaatctcaccaccttctccatacacctctcgaaatgtttcatatagggttttcatttttttcacccggcctcgtttatttactgctctttcgcagcttcagttttgtcgacatcgttacttttttggctacttttcttctgaggagacgctccatcaaaagtccaactgccgtttcacccattaattcggtatatacttttacagtacttaaagcgggataaacgtattttgaaacgctaatgtcgtttacgccaattaagctaacacgctcaggtacagctactccattttcatggagggcgcggagacacccaatcgccatcgtgtcattccctacaaagaaagcagtcggaagttgttcgcctagttcttcaatcgcacggttcataagcgaatacccgtcatctaccgtaaaggatcccgtatatacgtacgacccataatcttgttctcgttctttcatatattgtttaaacgtgagctcacgttcatcaacaatttcagcactagcatcccgaaacgtttctctcccaccaatgtaaccaattcgctcatgacctttactcgtaaaatagtcgagtactttttttgtcgccttttcaaagtccacgacaaccgcgtcgtaacgttcgttatctggatcatagtcaacaaagacgatatttggcgtcactttatttaatgaagcaatttcttcactactaaacttaccaacggcaaccatgccctgaatgttttctttttctaactcatcatagttatctttaaaaattttcacgagttcaagccgctcttcctgacagcgctgctcgactccaagtcgaatcgacatgtaataaaggtcgttcaactcttccttttcggtataccagtggataatcgcaatcttcggtgtcagtgatttttttccgcgttttttactataggaaagctcttctgccacttcaaaaatacgttttttcgtatcatcagaaacggataacgtttcatcataattcaggacgcgtgaaacggtcgatggtgaacatttcactttttgtgcgatgtccttaatcgttgccatggccatcatccttttttagtctgcttttaagtaaaacactttcgattgaaagtcaccaccgcgctccgcttgctcgccgttcgctccgttaaattcaattggaagcggcagaccgtgcaacatcagttcatctccgaaataaaccactccattaacgtcgtaagcgcgatctgtcgctaaccctctaaccttcaaaaattgattcgtacgtggatttggtgtgcttgacgctttataccagccaacaagcgcttctttttgatccgttgacacgatcatccacgccgtttcattgctttcaaacggactttgcagcctgataaactccccatcacgaacgaggtgacgcagcgactgataccgtttgatctgggctttcacaatttctttctcctcatctgaaaggttggaaggatctagctcatacccaaacgtaccaaagtacgcaacatccgctcgcatcgaaagaggtgtttctcgaagcgtttggtgattgggaacggctgaaacatgagaacctatactataaattggataagccatcgatgtgccatactggatttttaatcgctcgactgcatctgtatcatcactcgcccaggcttgtggtgcgtagtacaggagagccggatcaaaacgcccaccgccgccagcacacgattcaaacaatacatttggaaactctgatgttaatcgttcataaagatcatagacacctagaatgtagcgatggaaaaactcaccctggtgctctaaacctgcagagtaggcctccgtaatgtttcgattcatatcccactttatataatccaggttcgtagcctcaatgatgcctttcattcgttcaaaaatgtagtcaacaacttccgctcgcgtataatcaagcacgcgctggttgcgtcctagcgtaaagtgttcaccaggaatgcctactgcccattcagggtgctctctgaacagatcactgtcaggactaatcatttccggctcaaaccataatccaaattgaagtccggtgctctttactttttcagcaagagacgcgatcccatcagggagcttttctaaatcaaccgtccaatccccgagcgacgattggtcattattcctctttccaaaccaaccatcatctagaacgaacagttcaaccccaagctctttcgcttcgttagcaaaatgaagcagcttctcttcattaaaatcaaaatatgtcgcttcccagttattaatcaggacaggacgttctttgttcttccactgctcactaataagctgatggcgatacagacgatggaacgtttgactcattccgttcatcccttgatccgaataaaccatgatggcttcaggagtttgaaatgcgtctccggggctcagagtccattgaaatccaagcggatgaataccaagctgcacgcgcgttacaccatagtgatcgacttccgtttgcgcgagaaaattcccgctatatacgaactgaaaaccaagtacttctccagtatgctctgtagcatctatggcttttaaagcaagaaaagggttatggtgatgagaacttgctcctcgtatactcgaaatcgactgaatcccctgctctacttttcgtgttttcacatgacgctcgcgtgcccacgtaccggagaggtgcaccatttccatatcagcatgaggtaaatccacagacagcgacatcattcgatcgacggaaagcgcaccatccgttttattaataaggcgagcgtttcgagcaattaccgcttcattttcaaaaatcgtatagctaagctcgagctctacctgctgatacgtatcttccaatacaatgagaagcgtctccgcttcatctgtatgcgcatacgttgccggcaaccctttcaaacgaggctttcccttcacaatatcatgtgatttgtagacaaagttcgaaatcggcttctgatcattcgagatcatgaaagcaggctctctaaaatccccttttccataggcgggatactcctgctgaatcgtttcaagcgaaaaggccgcatcatcctcatacgcatgacaactagccggtgttgggttatttgttctttgaaaatgacgataattgcgtggttgaagcgcttttccgaaatacaaatgacctaactgcccattttttaaaatctgaaagatgtagcttatttttccatttgtgagatgaaactgctgttgattaacgagaatgctcattgccatcgatcctttaccccagtttaggttcgttcattaatgtgatgctacttgtcgtgtgttcctctaattcgagaacgacgatttcattttcaccttcatttaaaagtggaccaggtaagtaaagacgctgctgcgggcccatcgttagccagtagcgacctaggttaaatccgttaatatacacattaccttttgtaaacccttccaagtcaacaaatgtatccgtacattcgtcgatcgtaaatgagcctttgagatacttaggataacgttctgctgccgtatatgtcttaggaaggcgttctccttcaatcttaatcatttcccaatcaaaccaatattgattgtttaaccagaggttcttcacaattcctttctgatcagagagatgcttgccgtaattgactcggcccaggttttctacaagaatttcaaatgtattttcctcatctgggaaaggaagcatcaccgattttgtctcatcatttacggaaaccgttgcttcatgttttccattcacataaataaaagctctgtcacgaatgggcgttgtatctagctctaacgttcccgtctcattaatcgtcgtacggtaaagcatatagccaaagttttggtcaagcttttccatgctaagtggtgtaacatactcgactttggttcctacctcttgaaggacatcgaatagacttacactctccgttagcttcacttcgccatagcttttcgtctcaactttagaaacttcttccattgaaacgtccgctacgcttttcaacacgtctgccatcgcaacatacttgtctgtgatgtctccccactctgttaaaagtgaatcataatcatagctcgtaatcgtcggcgcatacttttcataatgattggccccattataaaaaccaaagttcgttcctccgtggaacatatagaaattaaccgatgctcccatgtccattagtttctggaaaacctcagcagcttccttcgcatcacgcgtatgatgctcgccgctccagtgatcaaaccagccaatccagaattccgccaccattttaggtgaatcaggcttcatcgcttcaagagctgcaaaggcttcttctggtcttgagccaaaattcagggtcgtaacgacgttttccattgaaccttgcttaatgaaatctggtccgtctgaagtgaaataaaacgtatcaatgccgtgcttctcatattgttctttatgaaaagcaaggtagttctgatcattcccatatgcaccgtattcattttcaatttgaaacgcaatgaccgggccaccgttcttttgtaagaaaggcttcaagcgcggcaagagctcattgaaataatcttctacgtggtttagaaaagcaggatgactacagcgaagtgctatatcatcctgttttagtaaccatgaagggagaccccccatttcccactctgcgcaaatataaggagacggtcttaaaatcacgtaaagtccgatttcctgtgcttcagctatgaaccgttccacgtcagccattccttcaaaatgaaactgacctttcttcggttcatgaaagttccatggaatatacgtttctactgtattcaatccgagtgccttcagcttttgaaggcgatctctccagtactcaggcacaaccctgaagtaatggagacctcctgaaaggatttgaaacggttcgtcgtttaggtaaaattggttctttctcgcttccagcataacagcctcctcctatttcaaggcgcttcccagcatacctgaaatgaattgtttttgcagtgttaagaagaatgcgatgatcggaacagttgctaaggtaacgcccatcatcacttgaccgtagtcgatataagagagtcccattaagctagatagggcaacagggaatgtgtacatgtcgttcgtgttcaacacaacgagcggccacataaagttgttccactgcgtcatgaataggaagatcgatgcagctgctagagctggtcgcatcgacggaatcacgattgagataaagatgcgtgtttcgctcgcaccgtcaagacgcgctgactccattaactctgttgggaacgccaggaagttctgtcttaacaagaaaatcgcaaatgggaagcataattgtggtgcaatgacagcaaagtacgtgtttaatagattaaagtcagacatcatttggaacaaaggaatcaatgttgcctggtaaggaatcatcatcgaaagcaagaaagcggtaaagatgaattttttccctttaaaattatatttcgcaagaacgtaggctgcgctcgcacagacggcaagagctatcacaacataaagtcctgagacgaagagagagttaaacagaactctgaatataccaatcgattcatttaagttcgttaagttcgtcataaactgatcgccaggtaaaagcgttggcgggttcgtaaacattttactagagtcattcgttgccccgataaacatccagtagaacgggaagatcgaaacaacaaggaaaatgctaagaagcgtatacatccaaactgcctttagcttatttttctttttcttcggtttcttttgttgcctttcagcaagggtgagtttattcgtcgactgttcaattacctcaaggttcttagccattaatcatcacctgctatcttgaattggataatggagagaatacctaccatgacaacaaccgcatacgcaatggcggaagcgtagccaaagtcaaagtattcaaatccactttgataaatatatagtccaagggtcatcgttgaatctgctggtccaccgcctgttaagttgaacggttcgtcgaaaagctgaagcgttccgattgtcgataggatacctgcaaaaagaataactggttttagttgtggaacggtaatgtagaaaaattgcttaaacttattcgcgccatcaagagaagcggcttcatataaatcttctggaatgttctgaagagctgctaggaaaataaccatgttatatcccgtccatctccacgtcatggcgataatgatcgaagctttcgcccaaaacggatcggatagccacggaattgcggtaattccaatgtagcttagcgctgtattaataattccttcttcttgaagcatgatcgaaaacaagatcgagtacgctacaagcgatgtaacagctggaaggaagaaggatacgcggaaaaatccttttagctttaacagctggttgttcaacacattggctagtaccattgcaagaatgatcataactgggacttgaacaacaaagataatgaatgtgttttgcatcgccgtccaaaaaatatcatcgttccagaggcgcgtatagtttttcaatcctgcaaaaacgtactctccacccactcgttcctgaaaacttaaaacgaaggacgcgataattggataaacggtaaatgctaggaaaagcagaatggccggggctgcgaataaatatggaaaacgtttcgctcgattcatgaatatcccaccttaacattacaggggttgaaataaatcaacccctgataatttctgaagcttattgaatgcggtttttcaaacgatcttctgatgcttttaacgcttcttcaatctctttaccatttgcgatttcagattgtgctttcactgcttcatctttcgctactgcgtaatctcctgtgtagttaacagcaggaatgcgatccatttcatcagcaaggaggctccagatcggctgattgctaaagaattcaacttcttttgtgaaagcttcgttatcataaatcgtgttcagcgaagggaacaggccgccttccattgctgataattgaacatctttatttgtagagaagaattccataaagtcataagctagatccgcattgttacttgcactaggaatcatgtagttacttccaccaagattcgatgcgcggtttccaccttcctcaaatgctggaagctcaattaatccccatttacctgaagtatctttgccttgttgagtaatggatccgtataaccatgcaccagatggagcagtagctacatcaccgcttgtcatcgcactgatccatgcgtcccaaccaactgtttcttttacaagaccttcttcgttaagtgtctgttgtactttcattgcttttttcgattcttctgaagtgagtgccacattcttctcatcgtcaaagtagaacgtgccctgttgattcagcatcatgcggtaaagcccgtcatctccgttaagatccaaaccgatcatcgctttatctgttttttctttaatggttttaccagcttcgatgtagtcatcccacgttttaatatcttccgcgtttacaccagcttcttcaaaaatatcggtgcggtagaatacgccagttggtccgccgtcaaacgggaaaccgtacattgcgccatcttttgaaacaagctctgttttataagacgggaagctatctttcatttcatcaaagcctttatcggaaacgtttacaaaagcatccggaaaagcactcatataaccttgaacgcgatcatcttcaacaagaacgatatctggtaaacctttacctcctgcttgaagacccgttgttagtttcgagtaaacatcatcagtacccatttcaacaacttcgagttcaaaatctggattttcttctttaaatttctcggccgcttcttcaagcaccggtacattaatattccaagcccaggctgttactttattgctgtcacctgaaccttcgtcctcgcttccgccattcccacacgccgcaagaaacagacttaacacaagcatcatacttatactaactagacccgttaccttcttcatcgactacccctccaattaattactgaaaactttcaaaattcttaatgaaagcgtctacacttattagaatagtcgaagaggtaaacatagtcaagtaaatgtttactaaaagtttactattttatttaccttccaattaatggggtttttacaaagaagaaagtgtccgtctaggacggacactttcttcttgttgtctttatagggggtcaggttcgaacctgacccctacgttattattgaatgcgattcttcaatcgatccgctgctgctttatatgcttcttcaattgatttcttatcattcattacctcagattgcgctttaatggactcatcacttgcaagcgcataattccctgtgtagttaacagaaggaatgtcattcatttcactcgcaaatagctcccagatcggctgattactaaagaattccacatccttagtaaaagcttcactttcataaatcgtgttcagcgttgggaacaaaccattttccatcgccgttaactgaacatcttcacttgttgtaaagaattccatgaaatcataagccatatcctgattttcactcgcacttgtaatcacatagttactaccaccaaggtttgctgcgcgatttccgtcttcttcaaatgcaggaagcttaaacacaccccagttgccttctgtatctttcgcctgttgtgtaattgaaccacttaaccatgcgccagatggagctgttgccacatcgccttgagccatagcactaatccaggcatcccagccaactgtatctttcactaagccttcttctttcatcattttcactttctctgctgccatttttgattcttcagatgttaagttaacgttcttctcatcatcaaaatagaacgtaccttgttgcgtcatcatcatacgataaagaccgtcatcaccattcaaatcaagtccaagcattgcttttcctgtcgcttctttgatttttttaccagcttcaatgaaatcatcccacgtcttaatatcgtcaggattcacaccagcttcttcaaaataatcggtgcggtaaaaaacgcctgttggtccaccgtcaaatgggaaaccatacattgctccgtcttttgaaagtagatctgttttataagtaggaaagctctctttgctatcatcaaatcccttatccgatacatttacaaatgcatcagggaatgtttccatataaccctggatccgatcatcctctacgagaacgatatcaggtaatccttttcctccagcttggagaccagtcgttaatttcgagtaaacgtcttcacgaccaagttccacaacttctaactcaaaatccgggttttcttctttaaacttctcagccgcttcttcaagaactggaacgttaatgttccatgcccatgccgtgaccttctttccgccgctctctccatcgcctgacccttcactcgagctattgttactagaacaagcaccgagaaccaacattagaatcagtaaaatacttactcgacccataacttttctcaccttaacccctcctgtttgtttactaaacaataccgaaaaagaaaatgaaagcgcattcatatttttagattaaggtacaaaggcctaatagtcaagtaaatatttactgattaatttacttttatagttactacaaacttctcttttgcttatatttttacttgcgttttatctgctacatcatttttagaaatggatgaaatcttagttaaaactattagtttaccaacaaatcaactcaacgtatttaaagattttgtaaaatattgaaaacaaaccaaatgaaaagacataaatgctatagttaatggtggatttaatttaatagttggaggaactatatggtttttagtaatctcgttttcttgtttgcttttctgccaattgtcttattttcttatttttttgctcgaagaagctttcgaaacatcgtattacttattgctagcctgatcttttatgcttggggagaaccgcaatatgtcttccttatgctattttccattattatgaactatggttttggtagaggaattgattattttcaaaatcacctcttcttcaaaaaaatgttactcaccatgtctatccttggaaacatcgccatccttggctatttcaaatatggtgaattctttttatctaatgtgaacaactcatttggtacgagctttgaacttggggaattaccactccctattggaatttcattttttactttccaggcgatgagctacgtcatcgatatttatcggaaagacgcccctgttcagaaaaatattttttctttagctctttatatctctttatttccacaacttgttgcaggcccaattgttcggtacaacacagttgatcaacaaattcattctcgaagcattacggctgataaagtacatgagggcattaagcgctttattattggtctatctaagaaagttttattagccaatagctttgcagttgtagccgatcaagcttttaatactccagcaggcgaaatgagcgttatgatggcgtggattggcgtaatcgcttataccctacaaatctacttcgatttctctggttatagtgatatggctattggtcttggaaaaatgtttggctttgatttcctggagaattttagatacccatacatatcaaaaagcatttcagaattctggagaagatggcatatttctcttggaacctggttcaaagactatgtctacatcccgcttggaggtaatcgacatggaaagatgatccaggtgcgcaaccttttaattgtttggacaattactggattctggcacggtgcaagctggacatttatggcatggggattttattacggagcgattattgtaatggagagtctagggtttgggaagtggttaagtcgacaatggtcacctcttcaacatatctatgtcctattacttgttatgatcggctgggtctttttccgcgccgataactttacctattcatttgattatttgcaaacgatgttcggcttcaatcaagctgcattcatagactccatgttccttttgcagtggaatgataactgggtgttattcttagctggcgctctatttagcacacccttcatcgcgaacataggtcgcatttacaaccgtgttgcgatgagaattaagggtctgcagttcgtcacacttttctctgaacctgcgatctatatgacgctgatgatttttgctatggttcgacttgtaaactccagctacaacccatttatttatttcagattttaatgtcaataaaggagctttgctatgattcggcaaattgaaaaagcacgaaaatggttacttatcattttatttttcgcgtttatatttattgttttcttctatctcacagcatcagccgatattaaagtatctgatgtagaaaaaagagaacttgctcaaaatccagacctttcaattgagaatgtctcgagcggagaatacatggacgagttcgaatcctattttctcgatcagtttccaggtcgaaacatctggttgaaatcctatcttcaatatcagcaaatgaagaataaaacgtatatatttgattactatgtatctgacgctaactggattattcctaaaccaagctacagcgagccttctagtcatattgatgatgcagtaaagaacttgaacgaatttgcgtcaacgatgaagagtgaaggaaaggaagtttactttgcttcactccctcataaagtaaatacgattgatattttaccctcttatatcgaagaaggaaaagggatagaaaagaaagactatttcttttctaattttgatcacgaaaacatcccaatggtagacgtagggaaagaatttaaagaagaatatacggatgaagagctaaaggagcgttacttcaaaacggatcatcattggaacatgtatggtgcttttgaaggatatcaaaaagtgaccacacttctctctaacaattccgcttactacacaccaataaatgaagatgagagtgactatgaattaacttgtcaaaacgataaacaatttataggaagctataacaatcagctttatttaaccgtagatacaaccggagaaaaaatctgtcacatgctcccaaaagacgatctatttgatcgctatcaaattacttggaatggtaaagaccgctcatttaaacaggtctatggcacagacatctttagagacaacaacccagttgattttggtggactttacatgaacaacgcagctgaaattaacattgaaaatccagcagttaaagatgacagtcgactattgattttaaaagactcatatgcaaatccaatagcgtttcacgtggctcaacatttttccaatacgactgtgtatgatatccgttacaatgatgagcaaattcttacagagtatatggcggaaaaagattttgatgttgttctatttctttacaatgatgcgatgcttcaaggtgaaacatttcgcttttcgacaccaatgaaagaagaaacaaagtaaccgttgagataagacaataaactgaaaagcaatctctcattaatttagagagattgctttttttgttctcgctacgaggacaactgtctttaatgggggtcaggttcgtacctgaccccctctagaccactacactaccgccgttaccccataaacagcctcatgaaaatgatgaacctcgggcttaagacttgattcgcttaaattctcgaaaagctttcttaagatcaggtacttcatgaatgacaaaagcagcaactcctttatccgctacgtgatcagccaggttaatttgttctaagttgctgacaacatattcaatattacccgctgcttcttctgaggcacggttctgaagaagatccaacatctgcttctcgatatcaaccgcatagaccttttctgccacttccgctaaaggtaaggtgaaatatccattccccgctccaaaatcagctacatgatcagtcgtcgttacatcaagatgggcgataacttgttcaggtgagatgatttcccttcgctttggatcaagaagccgatccgcctttcccggtttgaatcgtttccctgccataatgaaaacctccttaacaatctggctataataaataccactaccggtattataacaagaatacacgattcacgcataaaagcccgctctctttaagagcggacttcaaaatgtcctttatatagggacagttgtttttgataggggtcaggtacgaacctgaccccttcgacgcccctctttatacccatctggattctccgactgccagcgccatgtgtcgcgacacatttcttcaatgcctttagctgctttccatccaagctctgtttcagctttcgttgggtcagcgtagcattctccgatatcaccaggacggcgtggcgcaatcgaatacttcacttcttttcctgttgcttcttcaaaagcctttaccatttgaagcacgctatagcctttaccagtcccaaggttatacgcctcaacacctgtcgagcccagaatatgctcaagggcttttaaatggccgttcgctagatcttcaacatgaatgtaatcacgtacgcccgtaccgtcagctgtgtcatagtcatcaccaaacacgcttagctgttcaagctttccaacagctacctgactaatatatggcatcaagttgtttggaatcccgtttggatcttctcctattcgaccgctgatgtgagcaccgattggattgaaatagcgaagaagggcaatgctccagtttgaatctgccacgtgaagatcacgaagaatttgttcaatcataagcttcgtttgaccataaggattcgtcgcacttagcggcgcttcttctgtaatcggcatgacgtctggcatcccatacacagtggccgaagagctgaagacaatattccttacgttgtatttctccatcacttcacaaagaacgaacgtccctgttaagttattatgataataatgaagtggcatggaaaccgactcaccgacggctttcaagcctgcaaaatgaataaccgcttcaatctcattttcttcaaataccttttctaacgaagcacgatcaaggagatccacttcataaataggaaaatctctctctgttaattctttaacacgatcaagcgactccatcttactattcgaaaagttatcaacgacaacaatatcagaaccgtgattaagcaactgcacacatgtatgacttccgatgtacccagcaccgcctgttactaaaatagccattcttaatcccccacttctcgtaatgtctccaaaaaattccttctaatcatatcacaatcaatccatgaatttcagggcgtataatgaaaaaatcgctctcagtgagagcgattctgttatagggtagcaaatcgattaaaacaagatccaggatttctttcgttttcccttctcttctttctgttcagaatcagcagctaaaaggccttcctgcttcttcattccttcttctttaaagcggcgtttttcttccttcgaccacgatttgtattctttaataaaggcttcatacttcggcatgatgtccttcatcgggccatactcacggatcgtaccatgttcaagccagatcgctttattacaaaactttttcatctggccgttcgaatgactcacgaagaaaatggtcttgccacgttctttaaactcttccattttcacaagacatttatccgcaaatgttttgtcaccaacagaaagtgcctcatcgacaataagaacatccggatcaacgctgattgagatcgaaaatccaagacgcgatttcataccgcttgagtatttcttaacaggcatatcaataaatttaccgatatcggcaaactcaataatatcaggcttcattttttcaataacgtcctttttatagcccatcatgagaagctttaactcaatgttctcccgacctgttaactctttatttaatccggcagaaacggcgataagagagacatcacctttaacgtcaatttccccactcgttggtggagtaatgttggcaacaagattagagaacgttgatttccctgagccgttaacaccaataatgccaacaacgtcgccttctcctgcttcaaaggttaagtcacgtatggcatagaaatcctcaccgtaacctcctggaagaaggatgtccttcagcttatcggagttctgcctgtgcattttatattttttcgtaatcccatttaatttaactgaatagctcataaacgacagtccttattaaatatagtctacgaaatgactcttgaacttcatatgcaggtaggaaccaatcatcaataacagcataacaacaacccaataataaagagtgtattgaagcgtctgatgaacccagcccatgccgagaagtgcatctctgtagccttccactatatagtatagcggatttagtttcatcccaacctggataaatccaggtaaatcatcaattgtccaaagaatcggtgtcaaataaaggaacatccgtataaacgactgaagcattttgtggacatctcgcacaatcgtcgataacgtcgacgtaataagagagatcgcaaatattaaaataattaatgaaaacatataataaggcaactgaatcaagtgccacgataagccctgtccggttaataacacggctgcaaaataaataccgagaagaatcaagtgctggtaaaagactgacatgatcacgtaactcggaattgtactcatcgggaaattcattttcgataccatcgatatcctggtatagatcgactttgacccttgaataacagctggattaaagaagaaccaaacaacaagaccagcagacatccatagcacaaacgggaccccatcgacagggttaccgttacggatcccaaacccaaacacaaaccagtatatactcatttggaacagaggattgaggatttcccataccataccaagatagttgttgctatttgtacttttcacttgataaatcgaaagccgattaattaagtaaaagttacttacttgttcttttaaaactgcaatcatcgaattcatgcttattttgcctcactaacaaaaatttggtcaacaacctttttggtagcagatcctccttcgaggtaacaatacgtctgatagaaatcgttatacttttcctcgaatgcgccaaaaccttcattctcaaacgtttgaatggcctttaacacttctgcggttgttgtcactacaggaccgggtgcttcaacttctagatcaaagtagaagccacgcaatttgtctcgatatgaagcaagatcgtaggtgaagaaaatgatcggtcttcttaaattcgcgtaatcgaaaaagacagaagaataatccgtgatcaaaacgtcggacatcaagtaaagatcgtttacgtccacacctacagataaatcatagacaaatccctcatatggagaaaggtcaaattgctcagcaatcaagtagtgcatccttaacacaataacataatcatcaccgatttcgcgtcttaacaaatctaaatccaatttcagctcgtgcttgtatttccccggctggtagaattcatcatctcgccaagtcggtgcataaagaaccacttttttatgcgtaggaatgctatactccgcttttaaagcggcaattcctttttcatcattttcaagatgcaggcgatcattacgaggatagcccgattcaatcatgtttttcttaaaaccaaacgctcgctcaaaaatttctgttgagtagcggttaggtgaaataagataatcccatttcgctgcttccttataaaaattatctttataagagagcgtattcgtcccaggcatgtgtacctcgtccatatctcctgcaagctttttaagcggcgtgccgtgccacgtttgcacataaacggtgtgcgatggttttggaatccaaagcgacattcgactattcgttacccaataacgggcacgagccattaggtaaaaccatcttagcgaaaatcgccttacagttggtataccctttttacggaataaatcggcatgtgactcttcaacgctccaaatcatttcaaggttataatcgtgcttcacaagatattcgtagatcgctcttggattacagctatattgttttccggaaaagctctcgaaaattacgagacgcttgtttgcaggaaaccgacctaatgccacgaaaagaagtcgactgaacgccttcagcaatggatatattttcatcatcttcaatagctttttcatgaaatggacaccttactcccgacaaatagtagattcatttgaaatgccctatcgctttaaaaaacaggatagtgccatatcgccttcatcagcggcagtaccctgtttcttaaacgtgcatctacacttcagctttttcaggttcaaacaccctgttaatcactttcttggctgcatagccatcatcaagatggcaatatttatcgtaaaaagcattaaatttactttcgtactcgatctcaattctttcaagattttcaatagcatcgaggacaccttcggatgttttcaacagtggtccaggtgcttcattttcaaaatccatataaaatccgcgaagcgaatcgcgatatttttcgatgtcataagtgaaaaaaagaataggacgacgcaggtttgcgtaatcaaagaaaacggatgagtaatcggtaattaacacatctgacagcaaatacagttcagcaatatcgccatagtcagagaggttataaacaaaatcgctcatacctgtggtatcgatgtgctcagcaactagatagtgcattcgtagagcaatcacatactgatctccaaggcgctcctgcatttcctttagatctagctttaaatcaaatttatactgccctttcccatgaaactcatcatcacgccacgttggcgcatacaggatgaccttcttatctgccgggatttcgagcttcgccttaatttcctgctgtcggcctttcttttcttcatctggaaggtagagaatatcatttctcggataaccaacatcaagcacttcttttccaaacttaaacgctcttctaaagatttgtgtagaataatcatttggtgaaacaagatagtcccatttttgggcttcattataaaaatttcgcttgtatttttctgttgttgtacccggcatacggacttctttcatatcagccgcaagcttcttaagtggcgtaccgtgccacgtttgcaagtacaccgtttcaggacgtttaatagcaaaattcggcattctggcgttcgatacccagtatttcgccgttgccaggtgataataataagctggacttaatcgacgaacctgcttcggattaccgggaatgtcctttttctgtttatcataaacccacaagtaatcgtatttctggttacttttcaacagctcttcataaatataccgtggactatctgagtagcctttgccgccaaaactttcaagcaacacttttcgttctttcattggcattttcacaagaacagttcggtatagctggcgcatgagtaaatgtttctttcttagcgcccttcgccactgtcttaagcgaacgcgaaacttcattgacttcagaaccgcttcttttttacctttttgcagaaggcgatgttctcttcgttcaactaaatttcttcgcttaatccttccaggagctacgagggcaagacagttttttaaagcagtaaaatgatcaaacaaaacggatggttctttcgtcgctttatttgtaatactttttgagtaatagttcaacaaaagcaagtccaaataacggctaatgcttttcgtttcgccataagatagcttcatcttgtgataaatataaaataagtcaggtagcttctcctcaaccgaatgcaacattaaagttggatggtcaattggatcgtaacattccccttttaaataagtcggaactcctgaaatcatcggaatctcttccgaattgacaatcgcaggtatggagaatgataaatccgtgtaaaacgtcgcttcttcatcgaaaagaagctgatgccattcaacaaagtcttttcgaattaagaaattcgtcgcacttctgcggcgaagagctttaatctttctaccgcctcttaatctccgtaagtggtaagaatcttctccaatttctgtaggaatgtcaattttaccagctttaaaaatagacgcgccaataagatggtcttctccaacattgcttagaagaagttccagtgtatatggggccaggtaatcgtcaccgtccataaaatagatgaactcatttgaagcatggtcaattcccatattacgcgcttttgagacaccaacatttgtgtctaaatgatagcaactcattcttgggtcatgataacgctcgatgatttctttactacgatcagttgaagcgtcattgatcaggataatctcaaaatcctgataagactgctgaagcaaagaatcaaggcatttttgaatataatcttctttattataaacggttactattacactaatttgtcccatcacaatccctagcaccccaactatttattctcaaattctattactgcttagccgttagatacaagtaactctttcttgattttcgttgttgaaattcctgccgtacgagggagataaacaacttcacaatgatctttcaagaagtcgaacttcccttcccaatcatcgcccatgacgaaaatatcaacatcattgtttttcacatcatctactttttgttcccaatgttcttctggaatgacttcatccacgtagcgaatcgcttctagaatcattttgcgattttcatagctatgatacgcttttttatttttgatttcgttaaattcatcagttgaaatggctacgataagatagtcgccaagatcctttgctctctttaataaattaatatgtccccaatgcaataaatcaaacgtaccgtaagtcaaaaccttcttcatttcgacccctccagttattagtgtttaatagttttttcaacgagacacgaattaacatacaatttacaatctttaataacacttaacatcacacgtgcttaatttgttttataatagatttgtacccaattctatcctttatcaaatgagcgtgatgtaataatgacgcgcaggcctgtctttatcacaagcatggcgaggaaaaaggatatatagtaaagtagaaactctgcgcctgttacctgttcaatcaaaacaatgaacacagctgtaacatagaagcccggtaggccaagcagaacagctacaatatcaaaaaataatgaaccatctcgaatcgaatttacaggatcctgagtggtcgattgtgacatcgttagcttcgttaattgataagcaattggaacgagtaaagccatgataatcgctacgaatgttacatagacaatggtcatttcaagcagattcacatcaagcattcctgcttgtcttaagactgttaaaaccattgacaaaaagactggcaatgctgcagcttgtataataatgtcgatataatatcctttagatgacgtttgcttcgtaattctagcaacttcaccatcgacacaatcaaataaataaccaatgttatagaacagcgcagcaagaacaatcgatagcggtgtagcaatcattagcgataagcctgagataatcataaagaatgcactcatccagcttaccgtatttggttttatacgcattttaataaacaaaatggtaatataaatcgacattcgccgcagtacataccatgaccataaatcttctttataacttaaagtttgagattgctttcgataagaaagaatcgtctcattatcaagaaatgtggtcggtagtaattcttgcccatttttcatgaccggtcttcaccttccagtattgtttgctaaagtatccgcctactagcccaagtcctctggaaaagtggagcagaaagaactgcatcactgttgggaagtatgcgcggaaaccatgttgtttgataacgcctagtgaagaaactccgatcatcatcagataaatggcaaccagcgatagtaagcctattagaaaagcatcattaaataatgctccgactccaagacctgtcccagtaagaaatgccattaagggagcaagctgacgaaatctcatcacaccttttgtacttctagaagcaataataccccattttccatcagcgtaagacttttgtacaaatgttttcacactatctctagcaaaataagtggaagcaatatcgcttgacaaataaaactttccgcctcgatttctaaccctcgcatgaaattctatatcttcacttcttcttaagttttcgttgaacaatccggctttttggaatacttcacgcttgtaagcaccataaggaacagtatctacaagtccttcccatttactggagctttttgtaatgcggaacattgagttcccaactcccattgggtgtgagtaaacatacgcattaattgttccccaaaacccttttccttctgttcgaataacgcctccgacgcagtccatattaggcttgcgttgaattaagtcatagtaaccttttaagaaacctttagggatcatcgtatgaccgtctactctcaaaatgtatttcccttttgcattctgaatagcaagattccatcccgtaggtaacgtttcttttgggttttcaaataatcgaattcttcccggattcttcatactgacatcttctataatatctttcgttcgatcggacgacattccatcaactactagaatttcatatgaatgctgaggaaactcctgttgcaagacaccttcaagcaactttcgtatatacctctcttcattcttcacgacgagaagcacggaaaagaacaattctttcatttcttttcatcccttcacaacttcgccttatctcttttttctctctatgagactattttttcaataaatcttttcaatctaatacttaagtatacatgaattcgattgaataatcattgtaaaaataagggaaaagcagtttattttctttcaattgtgtgaacaacctccgttagattcttcacgttctcacgtcaaaaaagctaagactgactgatcgtggattaatgagaaaactaggttcattacgttaaaacgatgttgtcgctataacttcatcgcaacatatgacacccttcgtcacatctaggtaaattgtggccctcaattcgcttgtaataaatgcctgtttagtgaatgcgatcgcgcttatagacaaacatataaagccaacgcatacttttaaactgaaatgggaatagggtaatttagaatgacaaattcaatcgtttagctgggctgctcgctaaacaactgtccttgattctttaatctacctaattaataacgtacgaacatagttatcgttcattacccttcttgtatgaaataaaacaatacaaaggtattaacgaggtttttcaggaaaataatacggtatttagtgtgtttcatcttaacatttcaaaattgtgaaggataccgactattgttgtcgaaaattctgttggagaggggttctcttataaaagaatgagtcccaagcccctaagtacgtagtactacgtgcattttgctacgatgtgaaaaaacaggaaaaaagtcgggaaatatgttaatattagtaagcacttatttggattttgaaatcaattagttattgggaggattcaacatgagagtaaggaaggctattatacctgccgctggtcttggaacaaggttcttaccggcaactaaggcgcagccaaaagaaatgctaccaatcgtggacaagccaacgattcaatatattgtagaagaggctgttgccgctggaattgaagatattatcatcgttagcggtcgcggaaagcgcgctattgaagaccattttgacaaatcctatgagcttgaagaaacgcttattaagaaacaaaaagaagcgatgttaaaagaagttcagcaaatatctaatttagctaacattcactatatccgtcaaaaagaaccaaaaggtcttggacatgcgattaactgcgcaagtcgttttatcggtaatgagcctttcgcagttctccttggagacgacattgtcaaatcagagcagccatgtattggccagctcatggatagctacaaccgttatcgtacttcgattgtaggtgttcaacaagtagcggacgaagccgtatcaaaatacgggattatcgctccaaaaggagaacaaatcgacaacggtattattccaattaaatctcttgttgagaaaccttcccttgaagaagcaccgtctaactacgcgattttaggacgttacatcttaactcctgaaatattctccatccttgaaaaccttcctaaaggtgctggtggagaaattcagcttacggacgcgattaaagtattaaatgaacagcaagcagtttttgctcatgaattcgaaggtcaccgttatgacgttggagataaattcggtttcattaaagcaaccgttgactttgctttaactcgtccagatttacaaaaagatgtgatggactacctgaagcaagtggttgatcaagaattatcaaccaaaaaataaagaaatctttttgagccctttaagctctgttccaattaaaagccgcgattctctcaataaaagaatcgcggcttttttcacttcatttttgctaactgcttttccgaaaagtcgccagcgataggaagcttataacgatttccctgataggcttttaccattaaaacaatccaaacaattaagctaagaggaggtaaaatcagaacagaaacgatcgtgccgatgacaggtacaacattcaacacaagacttataacgaagaaagctccgaacacaacaattgattgcatggcgtgaaagcgaacaaacttgttatctttttcgattaacaaaaaaataattccagtgacaaaccctaacacataggtcaacagtcctgcgacgttttcctccaatccgctagatgtttttcgtggggttggcggcattttttctggattattccctgcctccacagcaattcctcccttatcttgtaaattcagaatagtgtataaattaattttatcaaaagcaggaatttgggggtagtatacgaaagtatactacttagacaaaattcgagtaatcttttatagcggagtgtgatacggatggtccttccagataaccccaatcatgatcaaaatcagatgaaggcttttccatttaatattacgagagaaaaagaattagctagcttctctcgcttactagaccatagtggaagtggtattctttcagtctatggtcaaccaggtaccgggaaaagcgaattaatgactcactatcaaaaagaagctaatgatcgtggcgtcgttttttatcttgttaatgcacaatattcaaaagccgagccatctgcttttcttcaactattgcttgaccagatgggtgcctccaacgtatacatttcaccacttgaagccattcatatgcacatccaacatctagagaaacaaggaattcgctttgtcattgcgattgattcctacgaacgatttgaaaaattagatgaatggtttagacagtcctttcttccttcgctaccctcttccagcatactcattttctgcggtcgtaagcagcttaatgcatcttggagagcgtcaatctggtatcccttcatcacatcaattgagttaagaggatttagcatggggcaattcgattctgtgttccaaacactagatccggaactcatacagctagcctggcaattttcaagcggtaatccttatgccttatcgctttgcgtacagaaattaaatgaaacacaagaatggaatgaaagagatgaacaaaaaatttatcgtaccgttgtaaaggaatggctcagtgaacttgaagatgaccagctccttccttacatagaagtagcatcaatcggtcgctacattcagcaggaaaaacttgaggtaatgcttgatcgatcgatatcacgaaaagattttgaagcgctcatctctctttccttttttgaagaaacagaagccggctggcagttaaatacccttttccaacgcgcaatgcgagatgaccttagaagaaggaagccctcttattatcatcagctctggaagcgcgctttgctctattgtcgttccttttttgaccatgatcgaatagcggattctacggaaattagtgagtttttttatttgctaggtgaacctatgatgcaagcgtcgttatttgatcatgatacgttatcaacttatacaatgacttcagcaaatcaggatgattggaatgagatccttccatatttagaagagaatactcttatcagtgaagacctgcagacttcgtttgtggatgatcaaactggacagacgttcacatactttattcctaaaaaccacaacaagcaggtttttatgacgaaagaaatgatcgagtctgttggagttcgccacgtgaagttgcttcgacaaagagatggaatcgtcaggggaattgcttttttgctccccattcagtcaaacacgcttagaaaattgcagagcagtcctgtgacaagaagttatttcaagaggatctcccccgctgaagaaaagcgcattctttcacaagattcgccatccggctgggtgattcgataccttggcgtgaaaaatccaaaacagatggaagatcgaaaagcactcctttaccaccttcttcctcttgtgctaaccgaagggattcttgttgcttcaacgccccttcctttttatcaagatttgttagaacagtttcggtttaatgaaattccagaagctatgcattttgattatggccctgatcgagcttctaaaacatatgagcttgatttacgaaatgctcgtctctctcactatcttgaaacgttcgcaaatgctcttggtgttaatctatctgagacgccgcagcaccactttcaattcactactcgtgagcaggaagttgtttcacttgtgatacaaggatattctaatgccaaacttgcacagactctttccttaagcgaagttacaattaaaaaacatcttagccgtatttatgagaaaaccggtgttaaaaaccggactcagcttacgcgtgtgatgcttgaaagaaaatagtggcgggggtcaggtacgtacctgaccccccccccgctttaaagaggtgaacctatgatgcaaacagaaatctatctcgttcgccatgcgcactcgacctattcaccagatgaatacggtcgtgagttatcctccgatggccaacacgatcagaaattgttaacgcaccagatgaacgaaaggcacgtcgacgtgatcctttctagtccatacaagcgagcgattcaaacagttgaaggcatcgctctacagcacaataaggacattcaaatcatcgaagcatttaaagaaagaacgcttgccggaaagccggttgaaaatttccaggaagcgatagaaaccgtttggcttaatgaatcctatgcgcatccaggtggtgaatcaaacgaagaagcgcgtagtcgtggcatttatgcaatgaaggatgtgctaaaaacatatgaaggaaaaagcatcgtcattggaactcatggaaatttgcttgcattaatcataagtcatttcgatcagaagtacgatgtcaccttctggcgtagtcttgatatgcctgatgtgtattgcctggcgtttgaagaagaaaccttgataaacgtcgagagaatatgggagagagcaaactaaaacgacggcgatctggccgtcgttttcttatcgctatttgattactccaataacccttcttgcttaagcgtctcttctacactgccagtgatatttcgattgctcggattttctggacccttgccgtgaaagtcgtcactgcagtgtgactgtgttaagtaaaaagcattataaagcaagcgccgatccgctatagtaatgccgctattcgagaaaagatacgtgcaatttgtctcgatcggggtacgcttatctttttgatccacgtaataaaactcatctgttactgctccatattccatatcttccgttgatgttaagtacgtgccatcctgatcatatgggatcaccgtaaagcctttttctttttttaacttaggtgcgccttctacgttataaataacgatcaacttcccttcaaaaccttccggaacgagatgaattgtatcggttgtctcatgttgaaccgatgcctgtgatgaacaagaagcagccacgacgatcactagacttaaaacaagcagcctgagccaatacattcgcttcccccctgaccatttatacccttatttcttttcgacggtgactgccgtatttccttcaattgcaggattttacaggaggacagaatcagccgcttaggtttatggtaaaaagcttcatggctaggaaggaccatggcagaatgtaaccacccttgcacgagcgaagagtaatgaagaaatcaaaaaaacccgcttctgaatcgaagcggggtccctctttctttatacagcaatatctttttcaattgcgttagaatcgttaaatttatcatgattaaatttcccaagaatacgggaagtgagcgttcctgatgtcattgcaccgtttacgttaagagccgtacgtcccatatcaatgagaggctccacagaaataagaagtcctgctaagtaaaccggtaagttcatcgaagaaaggacgattaatgctgcaaaagtggctccgccgccaacaccagcgacaccaaatgaactaatgccaacgataagcacaagctgaattaaaaatcctgggctaagcggatcaatgccaactgttggtgcgatcataaccgcgagcatcgcaggataaatgcctgcgcaaccattttgaccgatcgtagcgccaaacgaagctgacatattcgccgttccttcgtcaacgccaaggctatttttctgcgcagaaatatttaacggaattgtccctgcgcttgagcgtgatgtaaaagcaaatgtaagaacaggtagaacctttttcaaatacgtgaggggatttaatccaccagttgcaatcaaaatcaaatgaatgataaacatcacaagtaaggcgagatacgatgcgagaacgaattttccgagttcaagaataccggctacgttcgtctgagccaccgttgttgccattaagcccatgatgccaaaaggcgttaaccgaagaacaagcgtaacgatacgcatcacgattgcataaacggcattaacacccttcgtgaaaactgccgcttgctcaggatttttccgtcgtacgccaagcgctgcaatccctacgattgctgagaaaataacgaccgcaatcgtggaggttggacgagctccagtcatgtcttcaaacggattagcaggaatgaaagcaagaatcttatctggagtactcatatcctttacgctaccaagcgtttcttcaagataacttcctcggtcctgctctgcttgccccgcttcaatttgctcggcattcaagtcaaaaataagcgagcttccgactccaacgattgccgcaaccattgcagtggagacaagaatgccaatgatccaacctgacatctttccaagctctgacgtcttctcaagatttgtaatcgattgaatgatcgaaaccataacgagcggaataacaatcatcattagcaagcgaacatatccgcttcctacaatgctataccaatcagatgtttgactaacaatctctgaactagcaccaaacgcaatttgtaagtaaaccccaagcgctacaccgaaacctaatccggcaaaaacccgcttactaaaagatacatgcttctgctgcatcttaattaaaacaccaataagaacaagtaaaatagcaatattcacaataactaaaaatgtatccatactgaattccccctctttattatcatctttagaccaaactttataatccttataagtttagtcggcattaatctaaaatactaccatattgtggcactgtcaagcagaagcgtaggaacagtgcctgtcactccccgttatttgtcgaatggggagaaggctgagataatctccttcttaaggatgagataaaaaccgaaccggtggccggtttatttcatttcgttgcggcgtagaatgaaagtaacaaaagaaacgaaggaggtgcttctgatggaaaacatttatgtgctggaacaagaaattatcaaacgacgctaacatctaaatcttataaggaggaatttctatgacaatcttattgcttatcaagaacgtctttaaaacaaactctcatgagcagcagcacctacgcgatcaccataatcgacaccttgatctgctcgcaaggtccccttaccatagctagccccctggatgttgaacgcagccaggggactttttcttgcattttggaatcagctcagcttaacgtcagttgcaaagcttctaagcccaggatcgcttcaataacatcacttttcgaaacaggtgaagccgttggaaagtgaatcgactctccttctttcgtcgcgtattcagcaatcacatcaccgacgccttccacatttgcagatgcaaccccaagtgactctaatgagagcggcaaaccaatttgctcatagaaagaaaacaaccctcttacttctgcccactccccttctagtacaagctgtactaaaataccgtacgcaactttttcaccatgaagaaaagaatgtgcttctgcaatatgcgttaacccgttatgaatggagtgcgctccagcaattcgtccatagcgatcaccaagcccacctaccattcctccagataaaagattcgtttcaataactcgagtaaatgcatcgctcaaatgacctctttgctgatcaaaaaccgcttgttcaccatccttcacaagcacatagcggcagcttttagcaacctcgtatgctaattgtacagacaaaggcgtagaaggtagcccttcaattaatgctctcgcttcgtaccatttggcaagcgtatcaccaatccctgctcgtaaataagcgattggcgattgcaaaagaatttcaggctctacaagaacaagatatgtacttcttggaaaaatagtatacgtaataaattcgccttcatctgaatatttcacgctaagtggcgttgtcgctgcgcaagttgaagcaagtgttggcacgagtactacatctttattaacttcgtgaccaacggctttggcaacatcgagaacttttccgcccccaacacctaaaatcaaatcagcatcgtgaatgattgctaattcagcttgtcttgcaatttctgtttcagaacattccccattgtacgtagagtacgccgtatgaaaatcagacaaatccgggaagtattcctgagccgcttcccaggagcgatgccctgaaagaataaacaccttctcaaaacgtccttcctgaagcagacgcggtaattcttgaagcacgcccggtcgacattcatagtggccaggcgttgctcttacttgtatcgattccatttttcattcctcctaagctcgctgaacccactgttcgtttagttcttttaatgaagaaactcccgctaacgataatgagataaaaagatcttccttaagttgctttaacacacgttgcaccccaacttctccatctaccgcgagtccataaaggtagggtcggccaacgaagacagcgtcagccccaagtgcaagagccttaacaatgtcagctccacgtctaatcccactatcaaataagatggttagctcatcgccgacttcctttttaatagaagaaagggcatcaagagaggcaatacagccatctagctgacgccctccatgattagaaacgacaattccttcaatgccaaaatcagcagctgtccgcgcatcctccgcactcaatattccttttaaataaatgggcaacgtcgtaatacttctcaaatacgcaatgtcctcccaacagagagaagatttatagaaaatctttttcatttcatctaaaaaggaagcattctccgaccgactcattcgttcgttgaacacggcatcagcttcatagtttgcaatccccttaccaagaagaaacggagaataacgattagagcgatcgcgctcacgatagccaagcatcgccgtatccaccgtgattacaattgcagcatatcctgccgtctcggctcgctctaccaaacttttagcgatagcaggatcattcggatagtacagttgaaaccatctaacgccatgagttacagatgcaatctcttccattgaatacgaagaaactgtgcttgaaacaaaagggagattttctttcgcggcagcccgagctgacgcaagctccccctctccgtgaacaatcccctgcatcccaattggtgcaagtagtataggtgccgcaatttccgttccgttaaccttcacttttgttgaaagatgcgagacatcttttaaaaagcgagggacgatcttccactgctcaaacgcctgtcgattcgcccgaagtgtttcctcagctccagcgccactctgtacataatcaaaaacgtcattaggtaatttttgtttcgccaattcctccagctgctcatactgaacaggaaaagttgtatcagcgattgtttccatgacatccaacctccttccacttaatcttttttcaaacgagcggaaagaatgtttccaaacgactgaagtccctgaacaaggacaataagcagaaacacggtcacgtacatcacatcaacttcataccgtaaatgcccatagcggtaagcaaggtctccaaggccacctgcgccaacaagtccagccatggccgttgccccaatgagtccgatggtggcaatcgtgagcccgagcacaatcgaggatcgcgattctctgacaagaacgtgccaaataatgtgtcgcgtttttactcccatcgcttcatacgcttcaacaacaccacgatccacttctagtaaagctgattccatcagtctcgcaatgtacggagctgtaaaaacgacaagcggcacaatcacgcctttcacgccgattgttgtgcctgcgattattttcgtaaaaggtaaaatgaaaaagagtagaataatgaatggaatcgatctgatcacattaataactgcatttagtaagcggaaaagaaccttgttatcaagtgctttttcaggtcgtgttaaaacgagtagcacacctagcggaagccctattaataccgagatcaggagggagatcccaaccatctgaaacgtttctataatggcactccaaatatctgctccccaaaggtcgaggaattccgaaactttagctgacatgtgcttccacctcctgaacatatccctcgacgacaacgccgctttcttctaaaaaggcgacagctcgatccgtttcatctgcattaccttccaaatgaacgacaagtctgccaaacggctgatcctttagttgcgtaatattcccggctaaaattgacggatacacgtcgaactttttactaacatgcgcaagagccggacttccggaacgctcgccaataaaggaaaggttcacgatctgaccgctttctttcaaacgggtaacgagcgactctggaagctcatcttgaaagagcgactgtacaaaccgttttgctgtggatgtctcgggttgactaaagatatcaacaactctgccttgctcaatcacttttccattctccatcacagcgacttcatgacaaattttttgcaccacattcatttcatgcgtaatcagtaaaatcgtaataccaaaatcacgattaatttgttccaacagcgccaaaatggactcggtcgtatcagggtcaagcgcacttgtcgcctcgtcacataaaagcacttcaggttcatgagcaagcgcacgcgcaatcgcaacacgctgcttttgaccacctgaaagctgagaaggataagcatcgcgcttatccgctaatccaacgatacctaaatatttatctacacgtgcttcaatctcttttttacgaacacctgtcaacttcaatggaatcgcaatattttggtgcacggtccctgttttcaacaaattaaaagattggaaaatcatcccgattcgctgtcttgttttttggagctttcctgtagacaaggaggtgagctcaatgtcattaatatatacttttccctcagttggtctctccagcagattcgccattcgaacgagcgtactttttccagccccactatagccaatgacgccatagatgcttcctttttcaacttcgatcgaaacatcatcaaccgcattagtgatcttgtcaccattcttatacgtttttgttatattttctaaacgaatcatcgcgctcactcctctttgctctatcaaattaccaggatgggactacggactctgcaaattcttcttgaacaaactctttcacttcatccgtatgataatagtccactagtttttgaatacgttcatcttctgtattctctgttttcgtcgcgataacatttacccacggggaatcatcggactccatctctagtgaatcttctttcggtacgcgtccgctttccatagcgtagtttgtattaatcgccgctatcgcaagctcttccaactgtctaggaatttgagaagcttctaatggaatgaattctagattcaatggatttttttcaatatccttaatcgttgcttctactccaactccttcctttaattcaataaggccagctttttcaaagagctgtaatgctcttggctctccagttgaatggtttggtaaaccgactttatctccatctttcaattcatcaaggcttttgtattgatccgaataaatacccatcggaaaattaatcgtggacgcaacttttttaagatctaagcctctttcttgtacaaagtcatttaagtacggttctgtttgaaacacgtttgcatcaagttcaccttcatcaagcgccgtgttcggcatcacgtaatcattaaatgcgatcacttcgatctcaaatccatcttccgctgccacttcctttactttgttcatcacatcttcatggggacctgctgttacgccaaccttaagtggaccatcttcttcagaacctccagacgcctcgtttcctgaacaagctgccaaaaagactaatagtagtgcacctagtaaataaaatgatttcttcatctttgaatctcctcctgaaatatgtagtaatgtaaagcgttctagcactaaaacttaaaagcacaaaagctcctttatctgttaaaatcccacccaataaaaaaactccctctgtaaagtacagagagagttgagtgatttcggataacaaatcagccgtgcttgaactccctctcatctttcaaacgattgctcgtttgctggaattagcacctttctcacgaactgagatggttgccgggcgtcatagggccagtccctctgccactcttgataagagttttcaatattatttaactatttttaatagtatagtaccttttgcgaaatgcgtcaagggactctcaagaaaaaacgcgagtgcctgtcactccccggtatttgtcgaatcgcgccctccacgctgatcaaaccagtttacgagatgcctcagcctcgccactcttagctctggatgaccactgcgagataaattatgatctgaatctgggaatctcacaaacatcgtatccttgtcgcggtgttttaaggcaatatacaactgctctccttgctcaataggacagcggtaatcatgttcgctatgcataataagcagtggcgtctgaatttgatcgacatatttcaaaggagaatggtgccacagtttatcagggttctcatcaagatcacttccaacttcccacttagtaaagaaatagccgatatcacttaccccatagaagctctgccagtttgaaatcgagcgctgtgtgacggctgctttaaagcgatccgtttttccaacgatccagttcgtcataaatccaccgtagcttccccctgttacatacagtcgatcttcatcaataaaggagtagctcttcaacgaagcatcaacacccgccatcacatcctcataatcgccaccaccatagtcccctcggcagccatttacaaactcttgaccgtatccctggcttccgcgtggatttgtgtataaaacagcatacccttttgaggcaagaagctgaaattcatgcataaacgaatttccgtacatcatatgtggaccaccatgaatttctagaatgagagggtatctttgctcatctttaaagccaatcgggcgcatgatccatccctgaatttctaacccgtctttcccgttgtatgtaaagctttctggagacgaaagctccgaacgttgaagaacttcgtcatttgattgagaaattcgctcctcattgactcgatcatcatgaaacgaaagcgtagaaatatcaccaatgttaacaggatcactaaccgcaacagccgcttcatttgtcttcggtaagtagtgaaaagcgtagaagtgcctgtcaccacccgttatttgtcgaaccgtgcgatcggcgttagcgcagtaaatgctcgtatttcctttttcacttgcaaggaaatagacttccgttgcatcctcattccacactgcccctggcgaagcgcctccccagtgcatatctgaaatcaacacatccgagcactccaattcaaccgtatctgtcaaacaagtaaactcccttttctctatatcaacggtccacaccttatttaaggtagctccctcgtgaagaaagaagtgcccaatgaaagagagcttttctccatctggtgaccatttcggagcattaaagctcccgccttcactgtttagttgctccggctcgacattcccttcttctaactctaaccgctgcacgaataaatccgaccgcatatatgaaccttgttcttcataacgacttcgagcataagcaatcgattgaccatctggtgaccagctaggacttgaatggttaaacggcgcatctgtcagccatgtgattttctctcctccggaagatacgtcgatcatgacaatctgcaggtgatacccatccagaaatccatcgccatctgatttatactgcaagtccgttacgacaagcggactccgtccttctactttctcttcttcttttttatctttacttagaacgagtaaagaagtaccatccggcctccacaccggcgctgacacaccgctcttcaaaccggttagcttacgtgcttcaccaccatccgtggagatcagccatatttgatcttctcctgatcgatcggaaacgaatgcaatcgtctttccatctggtgaccagcgcggagaatggtctttcttttctcctcctaaagctgtccaatcatgctcaatcccagtatctctgttcactaatacgaggtttgaactatattctttttcctcatttatcacttttttcacataagctacataggttccatcaggagaaagctgaggatcacccacaaaggtgaaatcatataaaagctcttccaacagctcgctcttttccagttccttttcaatttctttcttcaaactcttcacttcccttcttctcttatgtgtctacttccattaaataagtgaaattccttcttgcgctaatggttcattttccattattcttccaaccgactttctcttttctatccataatgagccctcaacctctaaaaacagaacacacattcctgttttacctctttttctctgaacctccgctcactttcataccaaaaccacatcggtttcaggcgatatatctcaaaacggtatttgaatgatctcattatgagatatataatggaattaacaaattgaaagcggttactaaaatcagaaagccgcttaaaatactagggaggatttacaatgagccagcaagcacgaaaccaatttattgatcttttgtgcgacaaaacgacgatgaatagagaagaagttctcagaatgtctgatgcagaagtagaatattttcactggctctactttgatgaatcaccagcggacttgatgtaagaccaatagaaaaaagcgtccggtgcaagaacgatcttgcaccggacgcttttgggttttccaattaaataggatcttacttcttcgatttctgaattggaatatgctctttgataccagtatataaaccaatcaaaccgtgttttggagaatcataacttaaaaaatgataatcaacgaagttcacgtacttcatagccccggtagtctttgttgaaatcgcgtaacgaatgggccgctcataaggaaaactcctcacttttctcatgaaaggaaattcatgatataagatggaaagcgttcgaacgacccttgtccaggtcttatgaagcctggcatcttgcctcaatcgcaaaaaatcaattgatttgccactcacatcaagcatttgcactaaatcaacataacatttaagtgaatcaagattatgtcgccatgcatggaggcacattaaataaaatgtatgataggcagaaagttcataaacatagtcatacccatctaacggagtggattcctcccagaactccgcaatctcaagggtcgatgtatcctctttcacaatatcccaatgaatttcaacacagagcggaaccggagatcctggtaattctttgcttaaacaacaatgaaagtgtccaggtaaggctttctcttcaagagaaaaacccaatttcttaatacagtctgttgctttatgaatggctgaacgattgaccagtaaatcgatatcagatgttggccgcgcacctgattccccaaaataccgctctgcaaaaaatattccctttaaaggaatgacttcaatccccaacctatcgagttctcgaacaatctcttctgtctgatgcttgataaagagattcttaaaaagagtttgattatgagcttcttttaagcactcttgaaaaccagaaggtgtttgcgtaataaggtctcggtctttcaatagcgtataaagttgtggtgcaatagaaggaagtcgatcaagcttcatcactttttcataatatttctcgtctcccggcaaagtagcttgagcatcataaatagaatgtagaagttcaatcaacaatgtaataatcactccttcacgtgctaggaaatcgctgttttttcttcagtaaagtgctgaccattcagtttttgatagagaggacagctgcgaagcaattgctcatgagttccgctttgaacgattctcccttcatccattaccataataagatctgcgttttgcacagtagaaaaacgatgcgcaataacaatcgttgtttttccttccattaattgatctaatgcttcttttacgaaatgttccgtttcgttatctaatgctgaagtggcttcatccaacaaaagaatgggagaatttttcaaaatagccctggcaatcgaaagtctttgtttctgacctcccgacagcttaacgcctctctcaccaatttctgtacgatagccatcaggtaaggaacaaataaaatcatgaatacgtgcatggcgggctgccctgaacatttcaatgtctgatattccagggcgagccatctgaaggttgtcttgaatggatcctccaaataaaaacgtctcctgaggtacgtgggcaatcatacttcgtagttcagagagtgaacatccacttatcgtctgttcatcaatccgaatctccccactttgaggtcgataaaaaccctgtaatagattaaataaggttgtcttaccagcaccacttggtcctacaagtgcaacgacctttccagctggaatcgtaagactaagatcttgaaatattcttttatgatcatcgtattgaaacgttatattcttaaattgaatggaactgactaaatcttttcgatgagaagatggtcctgacagttcatcggtatcaacaggttggtctagcacattaaacactctctctaacgctgaaacagatcgttgaaaaccagcccattgccccgcaagccctgttaatggataaacgagatgatttacgagattaataaacataataagagcaccaactgtcataacagaagttgaaacataataagcacctatacagagactcagcatgaatgacagcgaactgaccaattgccccccagcataataccatccctgaagctttgcattttccacttcaagtccgtataaatcttcatttttcttcttatacttggaataaattgatttctcgagcgtaaatgcacgtataacttgaaaaccatgaaatgtttcattctgtagtgtgctaattttgccaactagatgatgaatctttctaccattcttccttaacaaaagaccaaacattacccctccaattagagcagcaggagcgatcaggatactaatgagcgacagagtccaattgagttgtacaagaaaaacaaatactgctaaataaatgagtggcagtcgaatcaaattaataaggttatagccaattaccccatcaatgttatgaacatcattactaaagtgagatagaagttcaccagaatggatatcagaggcacttgatggcggtaaccttaaaatatgatgaaacaaatgatttttcacatctctttttactgcattagtcgccgctgtttcaaaataaatatcaaggtacgaagctacaatacttattagaattaacccagcccccagcggaacaagccaccgtattttatctaaatcactttgtatcgcagcatccgttatgtttccaaaaaaccaggcaaacgtaatggttaatgcaatatccaccagcattaaaccaaacagaataaaataagcccttttatgttttaaaacaaaaggtttcaacatatgaaccgtgcgcacaaaatctttcatagaaaaatattgtttaagtacaattttcaacttaataaaattggaagagtccatcttcttcactccaaaaagcaaataatttcatctatcctgtttgtttaaatagttccgtagcaaacctgaaagaaatggaaaagattgaatcagctttccccataaacaaatagagaaatgatccgtgtgcagtgtgaacttacttttcttaatgtaaacaagttttcccacaatagctgaatcaagaaccgggttatctgtgccgagattggtatctcctttgaacgtataatggtatacgtcaccctttcgttcagtgcagcacaaacgatgtccaactaattgccccgtaaaagaatagaagagggcgatatcaccttttttaagtaaagaaggctgacactcaacaaactgacaaagatcgccttcctgaatgagaggaaacatactgtttcctttcgcaggaatttcaatactgccattctcctggacaagctgctttaacacagaaaatgtttcctgattaactaacatgatggactaattcacactgaacaagatccataataaactcttcaatttcttcctcgtcaggttggtcatcttctgggaattcctcatgaatggcctttaaaatcgatgcaactgtctgctcttcatgcattaatgaccaacaaaatccacccactgcatttagtttagtaaccgtatagttatcagtatttaaaacgacgtattcatcatcaagtttcgtaacatcataacttttattttgcacgtaccgtttcattaagaaatcaactcccagaaagtattattcttttgaaaatgaagattatagactggaatagtggaaacaagcagctgcaatttttgaagaatattccttgtttcgacgtcactatattcccaataaaagactttatcgataaggtgaaggaatgcatctgatttggatattcgatctctccgattttgaagagattgatgtaaaatctggatacttgccaattgtgctgaggctatattactcgaatccaattcactgttaaacggtgaattatatacggtcactttctgatctgtgatcttgataatagaagcttcatcagaaaggagttctcttggatgtgatagcttcgcagccgttgattttccagctcctgactgaccggagaaaatgtgagctttccccttttcaatcacacaggaggaatgaacgagtagcccccagttatgatagttaatgaaagagctgtatagattcatgagagcatgctttagggctagttcatcgtgcacacatagggttgcttctttgtattctggatcgacctcgattaagtagtctgagcgacggtaggttattttagtaagttctttgatgatttggacgttgtagtcagtgaaagggtcgccataattatcgaataattgaataattaagtcaggagagttattgccaataagatgagtgttgcttattgataatatcttcatagagttagataggtgttgctgaatttcaaagacatgatcaccgattttaattaatgaattctgcataggcaatctccttcaatcagttacaatactttggagtgaggttaatagctatgctattaacctctgtagtttatttgtttttgtgtggcttctttggcttgtatggatcgtgtggataatttcctccattactgttcccatcatctccagatacaggaccatggcctctattccaactttgtgacgtctcaaatctaataggctggtgcgtcataacttttgggctttcatactttgtaaactgtttttgttcttccttcataccttcacccccctttttgttcaatataaagaacaaaaaaatgcaaccatacatttctttaacacaatcaaatgctggaatgttttggtaatgaatccccaatatgattaatctgattatataacacactttgttctttttaaagaacgaaattaaaaaaaacacactccattgaaattaaagttaaacagcctaacctcttaaacaagattaggcaggcttctttacctatttcccactagttaaagtaaggacattaatttcaggggtattaaataatcgaaagttaataaaagaaatagcatcgctacttccaagtccagcgctaacatactgttttgtatcttcatacacccaaagccctttcactcgacccctaggtggtaagagccctccattttcataccacggctcaggtacaaacaatgcacctataaaaggaaggcgaacttgccccccatgataatgtcctgcaatgataagatcataatgtctaaatttatagttcttttggttcttaatataatcaatttttgcatcaatgaccgggtaatggtttagagcaatcaacacatctgaatcactatgtgactcacctttactgacttcatcagctagcttcttttcatactcacgatactctggtaggatcgcgtattcaggccggactcttccattgtagtcctgtgtctgggattcgggtgtcatgagtgacaactcaaaatccacaaaagaaagtttggattcaccccgttgaatgaatgccacagactcaagaagggtcaggcctcttttctccataccggaaacgaactcgtttttcacaagaaccccttttgaattcaattcataaatttctggatccgtattaccaggagtaaaaagtgcattttctttgttattaattccatcgagtaacgtataaaaagactcataattcttactctctaatccattcaataagtcccctgtaaaaacaatcgcatcataatcgactgagttaatagcatctagaagcttttcttgatttttcccaaactctttttcatgaatatcagaaatctgaagaattttaaaaccttcaaactcttcgggaagattttcgattacaatgtcttctccaaccattttaactcggttattatcccattcggtgtaaccgataatgaaagaagctagaataagcaacgcaacaaaaaatgtccatctccgctttttcaatgatgaccgccaccaatcagcattcaattattaggttgccttcacctgattttgaaggagttggctaaacacatttcgtttctcattagcaagttggttaaatccgcctctttggatgacttcaccttcatcaagaacaatcacttgatcagcatttcgaatcgttgataaacgatgtgcaataacgatgatggtcattttacctttgagacgctcaagggcttcttgtattttcgattcgttttctgtgtcaagtgcactggtggcttcgtccaatatgaggattttaggctttctaagaatggcacgcgccaagacaagtcgctgccgttcaccaccagacagcttaatccccctatctcctattaatgtatcgaggccatctggtagcctcttcacaaattcggctgcagaagaaaattctagtgcctcccacaagtcatcatcattgcattcaggtgcaaccaatacaagattctcccgtatggaagtattgaaaagaaatggatcctgagcaacataactaatggaacgcctgagtgagaggagatgttcgcttttcaaaggaataccgtcaataagaacctcacctttttctggctggttcaatcccatcaacaaatcaattaacgtgctttttcctgctccagatctcccaacaaacgcagtcatctgattcgaaggaatcaagaggttaacatttgagagagcatatgaaccttgctgactgtatcggaaatatacattccgacattcaatctgttcgttaaattgtattgacttcatattactttctctcatatcaaattcccttgcttgatcacactcatgctggagggccttaacagctttgaatgacggaagcgtggttgcaatttgttccatagaagcttgaatacctgcaacccttggccaaagtcttgagaaaatgacaatgattaaggtgagttgaccaacctgagcattaaacaaattaatagccatataaataaaaaccgcaattaaaactgcagaagcagctttataatataattgcgacgttgttttcaatttagtatattcaatttgttcattctgcattttttgggtgatatcgctgaaccagtagattcttgactgttcaagcgtgttgcttttgacgtcttttattccatttatttggtcggtgatgcctgcaacatattgtctagcaagctcataattacgatttccaagcacaagagatcgtttaagaaacttcctattaaaaaagattaaaaccattccactaattaaaacgaacgtagtaattgtaggggctaataggaaagcaagtcctatttgaatgcaagtaataattaacgaagacataaattgtaataaagaatttgttcctgaacttgttcgtcctacttcagctaataaaatatttataagatcagactttctatttcgaataaaaaaactccaattagaatgaagtactcttttatatgtttctttacgcatataattgagaaaaccttgttgaatagacgtatttctaatagtgattcgccgttggacgacatgctgaataataacaagcactgtaaaaaacaaaagaataagaggtaacccccatgaagctggaatgtcttcaagaaattgaaaaaaatttgaaaaaggaatactttcaacatcaatatcgacaatacccgttataccaattaatggaactaacagaagaatgccgacaccttctaaaagtccaattagcatcattgcaataagattaaaataaagtattttcccagaataagaatgaagttgtttcaaaaaataaataacattactcatatagctggccccctttggggtagtactgatttcaactttctccatccccacagataaggtcttaatggataatagagaaaatgtaagtgctttggcaatggaagtgtctcaaaatcctcaggatagggatgtaaaaggctaattagaaagatgatcttctgctgaaatgacattaatgaaaacaaatggcgttgatgatattttgcaatatattctggaacgggttccgtgtgtaaattcaccatattttcaaagtaaaatatggcctgctgagcaagatttattgagtgagaatgaaacttagaaaatccttcaggaaccttagtattaagaaggttagaagctaaaacgatgctttgttcacctacattcagaaaatgaaaatcatttaataactcttttactttcacgcaatctagttcagattctataagttgttttatgtcttcgagccatcttaaccttgaccagccgtgacgtgcaccgtgagaagcaagaaataaaaacatatcttccttacttagtaagtaaaccggagctccagataatttactgtttctttttctatcccacaaatcattaaaacgcggttctctggacggaccaggatttagcctccagtgcacctcaacttttattccctttaacggatgaaaataagtgaagtgatgatgcctccatttccaatcatttagaatggtctcaatatattcatctttttcatacccctcacctattaacatctcatcaacaatctccaagtcacatatcgaaattaacagatctaaatcacttgaagtacgaagagagacatccccataaagatcatgggcaagaacgggtcctttcaaatataatgaccttacgttcttattaaagaacaaacaactaaggtgttccatttctccacttaaatggagcatctgaaacgtatttcttttataatcacgtgacaatctttcaatgacaaatggcggaatgctatcgttacctagactctttaatctcttatataataatggataaatgcggtgatgtttcgtgagtttcaggaataaatcccaatctacatctgaaaataagacagattgagtacaaaagtcagttttgatatttactgatccaagtaaattcataatcaaacgtaattctttggggacatttttcagcatcaggccaccagttttaaccataagttttcccttctgtcctataaattcagagttttttcgcgaactgacccactactgtgaatttttccataccttctgaaccagtaacgaaataaggaccgcttcttaaccatgcatgtgcaattaattctcctgattcatcttttgttattccaagatataacgtactttcaatccctcttttttccaacattctcatcgctgctatagcttttacaaggcactgactttcccataaagtatacttgctcacaatgtgtatggcttgtgagaccattcgcaatgtcttttgatgcagcacgtttgcttcataatcagtctcttccatctctatgcctaaagtaggaacgatttttgaaaatgaaacacttttatttaaccgtgctcttcctaagtaataataagattctagcattagacttcttgtctgtttacttaatgtaagatatgtctttatctttctcattaaactaattaatcctttcaattagtttttttccaaattaacttttataagtccctctttcattaattcatctagaaaggtataaacgtcttcctcacatgtatgacgatcaacttcaaaaacttccatcagtctcatcatgagtagatcaatattaatcggtcctgctatttgatcccaaatcactcctcccactttaccgaggttaaagtatttaccattatgaatacttaacatcactttttctccatccatatcacttacgatatttcctgtagcttgcgttacggtatcttgtgaagtcagagtgcagtttttaagcatgcaatttctctcctttgtaaatagttgataaaattaaatttgttagttcctccactgtaaatctagaggaagggcgtatagctcggtagcatcgaacctttcctgagacctgtgccgttatattgaaatgccattccattaaccctaatcgtggaacaaaaaaatttcgatacgtatgattaaacaaagtatgaatagcttgtagagaagaaattgtactaatttctacttgctcgatgtcgcttttacttaactctattatcccgccaagtggcaaaatctcattacaaaaatttcctttaacaggaactgcatatttatcttctctttcaaataacggcttaaattccctcttatccatcccaaattcttctaaacttttagaccataacttttgctgagcatacgatggcgttacaaaggggattttgttagaaaaagaaacagggatgacgtcatcgctaagaattttataaccacttgctacaaaagaagccgcaagtgtggacttaccagcacccgaatcaccaacaatagcatacgccttcccattaattgctatagcactaccatgtaaagctaaggtctttctttgtaagagtatagctcccatacaactacccagaatgtacaaccttattttatcttcgttaccttctccatctggtgatataataattttttctccattttcaacacaaaaaatagcagtgttttcgatcctaaataatattctttcttctgtaacgacaaatttccccttattaccttcgttcagccataaagatgttaaatcagaaatctcaattaccacatcacatttagaagttaacccagccctttctaattcaggaaaattaatatgactattcaaaataagtccgaatgatttataacttttcagctttggatttattgccaataaattcacctcattacatcttataagatttgaaaatcagcccttatactctcagaacgtataagggctgtaaattattattagtgcaatgtagcgattagctgtgatgatcagcatcttccgggtcaggatcattttgttctgcatcttctatccgcaagcctggaccagccatagtcatgtttatattcaatgattccaacaacggtttttcccaattctttttcatacattcaccccccttcagtattgtttatcaatgaatcttttcaaaattaggcatcgtattattattttaaatcgcggctcatatattaatgtttgatctggatcttcacccagttcatttatgagaatatttaatgtagggatatgaataaactctgatagaatagggtgagttaccatttctttcaattcaattagaagactattccactggttagacattcggtaaataccatcagcaccttgaatccctctagaacgatagtttaacctcactttatcaggcaataaacctttagtagatcttcgaatcagagagcgatcgattcctttttgtataaactgcgaatcaggtaaagataagcaaaaacgaatgatcctcaaatcatttgtagggtctctactccataatctgtacttcaatgaaaattttgtagaactagtgccatttccccaataaaaaagctttttaaattgattattcctagcttcaaaagtgtttgggattgtaagtcctctcatatcaatattattttgttttagtaatccttctacattagtacgaattgcaagattaggatttataactgctggaaaaggatcacctaaaccttttctacttctaaaagctctattacatacaatttcaagaattcgcttcctaccagttcctgtatttttatagtaaccttggatttcactataaagatgcacgaactttagtttttttaatagatctgcataataatcaaatgtagaaccccatgaaactgaataattccctctcgcaccattcagaagtaaactaactccagatttatttgcctcttcatatatccctgacatccaatatgaatttccgaaaaatttataaggcatttcaatcgtctctaaccattcgtctatttctgatataggacttcggttattaaaactaaggtattgatcttttatgttacctacatgctcaacagttgacttaataaagggtctctcatctgctactctactcctaggggtccaatccttaaatccatcagccggtatatagctaaatgtatataaaggtttattttcgctcttaagtctattagcagcaaagcttactattgaacctgaatctaatccaccactcaaatgtgctcctacgttccttgttgttctaacttgttcactgatcgttttactatataactctttgaaagcttcttcgtactcttcattagatttgtaaacggttttcctacttaagtctatagcattgaacctagaaagttttacattaccattactcactttaattgtgtgagagggagggacctgttgtatccctttataaacagttgtagttaaactaaccgtattgaacatatccggtatggctaaaaattcagcaacccattgttcatctaactttttatctacaaaaggtaactgaagaattgaactaatagtagtactaaaaacgaatttctgatgatttagatggaagtaaagagttctgcttccagagaaatctctagctccgaaaagtatttgatttttagcatcccatataaaaaaagcataatctcctaccaattgacttattatctcctctccccatttttgataagcaagtaagattaaccggctatcagaaatagtgctgcgatcttcataatcaatctggagtttattgaacaattcatttctattatcaattattgcatcagctgtaatggttaacttactattgtaatcaaaataggggagtttttcacctactgattctggggttatccattgggcatgacatccaaagaaaatattatcttgatgaagtaattcaatattatctgaaggaaatttggcaaatgccctcatcatttgcttgctatgttctatcggaattggttccttatttaaatgataaataccagcaattgcactcatatgatcccccagtaataagtatgttatttaacttcaatacctcgttccttataaagaacaagtattccaaaaaataaccagactcaaaattaatttaagtttagttaacttcaaagtatctagttctttataaagaacatttataaataaaagatatcattacattctgaagttgtcaatatgaacggcttgtaaaatctaaatattccaaaatattttccgttaatacatattatgtacaagcacaaagaataaaacggcatatcttattgtataaaaatactttaatggaggtatttaggatggcacaaaagattcaaattaagagctgcttaaaggcagagctacctcttctagatattggtgaatttggactttgcacggatacgaatgaactgtttattgggtctgtgaatggaaatactcaactagctatacgagattactttaatgaaatagacttttcggctattactccacatactggagatacactgatctttaatggggaaaaatgggtccctaacccagaagctatttatttcattgagcttaatagatggtcaataaataacactggttcagatcctgtatctacaacaattgggattaatagtgcgctattatgggctaaagaaattggctatagtagatgcaaattacctcctggaacttatttgatagataaaaatgataacattaatatgctaagcgatatgactctagatctatttaattgtattttaaaaaaagaaaataataatttacagagttataacattattaagatattcagacaaaaaaatgtgaccatactaggtggcactctagaaggggacaaacatgatcatgactattccagtggtggaactcatgagtggggcagtgctattacaatagaaggattaaatagaaatataaaaattgatagcgttacagtatctaatacaacaggatatggtatgagagttaccacagaatatggccatatatcctggctaccattgtcagaccttgaaagtgggacttttgataataatggatcactagtggatgatccgctttttgttagaacaaaaaaattcatcagcttaacacatccagaaatagatagaaatggttttttttcactaatgggtaatgggtacggttcttatggtaatgggctgaatttagataaaactccatttactgtatatttttttaatcaaaataatgttttacttggaactataactcgaaggacatttgataatgtttacaaagagtattttcctaatggtgctacaaaattcaagattgggtttagatatagtttagaacaaatattagaaagtaccatgactattcgatccatgacctacaccaaaggtttgtctatattaaattctgatattaaaaactgtagagcattaggcatagcaattacaggagcacaaaacgtaacagtagaaaattgtgaaataagtggcattggaggagttgcacctggtttcggtattgatgttgaagatggttataatatcaatcaaaatattattattagaaacaattacttccatgataataaaaatgggtctttggttgttattagtgcaagaaacgtagttgttgaatacaacaaactttatggtgctgttatactaggaggtaatagaggagaaaactacgtttcacaatataatttatataatggtacattaggaactggttcaagtagttctggtgaagaaggaacttttctagtttttagatatgactctatgtcaaactctcaaactactttaactaataatgcaatatatgagaatgtagtatttgataatacacgctttattttagagtctacaaattaccaaacaactaccttcaatcgttgtacattcaatttcaatttacctgattttggatggggatggattcttagaaaaggttcaattaatttcgataaatgtacatttaatattaaaaattgcaaatattattactttagaagcgaagcacattttggtgatccaatgaaaaacaactttactatgaccaattgtcaagttcattgtaatgccccttttggttcttattctgttaacaatctaattctcactaataatactttttatggcactcataatagtagttatcaatatttagacttccaagcaaataatgttttgattcagaataatattatcgatagtgttaacattgtattaaaaggactaaacgaaaaaccatctaattccactataaaaaacaacattatattgttagaaaaaaataatcttaactttggacctgaaagaagtgaaggattatatataaggtacttcgattacgttttcttccaaagcaatcaattaatattccctttggaagttcaaaataaaaaactaagaggaataatgtttttttgtgaaaaatttgtaagtataactaataactcatttatttcgtatcacactataaatacaattgaattattaggtgcttttagagaaagtaacgatgatagagttattcctcaactgaaagcaattattaaagacaactattatgataaagttaacgaaaacttagatgatagctttacaactcaacttcaaactccttaagcagtgaagtatctcaaatgatagctttccaggtaagtgatagtccgaatcaaagatgatagatgtggcactctgaaataggaccaaatcaaacttatactaaaatccttataaaaggggtcctttttcacagtgattaaggcagtgtatcacgcccgttcaagaaccagccataattggaaattgaacttttgattatgttcattggcacaacaatattcgaatccatagtgctttggtctatttaattgcaattgaatacaaccttgatatagctgtttagtttaatattgacatttcattaatcatctaagggaagatgtcgtagttatctacttgtcatccctaaaaacatcaaattaaagatagtttagacactatatttattatttcttttttgggcttttgtttccaataactctccttacccaatttataaagatattctacatctttattttttattgcatctaagtaaccatcctgaaaatattttctggcagcttcattgttaatactttccataagggcgctgttcaatacaaatgattctattaaacgcttaatttcagcttccttaagacttccgataaataaattataaagtgccgtcttaaaagagtttaataacattatactaatgccatcgcgatgagtttgaggtgcatctgaatagtattcctctataactctcctttgtatgtaatatccattaacaatatcgtcaaagaaatgtggcataaagttattcgttaatcctccaaatctataataatatagtgtgtcttttattactccaattttattgcaatttaaaaacacctctatattaaaatataaatcctctcctaaaaatttaattctatccaaaaaacttccgttttcaagaagtaactttttcttgtataatttacccgtcaatgttgctggaaaaggatggccgtgaaaatacgcagctactatttcttgtaaaatttcaatcttgtggtagattttatttattgcaaaatatttattatctccttttttcttaaatactcttccgtttccaattaccttgtaactattacaaacaattacatctaactcgcttgcaatcattttttcatataaaactttaactatattaagatctatccaatcatctgcatctacaaataaaacgtattccgctttcgcctcttctaaccctcttcttctagtttcaatactccctccattttttttatccaatacaactatcctcttatctatttcccgatattttatacatatatttaaactattatctgtagaaccatcattcaccaaaataatttctatatctttgaaagactgattaattatagaatttatgcatttttcaagtttattccccgcattaaaaatgggtactataatactcaccttactcaattaaatccccccttagtttaagtggtttattcccaatgtatattttttttaataacttttgctggtacacctgcagctaagcacctctctggtatgtctttattaactactgaacctgctgcaattactgatccatgcccaatgtttactccttttaagatcgtaacattcatgccaatccagactttattcccaatattaataggtaaagatacatgtgaaaaaccccttccgattgtatgattatctgaatctcgtattgtaacattctcagaaatcgctactttttcgccaatacatattttattaaagcaagctatgtttgctccataatttatataccctgatcccaaattcaaaattgcattttcactaattgaaacacggtagcctgagtataaagcgaaatctccattcaccactaattttgaattcttataggcaattaatgaagactcataatatctgttttttggaaaagtgaaaccaaggtgcaagtatcccttattatttatagtacaagttttatctattctcacatgggaatttttatatacaaaaattctttttcttactaagttaatttttacaattttcaattttaaaacaaactgtattttttgaattatcatctttatataattcaaaattacttccattatttatcactactttacttttttatttatcaaaagcaagtttcattttaagattaagtaccatcgatataaaaactgatttaaggtatttaaattccttgaatttaaaaaagactaatacgtagattgtatttggtactagtatacaaatcgcccccttaataagtaatgagctgaatacctgtttcatatcaaaattattacacagaagagttgtaatataacaagtacaaatagtgataatagaatataaagcatatgattgaaaatagctccaaacagatctttcgaaaatattcttatacaccagtcttggaatattccaaaaaactgtggctaatgtacttattgttgtacctaaaaaaattcctaataaccctagataatttacgagaattaaagaaacccctaaattaatactcgcttcaattagaggtacatacttatcatgtacaaataatcccccctttgttttaaatgttagaatagatgttctcattcccgtcaaataaaaattgattaatattacaattaatgttaaagagtctagtaaatacccttctcctagccaccaatttataaaaggttcaagcatattatataaaaaaataacactgactgaatatatccaaaagtttactaaataggtgattttaaaaatcgaaaaacttttgtttttatcttctgttgctattaaattgccaacactagctcctattccatttaatatcggtccgaccaaagaacctaattgtcctattatcatagtgtaattagaataaattcctacagcaattacactaataaatgaggctattaggatattatcagttccaaaaactaaaaaggttccaatattgtgtaaaaatatagctttaatatttattataagtttattccgctccaaactgtttagtgggtgttttactttagtcagaatataattatatctattatttataacaatagagttaaatatagtttgtataatgaatattaataactccactgctaaatataatatatagcttcctgtataaatcaaaattattattttgactattgtaattattacttgaaaaatgaagtttattcttaatatcacatattctttctgatctgcatttattaaagccaccttatgagcatttaaaaaagtgataatatttttaaatacaaataaataatatataatcgaaaagaacggaataggaccctctttacttgttaaactaaaaacaagtggatatatagcaacactcaataaaattagtattattgataaaactatataagcctttttatatagctgaataaaagatatcaccttatatttatcttgttctgctagcggcttataaagactatacacgatactactccctatacccccttctattaaagcaagcatcgctagaacatttgttaatagcgcattaatccctaaatattctacccctaaactatctaaaaaaacttttcgtgatacaaagcctaacaaagccattatcaactgagataataccccaatatatatattgtttatagaattattaaccctcattttcactacccacttagattatgtctctttttcaagtttatatgtttccattattttgcttgaacgcaacttgtacattagcgaggctaataaaggacaccaggcaagtatttgagcaaaaagtttttgtttgaatgaaaaattcttattgctaagtatcttccagttattcttcttgatttgcatactaacttttcttattaatttatagttctttacagtcaagccatcaatcactaaatccattagtatagtctttaaagatgtataaaagaaatacactaaatcttgacaaatatcaggataagtttcttgtataagtccataagattcattataatttaaaactacgtcaaatcttttctctgaaaatcttccacgagtgatacttgttgacctcttgatatagttatataattcattttgagtgtaaataatgtaatttgcttttgcatagattttatgcataattgctagatcctcaccaaattgccttccttcaggaaatcgttctgcaatgaacaattcttttttatataatttattccaaacggcaactccaggaagttttccatgatacatactttttaaagcttctttactactaattttttgtagtagtagattttctttacttcttttttctttttcactccaaaaggaacaggcacttatatcagcattattttctatgcacattttatatagagtttcatacattattggatcaatggagtcatcaccatctacaaaacctatatattctccctttgctatatccagccccaaattcctagtatgtgaaacaccgctatttttcttatttacaactactatccttttatccttccttttatattgatcacaaatttctccacatctatcagttgaaccatcatttattagtattaactcaaagtctaaaaaagattggcctaaaattgagtccacacatttgtttaaatatttttccacattataaattggaacaattatactgattttgggcataaaaaaacttcctttctttttgaggaagctgattttcactttaatatagcttgtattttttttatttcatcttcagtgcctagattctcaaattctaagttgttaattagttcaaccctcaacctcttgtttttaataatttcaattatagataaaaaaatcgactctgaattcatatcaactattagaccattttttttgtggaatatttgattcttcacaaccgaaaaatttgtagttactatcggtttttttaatatttttgcttccgctaaagctaaaccatacccttcataacgagaaggttgaacatatatatcacattgttttaaaaatacatatggattttgaaagatacctaaaaatataaaaaaatccccaatatttaattccttaacttttttttgtaatttagattttaatggaccttctccaataacataccatcttatattgtatcctttattttttaacttcatgcaggcatcgatagctaaatctatacctttagcatgtactaatcttccgatagttaatattctaataccatcaaagccatcctcctcaaaccccccattttttttagacattgttttaattaagttaggtgaaattatatcgtatatagtttccgttttgtttgataatatcggtatttcccccaggaaaatccttttattttcttctgagacggctattacattatcataagattcatagtgcttttgatcaatcctcttattgtaggacgcttttttataatctgtattgacccaacaaacctttctaattgccttgattttttcattaacataataagtaggaacaccctgactatacgcaatagctacatcgtactgattttttaattcattgaagttacgttttgtccagaaccaatttatttgtgcgctatggaaactttttttagttattgggcatcttagagataaagcttttccacacctaataaacagctccaaatgcttactattttcacttctagaaagcttaatgagatttacttcattaggaagtaacgatttgtataaaccatctgtagtaaataatcctaaatccacattatattcttcataatccaacaaattaagtaaagaaagtaaacttttttctgcaccaccactatttaatgaatctattacaaataatatattttttttcataatatattctctatagtattatttaattctaatgagtcatttaaaaattttctagagttctcaattttagtctctaaaaacctttcgcaattttcgtagtcaattttcgaacaaatactgtctacgtcatattcttggtcaattattctttctgacaaattcaattcttccaagaagtccctcattcttgtattgatggactcatatcggttaacaatagcaaaatcttttctatataataccgaaaaaacagctgcgtgataagaattggatataataaactgagcatctcttattagtgaaatgaaagaatcaggccctacatacttgaagtatttatctgcatagtctactttcccaggattcacactgtatattctataatcttttaatcgtgatagctccaaggctaattttcgaacaatagaattattatcgaaatcataaacaagtatatatttttccttgtaacctgatttagaaatagaattccattcttctttattaagaagtagaactggatccacaacgttcattacatttgtcaatcctagttcttttaatatagatttcccactttcttctcgaacactaactgcgctaagatttccaactctctcttttacaaacgactttacttcgtccctaatagtctccgttgcaaaactagcggcataagatattctaagtttacttttagatacaaattctaaataaaaagatggatctctcccattttcaaaagtactattccaaatctgatcacttccacatatatatgcatctgcaattggagtattatttttcaggtcgttaatggttttataacgagctttagacaatttaagggttttacgggtaaagacttcaaatgctctttttcttaatagaccaggtaatctattagggatttttatggttaaataaatcagtgttgtcagcttatttttttcccatttaggattgtcgatgcttaacaagttataatgattacttaaataatttggcctataatctattatttctacattatgccctagattcgttaaatactttaataatgcatatgactgtaaggaggctccatgattaaaaacataatggcaggttattgtgcaaattttcatactatccctcttttgcaaattattccattaattcacatagtaaattaatactgttattttcaaaaaaatttttttcacaatttgatttaattttatgtctaaattcattattacggtacatattttctattccatctactagtccatttgtagataattcacatattactccatcatacccatttaaaacttgatcttttgctgtaggaaaatttgttatgagaacgggcttagaaagtacttgagcctcactgatggttacagctttcccttcataccttgaaggctgtacatagagatctgcttctttcataaaaggataaggattaacctttttgccaagtaaatgaaattgctcatttagaccatacttatcaattagatctcttattttcttctcatctccaccgtaaccgacaacgtaccaggatatgtttttatatcctcgttcctttaaatgcttcaatgctaatacagctttatcaatacccttagcgtgtgaaagacgagctactgttatgattttaaatctatcatcactttgcattggattatctattttttcttctgccatctcttttatcattgctggatcattgatattctctatcaccactaccttcttctttaaagtaggatattttttgagaaaagctgacctacattcttcagaaacagctataatgtaagtatatttcttccaattatcaagatctaacataacatctgtatcaatagtagaaaaatctgtatgaatccatgcaattttcgtcttagcttttactttttccgcaacgaaataatgcggccataagtaacttattgccacatcatactcttgttctaaacgaggtaaaaacggaagagcatatttccacatgtattgcatttgtttataccctttttcctctgagtgacttctattggctttgtaccttgaatacaatcgagttattccaactggtatgttaccagatctaaggacttctccaatagacatcctgaatgttttataagcaggattttcttttaagagccgaggtccttcaggtaataaactcataaaatcaccggaatgactgtataacattaggtcaacatcgaagatgtaataatcaaagtgatttaacattccaattaagcttctctcaacacctcctacttccatatcaaaagaagcgatcaacactttcttcataaatacctcctcctatttcgccaacttgatatatttcggatagtgtcgttatacctgtttgcattgaataattattttttttaaaaccttcttctatttgttttggatctaacctttctttccccactgcatttaatattttttcagcccatcgtgctggagattgatctagtgacagagaagacatttgcccaagatttaaattagcttcaggctgtatcgcttcagaaacaatacaagggagaccggctgcttgtgcttcgagtagtactaatcctaatccttcatagcgtgatggtagaacaaatacatccatgctatgcatcataactggtatatcatctctaattcctgtaaagcagattttatctaaaagatctactttcttggcttctagttccacctgtgactttagatcaccctcccctactagtaggagttttactcctttatttcgcaacagaagttctctcagtatctctaatagaaacaaatgatttttggcatcgatgaatctcccaacatgaccaatcacaatgttgtttcctagtccttcttgtagcttgaaagaggctacttttgactgggggtctttcaaaaagggcgaatagtctattagatttggaaaataagaatatcttctattattaattaacttttttccgtataaatatatcccagctcctttactacaagctaagaaatgagtagagaaataacgtattaatacgcgcataaacttaatatatgtctttctagcaatgctattagtatcatcagaagttgtatgggcgtgagctattctcatttttacacccgctaaagcagctgcaacattagcgattccgcaatggaaaagagtatgcgcatgaactgcttgatagggcccgttaactttaattgagtcatatagttctttaatagatgacgttttagaaagcctaatcactttaccacctagagaatcaatttctttatcatagtgagcttcaagatcagagtaagaaataaaatcaaattgaatcttagttcgatcaatattcctataaatgttcattagcatcgtttcagtacctgctctattcatcgctcctacaacgtgaagaatttttattttccggcccatgacctccctcccttttaatttctttttactttgctcaaattttcattctgccacttaataaactctaaaatcgttttatactctcgtaactgctctttccgaatacctgaactccgtaactcttctacaaaatcgacccattcttgatctgataaatgaggtcttttttcatcttcttcaagtaatacattcagctctacattgagaacataagctagtttctccataacctgaatagaaggattttgtctaaggtttctttcaatgttactaaggtaagactttgaaacctttgccctttctgcaagctctgacagcgtgagacctttggacttacgaattttaaggatattttgtcctatcatgaaatatacctcttcatttctgactcataccatttccctaactggttctttcatacgaagagcctttttaaagcaatcgataatatactgttgatcatctactaacagattagatccagagggaagacatatgcctgacctgaatagcctctccgctacgtgatcattttccttatgaggataatatttcgcacgattgtacaaaggttgaagatgaagtggcttccacactggtcttgcttctatgttttgctgtcttatatcttccaaaatctcacttgaagttgagagtgaatggttattaatcgtgagtgccgtcagccaacgattagacattgtatttaacaattcaggcatgaactcaacttcctgaagggtagaaaattcacgaagatacttatcgaataccttccgtctagaagcaatacgttcatttaagacttccagttgagctcttccaactccggcaagtatattactcattctgtagttataaccaagttgactatgctgataatggtgcgcttgatcacgtgcttgagttgccaagaaacgcgcttgttgaatcgcatgcctatcatttgaaacaagcattccgccacctgatgttgtaatgatcttgttgccgttaaaagaataaaccccgaatttacctagagtaccacttgcctttcctttgtaagtggatccaagagattcagctgaatcttcaatgaccggcacttcgtattgattacacaaagttagaatttcatccatcttggcactttgaccatataaatgaacgacaataactgcttttggaagtctctgttccctagcagcatctactaaagctctctcaagtgcctgtggagacatattccaagtatctggttctgaatcaataaagacaggttttgctcctagatagagaatcggattagcactagctacaaacgttagcgttgaacagaatacgttgtctccactagtaactcctaataaagaaagagccaggtgaatggcagcagttcctgaactaactgcaatggcatcactggctccaacgtaggtggctatttcattttcaaatgcatctacatttgctcctaatggtgcgatccaattggaatcaaatgcttcctgaatgtacttctgttcatttcctgacatatgtggcggagaaaggtaaattttattgtgcaatcacatcaccacctcttcgtatgatttttgcaggacatccaacagccgttgaaaaggcttgaatgtcttcaatcactgttgctcccgctccaacaaccgaccaacttccaattgatatacctgggatgacggtaactgatgctcctatatgtactccttcaccagttgacacgttcccagttaatgttgcgttaggtgaaacatggcagtagttattaattttgctatcatgttcaataattgctcctgtattaataatagagtggtgaccaacgatagctttagcgttaatgaccacattaggcataatcactgttccgactcctacttttgcagttggactaacgatagcagaaggatgcgttacagttaaatactgctctggatgaagagataattgctcggaaaccttttttctagaagtattgtcaccgatggcaatcacaacccttacctcaggttttagatattcatcaatggactcaatgggagcataattaataccattttctattgtatgtccaatgtacttgttatcaagaaccgcaatgattttaaaattgagagatcggatcatttcttgaatcactttgctatgaccaccgttaccgattatgataacgtccatatcaaatcacttctttcgatcctttgaatttttccataggtacttcttgttgttggttaatcccttcctttttcaccacttttaaaatagtgatcattaaaatttttaggtctaataaaaaggatcggttttgtacataccaggtgtctagtttgaatttctcttcccaagagatagcatttcttccattcacctgtgcccatcctgtcatgcctggccttacctggtgccgaaccttttgttcttcggaatagagtggtagatactccattaacaaaggacgtggtcctacaagactcatttctccttttataacattgataagctgaggtaattcgtcaaggctgtattttctgagaaacttacccaccttagtaactcggtgctcatcagaaagtaaatggccattctcatcggttacattctccattgttcggaacttacataaaagaaatggttcctcatctagccccggtctttgttgcttaaagatgactggagttcccatatctttcttaacttttagacttaaaatgcctataataggcgatagtacaacgagtaaagttgtcgagacggtcacatctattaatcgcttcatttcactaccctaaggtgtatctttcaagttaatcacactagcagaaagaaggttgtctctgatctcctctactagatgtgaagccgataaatcaccttgcttattacctttatctctagctagcaataagatttcttgaagtttttcttgtgtaatcccaagtgttgcccccacgtaactctctcctttatcaatattatttatcatcaccaggttaaaaaattgctcttataaaagatatttaggctaataacgttttcgtaatagtaataagctagataacaaacaagaattccgtaataaataaatttttgatctctctgtttaaagagttctacaacccaggaaataagaatgagctgatagagtccaaagtaaatggagaacctagcaaatatccagctttgagttgagacaatcataaataccacgctgagtagtgtcatgtttacgatcacatcacttttgggaaacaacttcttaagtttttctcgtcccagataggctagtatcaaaggcgctgccatgacaacaactcttaaactacttgcccccccttcattaaaatctgcgtagtcaccatactgagtatcttcaattgctgaaaacagaattgaagagaatttcccaaatcccataacgataataatcgataggagaaggagtgctattgttgctttagaccacggtttaaagcgaacaacaaaatagataggaagtaagataagtgcactttgatgaataaatgatgcaagaattacgatcaatgaatatttgatgaagtttccttctattaaatatttcgttgctgtaaaggcaatagctccagctaaagcctgtcgaattccattcattgatactagaaaaagcccgcccgtaatatagacgtatagactaagttcaatccgttttgaatagatagcaagaataatgacgattaaagcatttgtgaaaagggcagttgtaaaaatcatgatctgtggatcagctgatattgtctttagaagcatttgaagaataccaaatccgatatctttatgatttaacacgtactcccaggtaaaggtgttctcttcatagatattgacataattaaaggtgtctccaatgtttgatctcagacctgctaccagaatgagtgtcagcattgctccaaataccaacaatttacttggtctcaagatctgtgagtatccatgagtaataactataggagacgcatacctcgcaaaataaccaaaaataaaaactatggcaagagtgatccatagaatcgtcataagtggtttcctttcaatgaaatattcaattatataggactatctaatcttgtagtttttgccataatgtacaaatacaaagctactccaaaaggggtagcgactattgtcaaaccttttgctggtgattcacttaagtacttcatgtttcgttccattatgctgcttgagacataatgaatagcctgtctgaatttatacgcaagatttgcaaatggcagtttcattagctctcttcgataaaaggcaaatccttgagggtttttacggtactgcctgaacatgttaagagaagacccatcttctaaatattcaacacaacagaggacttcatttaataaaatcagttcaaaatactgatctagcttataatatttataagctaatcctacatacttctcgttttcataaaggggataagtgaaatctcttgttaattccgttcggtaaacgagctttttatcaccagttatgttgtgtctactatagagatgaaaaagagttgagcgcttcaaattttcaggaaaacgtgaaccaatcagttctccattcgtatcagaatcaagtccaatgattccgctcacctcactgcttccgtatttctcccagcaggttaagattttttctactgcatcatccggcatataatcgtctgaatcaatacacacattcaattctgtttcaataacttcataagctgtattatgagctccatgcataccttggttttcttgtttaatataaataatttcaactgaacgctctttaatccagtcacttaccatctgttccgtctcatctgttgatccatcatcaacaatgagccatataaaccctttattcgtctgtctttttaagctttcatagcagttagaaagacaaaaggctctattgtacgtgggggtgaagactgttaactttttcaaaagtttccctccccattttcaaataatcattctgaagttttagcgctgtttttcgaatatcataaccacttgtcgtgaatgatgaattagcattttttctctcatgtcctgactcgacattctgaattaatccagttagccacagcttcgaatctttcaatgaaatctgatcgaccaggttcaatccaagatcaatctctttcgtaatatgagctgaaattaaacaaggtaagccggttgcctgtgcttcaacaagagtaactggtaagccttcatgaaaggaagggaatacgaacacatcaaatgcttgtaaaatccggttaatatcgctacgaatgccaatgaatttcaccttgtttttcagagataacttttttactttcttctcaattccctcacgtaatggcccatcacccgctagtatgagaactgaatctttcttcacttgttggaagctattaaataaatcaataagaaatagatggttcttctgacgagcaaaacgtcctacatggccaagaacaaatgttttttcatcaatgtttaattcttctctaacactttgtcttatttcctctgaaaacgaaaatttctcgtattcaattccattttttattatcgtaggtctttttacttccttagaataaagccaactgcctgcaagttgagaacaagcatataaatgtgtagcactcctctctatatactgaccggcataccatttatatactctagttacagtacctccttcactactcgtattatgactatgcgcaatacgatttaagatcccagcctgcttagccgctcgaagtacaagcccgctcattttatccaaatgtgaatgaacgatctggtaataggagtgacgttgaaaaaactgatttaactctctcacatatcccatgtgacctatatcacttacataagggatgcgataaatctgaccacccattgctttaatttctgaatcgaacaccccttctttacaggtaaggaagtcaaattgcactttcgatcgatcgatattacgatacaaattcatgatcagcgtttctgctccgcctcgattcatgttaataacaacatgaagtactcttataggactccccaattaacctcctccgtttcttttaggtaagaggtgtaaatcatactcttatgaagcaggatttgatctacactgaattctgatatcattctttttcgaccacttttacccatcgcttttctagtaacctcgtcgattgccatcctttttattttctttgctaactcatctggacgttcattttgaacaagccagcctgtttcattttgtacgacaagctctcgatgccctctattttctacagcgattacgggaagttcacacgacatggcttccatgatgttaactggcaaaccctcacgtaaactggaagcaaccgctacatcacacataggaacaagttccttcaaatcatttcgatagcctagaaaatcaaccatatgactgacaccaagatgatgagcgagtattttgcaactttcaagaagagccccttcccctgcaagtaataacttcacttttggtagctcgtctttcactaaagctacggcttctagcaagtatttctgatttttatttttattgaattccgctgcataaaacaataaaaaatcatctggttgatacccaaatgattgtcttcgaacactcttttcttcttctttcaaaggactgaatgaatccgtatcaattccaactcctcgtacatgttcaatctgcgtagctttgaaacgttccattgcgatctgatagtcttcctgattgattgtaattaaacaatccgtatcattcgctaactgcttttcgattggataataaattaaccagttaattagtggagatcctttacaaaagtgaaagccatgagcagtgtaaatgactttcgtgccggtggctcttgctttacgagccgctaacctggccagcactccccccaaaggtgtatggcaatggataatgtcatatttattataatccattagttgtttcagtttgttgtatgcctcgaagttctgtattctaaaaggtgaacgctgtatcggtatgttgaatttttgatccgtatgtggcaatatgatttctccactcgctgcaacatgaacctcccatccctgttctttaaaccacttcaagtaaggtaaatgaaaagccttaaaatgatagtccactgttgcgcaaaacagtactttctttgtagtcatttctccacctcctatacctgggtcattcttaataaagaacattcaatcatagaaattaacctgaaagtagtggttcggactcaacacgatgattagctagttgcaacagtctatttcgcaacgtttcatgatccatatctgcaaaagtttcaattagttcttcgatttcctgtaaatacaactcagacgttttccccacatagatgtttggataaacatgttctgcatgtacttcttctttatttagtaactcctcgtataacttctccccaggacgaattccgctatattcaattccgatatcatcaactgaatgacctgataacttaatgaggttctttgccagatcgacaattttaacaggttcacccatatcaagaacaaaaatttctccaccttcagcaagtgtccctgcctgaataacaagtcttgatgcttctggtatcgtcataaagaatcggatcatatcgggatgagttactgttataggaccacctttttgaatttgtttcttaaacaacggaatgacacttccacgacttcctagaacatttccaaatcttactgccacgaatttggtagtactcttgcggtcaaggttttgaacaaccatttctgataaacgctttgtagctcccatgacacttgtcggattaacagctttatcagatgagatcatcacaaacgttttaaccccgctccaactagctgcattggcagcattcaacgttccaattaagttgttttttactgcttcttcaggatttctttccattaaaggtacgtgtttatgagccgccgcatggtagaccacatcaggctgatagcgtcccatgacacttaccatttttcctgcatcttgaacgtctgcaattgccgtaacaaattcgatatctgtatttcgaaaaacttcttttaattccatttcgatcgagtagatgctgttttccccatgaccaagaagaatcaatgattttggattaaatagtgagatttgtctacaaatttctgatccgatcgatcctccagctcctgtaacgagaaccgttttattcgtaatcgagtttgaaatcacatctatatctaactttactggttcgcgtcccaataaatcctcaactttaacatctctaaactgattaacggaaacttttccagtcatgagatcctcaagcatcggaaggatttgcgttttggcttctgtttttgcacattctctgaaaattttctgcagctcttttttatttaacgatgggatggcaacaatgatgttttcaatgtctagttctttcactttcttttcaatcaaatgaattccaccaagtatgggaattccataaacgtctagattttgttttcgtacatcgtcatcaataaatcctactggcgaaaggtctgaatcattgtatttaagcaattgtctcactaccatcgtaccggctgaaccggctcccacgatgagtgtcttccgcttgctattcgatttgttcatcaccatgtcacgatacaatctccaacaaaagcgtgaaccaccaattaatagtaaatgaagaatccatgtcgccatcaacaaccgaaatgagatatcttttaaaataaattgttgaaaaatggctgcgataagaatggaaaaggtaaccgtttggagaataatgactaactctcctatactcgcgtattcccaaactttcttatacaggttaaagcgaaatgaaaataaatgatgactgattaagattacggctgaacttaaaacaatcgaaaaggtaataacgtggaccgttgcaccaactagaaattgactaaaaaagatggcagttaacacaatacatgaatcaatgaaaataaaaaaaggcaacctttgtcggtaggtcatgtctttcctcccctcaagttactacttcaataaactctttcttctttcaatagcagcatcaatgagtctactaattgttttcaattggtctgctgaagcatcctgtttaatgtatctgatcgctttcttaattgatttaggataatcttcagtttgtttcactagcattgcccccttagagaataaagttctaagtataaggttctataaaacctcatacttagaactttattaagaacacataattaaaataataaatgggcatctaacccatcctcacaccacaccatcgacgactagcgtctaaggtccacaaacccacagtatgaccgagtgcctacattgataatggcaagaaggcatcgccagattattaagttgaattactccattcttaataaagaacaagacgctacagttatttcttattaataatcgctccaagaaggttcgcatgtgcaagttctaatactcttctcgcttttgcagcatcctcaagatctgttttccctctatttaatacaagaataatgccatcgcatatattagcgagcattcttgtttctgtagacgataagacggacggtgaatctacaagtacaaaatcataattttttccagtagttacaagcaattctctcatcatctcatttccaagtaactcagcaggattgcttgcatactgaccacttgtaagaatctctaatcttcctatctcagaatgatgaacggcatcttgaaaactttttttataagttaacacatctgttagtccaacttcgtttgagactttaaaaatttgatcaacgattggagagcgaagattggcatcaattaaaagcactttttctttctgttgtgctagtgaaacagccaggttagcagtcatcgttgatttaccttctccaacaccaggagaagtaataagaaaaacacgttcctctttttctttcgccaaaaagcgcatattcgttcgaatcgtacggaactgatctgaaatgatagagtttgaatgagaaagagtaatgagatttcgtttctttaaggtagctcgtccctttttacttgagatcaactgattcactccttacctcgtaacttctcgcttttcttttctttgagacaaatttctttttattcatatttgaaacacttccaatcactggaacgcccaatatcgcttcaacatcgctttcacgtttcacagttccgtccaatgaatctaacaagaagattaagcctacacctgcaattattccgaatacggcagcagccataacaactttattttgcgattcgttgataggatacggattgagtttcgcttcagataacaactgtacttctttaaaatcaagaagcttcacgacctcacttttgtatgttttggcagtagcatttgcgatggcaacggcttcttcgggatttgtatcgataactgagattcgaaccactcgtgattcatcaacttgctcaaccgtaattcgatttgcaataccttctgcagaactttgtaaattcaaatcttttttaaccttttccataataatggggtctttgatcataaccatcagagttttcatatcctgatcttctgtctcaacgataatccttgtagaagtttcaaaaaggggtacgtaagtgtattgactgtacaagtagcctccagcagtagttagaaaggcaaaaacaataacaatccaaaaacgagattttaatacagcgaaatattcttttaaatttatttctttatcctgagaactgctgctgttattttcataatgaaatttagacataaggcccaccttttttatagagtttaactctaaaatatttttctttataatgaacacccttctcccaaattccacttacgcattgtaatcatctctatgcctttacatttcaaacaattgtgattatttactattttagttctatataaagaacatgtcaacagacaaatctaccgttttaactaagaataaggaagagcagaagctagaaaaaagagattctttccatattcccaacctcctttcttcataaacccctttgttactaccttttctctacatatttatataaacatgtagaaataatgtgaagctgatttgtcgaaaatcaaaaaaaagagcgttggtatttttattgttcgctggtatctatatttggagttgaagatagctaatcatccatttctctcctctgtacttctttacttcttaggggtcaggctcgagcctgacccctatccttcatcaccgccacaaaatccccagccttctcctcaagtatctgcctcgctctttccccatccaccttcaacaaaatcatcaacaccgcaacccgtgcatctccttgtgcctgttcactataccgcgctgcctccccttcactaacccccgttaactcctgaataatcgaaaccgttcgctttcgtagcttttcattcgacgcctggacattgaccattaaattgcgatacacctttccaagcttgatcatcgtggctgttgtaatcatatttaacgccatcttctgagccgttcctgcttttaatcgcgtcgatcccgtcaccacttcaggtccgacaggtagttcaattggatatgtaacgattttagaaagcggtgctttcgtattgcatgaaatcccagccgtcttcgcacctatttcatttgctgcttccatcgcaccaagcacgtaaggcgttcttccactagacgcaatgccaatcacgatgtcacgcccgctcacatgcttccgtacatcttcagctccaagttcctgccgatcttccgctccctcaatcggataacgaagcgcctggtccccgcctgcaattacgccgttgacaagatccgccgcaacgccaaaagtaggtgggcactctgaggcatctaatacgccgagacgtccgctcgtaccagcaccgaaataatagagtttcccaccatttctgatcacctcaacaacctcatcgatcactttttcaatctgcggtagggctgttttcacaactccagcaacgctcgcatcctcctcattcattagctcaataatctcaagtgttgaaaactgatgaagatgttccgacttcgcatttctcatttccgttttcgcattgctttcatcagccatttgcatctctcctattcgttatccgctcatgacgtgataagacgacatgagatttgattttcgttcttctgtaatcggttctccatttacaatcaaggcacaaatacatgcgcctactgctggtgataaggtcgggaaaaacacgttactaacgccgcttttccttacttccttaacaaacccatcctggaaaaaagtcgattgcatcaatcctccacaaacgacaagcctaccgctccggatctcaatcacatcaattagttcgctcaacttccgataagcgtgctgaatgagacccaaagctgtcgaattttgcttttctgctaggtcgatcaccacttcagctaaagaagcgattttcatacgcgcatatgaatcctcataaatcgccgtaattatctcgggggcatatcttaactttaagaaagaaagaacttccctacaaaaagcttcatctgtaatcgctcttccatcatgcatcatcgcaacggtgcgaagcgcatgctgtccaatatcatagccgctgccttcatcgccaaacaaataaccccaaccacccgcacgccttgaaccgctgacatctaaagcataagcaattgaacccgtcccagcgatcaaaaccgttccttccatggaaaaggttccgcttgctaacgcgccgtaggcatcgttccgaacctcgagtcctccttcatatcctggcaggacctccaacagccactttttccagcgcagctgatcttcttctcggtcaccacccgccgttgagacaaaaacgctacaaagctctccatcttttacaccagacagtaattccgtagttacctgatgaatcgtcgctcgaacttcttcttccttacgtgattttacattcgttgatccggcaacacttttcgagagaatgacaccatcctgattacaaatgagaccaaccgtcttcgtgccaccgccgtctatgcccatatacacttttttacttaatggcaccctgagtcagtccttccataaattgtttcgatgcgatgaagaaaagcacaatcatcggcaaagaggctaacgttagccctgcaaaaagcgcgccccagtctgcagagtattcaccgaaaagcgaaagcatgccaactggaatcgtctttttcagatcatccgtaataaaaataagtgggaaaaagaaatcgttccacgattggatgaattgaataatcatgacggttccaagcgctggacgcattaagggaagaacgacattccataaaatacgcaggtttccagctccatcgattcttgccgcttcttcaagctcgcgaggcatcgttctaaagaatcctgtcaaaataagaatcgacaggggtatcccagttgccacatacataaaaattagcgaccatagggagtttaatagattcaaatctttcattaaaataaacaacggcacgatccctagtttaatcggaagcatcatccccatcagaaagaaaaagaagatcatgttattccaggcgaatgtgaagcgtgcaatatagaaagcggcaagtgatgaagtgattaatatcaatagaacagaaatgacgctgacaaaaacactgttcataaaatacgtcgtaaatgggatcatctcaagtaagttccggtacgtatcaaggttgaacgtcttcggcaatgagagtggacttgtgaaaatctccgcgctcgttttgaaagacgaaagaatcattaataaaatcggatagatactgatcgatgcgataagaaaagcaaatacatagtaaaacggtctcgtccagatcgtatgattcataggatcgcctccttacatgtccacttgttttttctgcatgtagcgtatataaagtgcggtaaagaatgagataaagagaaagagcacaaccgccagtgcggaccctaatccgactgccgtcgttgatcccccggcggagccgccgaatgcaaggcgataaaagtaaatcgcaagcgtatccgtcgaatgataaggttctccttgcgatccctgcatcgcataaacaagttcgaatgcctcgaacgactgaataaacgtcaggaccgtcataatcatgaatgaaggaaccattaacggaagaacgattttacgaatcatggaaaggccgtctgcgccatcaagcttgcctgcttcgaacaactcttttggaatcgattgaagaccggcaaggaaaataagcacgccgaatccgatgccataccagcagttaacgagaattatcgaaataagagctgtatctggatcaccaagccacgctttttggagctgttccaaaccgagtttttcaagaatgacattcagagcaccgtagtttggatttaaaatcagcttccataaaaatccgacaacaataacggataacagtcgtggcaggaagtaagcaattttaagaaactccgacccttttacctttttataaataatataagccagaataaaagcaagaccgttttggaaaaccatctgtagcacgaaataaagaatgttgtgaccaaaagcattccagaaaagtcctgaaaacggctcaagtgtaaagagatccttgaaattctttaagccgacaaactctccgcgcacaattcctttccaatcaaaaaagctgtacgttaatgcggcaaatagtggataaacaataaatagcccatagatgagaagagcaggaataggaaaaaggtggatggtccaccttttccagttcctctccttcttaattttgacgactgaatttgaattcgtagctggtttcatactctccgccccttatttctgtagtggctcataccatgactgcgcgctttcctgaaccgttttcgctacttcctccggcgtgcgttcaccaaggtacatcccttgtagctctgtttcaatcgtcgctttcgtggacggatttccaccagcaaagtgaacaagcatcatgtaaggtgtcgactgctcttctgctgcttttccaagcgcattcacaagctcatcctctgactcaatccctggaatcgcgctaatcattttaaattcttctgtgaacatcgtgccaaactcttctgttgtcataaactgaagaaatttctttgcggcatctttatgctctgaactagcattgatcgcatatgacccatctacccatgttgtaatcgtcggctcttttccaacagcagatggaatcgggaagaaaccaagttcaagctccggattcatttcacgtagcacttcaatttcccagcttcctaacgggaacatcgctgcgtcacctgtaaagaacatcgtgcgaatatcttccattccaagtccttcataattttcagggaaaaactgtttcagttcatccatcgcgtcaattgaactctgaaattcatcgcttgtaaaatccgtctcaccagctgtaatctgatcgacgaactcattgccaccataatgagctggcccaataatgccatgtgataacgacaacagccagccttcttttgtaccaagcgcgatcggtgtcgtaccttccttctttattttttcatttatcgccatgaactcatcccacgtttgtggttcttccagacccatttcttcaaacatttttttgttgtaaaacatttgtgtcgtgctcatattaagcggtacaccatattgcttatcatccgatcctttggatgcggcaagcgtttcttctggatattgatcgagtccttctaaatcatcaagcggctcaaggtatcctgcatccgcaagctcgatcccaggtgtataaggacgaaggtgaatgatatcaggtccttccccactttgaagggccgtgtttaaaatcgtgttatactccgtattttttgaaggtttaaactcaacgttaatgtccgggttttcttcattaaatttatcaatgattttttgatagcttgctttatcttctgttcgccagcttccaatcgttaacgtgacgctatcttcactagcttcagaatctccagaattgccaccactttcggagctacatgcggataagactaaaataaatgctaaaaaccccgttaaagtaaacgctttcattctattcattacttttccccctcgtttagttagtaaaataagcgtgaatcaatgaatgaagatcaggacgaatgtgtttcatgttgtgcttcctaccgtactgaacaacatttgttaaaaacgtaacaataagctctttctgcggatcaatccataaactcgttcccgtaaatcccgtgtggccgaagcttcctactgaccacctccttccgcatgataaagtagtgcctttcccgctccacacttcaaaccccatcccgcgatttccagctacgtgattccgagccttcctgatcacatcttgcgatagcacattttgcgtttctggataaagaaaataggagccaaattcccctacatcactcgcggtagaaaagaggccagcacttccgcttgcaccgccaagatggagcgctttttcatcatgcacttctccttgtaaatagcgatctttcgtccactccgttgaagcgacttgcagcggttgatctggatgaaagctggtctgtgttaaccccaacggtttatacagaaccttctctgtaaaagttgaaagcggaaggccagccaccttttcaatgactgcccctaataaaatcatgccaagatcgctatactttacgatttttcctggttcatgaatcacttcagcattcaccacttcgctaaaaatatcgcgcttctcatatcgttgtacgggtggtgtaagatcggctggaagtcctgtcgtatgggtaagcgcctgatgaatcgtaatctctgggtgtacgaattctgggatgtaggtttgaatcgtgtcatcaagttcaaaagaagtgttgtcaacaagccataggatcgacggaagggttgccattacttttgttaaggaggcaatgtcaaatcgtgttgttgttttcatggtgtgggattgatggttcgaatcgataaatccaccgtatgcttgatgaaaaacggtgctccctttctgttgaacgtgaagaacagcgccagggagctcctttttgacaataagatcgcggagataggcgtcaaattcaaccatgctttttcgcgacctccaccgcttttcgtgttcgttcaagcgccgccacgctttcctcgtagtttcggctcgtcatgccaacatataaaatatcaatcacgttaagctgagaaatgcgcgagctcatcgcgccgcttcgaatgcttttctcaagagagcttgtgaagagcttaatatcagcaagatctgataccgggttcgtgccgtatttagttaatgttataacggtggcgccgttatcctttgcgattctaagcgattcaataatgtcgttcgtgtgaccggagtatgagataccgaaaacaacatcctgctcctcaaggttcgcgcttatcgtaccttgcgtatcataatcaacgcctgcttcacaccagcgattgatccgagaaagcttttgcttaaaatcctgagcaattaagccggatgccccaatgccaaacagggcaattttgcgcgcctgactaaggacagcgatcgctttctccacttcctcttttgaaagaaccgagatcgtatcattaatcgattgaatgttgttgtttgagacattttcaataaacgaatccactgtaccatcaatcgaaatttcttgataagacttactcgtttgctttgtcgcaaggtcccctgcaatccgaagcttcagctcttgaaatcctttgtagtttagcgtacgagccagacggatgatcgtcgcttcgcttacttctgttcgttttgagagcttctggattgagagattgatcacttcttccgggtaatgaataatgtattccgccacttttcgttctgaaggttttaatgaagtgattgattcctgaagactgatcaggccaccgttcataactagcccacctttatcttataaattttcaatcatttcattttagcatatcctcacagcctagcttggcacaacagcagattcaattgcttttcttaagtgaccgtcatacctttctaacgtagcatggaccttttcacctgttaatcctgttagtaaagaaagaatagccgctttcgttgagccatattcttctaacgatttttcagcctcttcgatcgatacccctgcaatttcagcgacaatgttcttcccgcgctgcacgagtttccgattcgttggcacaacatcgaccattaaattgctgtaaaccttcccgattttaatcatggaagcggttgtaagcatgttcagcacaagcttctgagccgttcctgctttcattcgcgtcgatcctgttacgacttctggcccgacatccgcaacgatactgtaatgggccacttcttccattttcgaatgacgactacatgtaaccgcaccaaccgtgccacctactgttttcgcgtacgccatagccgccactgtataaggtgttcttccacttgcggcaatcccgacaatcacatcgttagaactaacgttcagccttttcatatcctctacggcctgttcttcatcatcctccgctccttcaagagcatattgaagcgcctgatctcctcctgcaatgaccccgatcacctgttccgaccgggtgccgaacgtaggcggacattctgatgcatcaagaacgccaagcctgccactcgttcctgccccaacgtaaattaagcgaccgtccttctgaaaagcctcgacaatctgatcaacgagttgttcaatgataggcaacgatgctttgacggcttctggtatcacatgatcttcttcatttataacgcggagaatttcatacgttgtcatttgatcaattgtgagtgtgttttgatttcttcgctcagtctggatgttcgttaaattcatttcattaattcctttcatcagtagcatcatttttcaaacgtaaatcaaagggctgcgacgccccgacccattgtaaaagtggcaaatcgttttgtgtaacatttccaatcacgttcacccgatcgtctgccggaagatcgcgttttgttagctgaatttcaccggcatatcggccatagttcacgttatcaatcgtcactgccccacattttcgttccattgaaatcatgggctcaggacgttcatgaaagcgtctcgaagccgcggaacgaatcacatctcgagctggatcaggtcgattttcatgccgaccatcgacgtggaatctttcaaactgatcatttgaattctccacgtcaagtggaatcacgccctctgcaagaagtgatagtttactaagctgttcgtcgctaatcgaaatatcccccaccaacacgtggtccactttgtagtgataaagaagatcagcgcaagcgatgtgcggaggcacgtggcgatgtttctcaagcgttggtaagcccgcataaatagggcctctcagctgttcatctcctggaataaatgccatcgtttgaatgccgtattctttaaataatcgatttctctcagaaaagaaatcctcatcaagtcccgtatcaggacgagggtaatagttatgccacgcttcgagattcccggtgtttacacctaattcaatccaccgctcgatgtcttctcttgtaacggtgctcgcattaagaccaactttcatcttttgagacagcgatacaattaaatcatcggtatacccgtaatcaggccggatcccactcaatccccactgaagtaaatcttcatagctctcaattcctaaaaaggtgatggagtgaggcgagatgtccgccactaactccatcttatatttttttgccaaacgaccaagctcttttaaacgagtttcatagatcgtgtgatcgtcttctggtatatgtaaggaagtgaaaagcaccttcactccgaaagactgcgctttttctaacttcccttccatgtcaccatcacttcctaaaaaaatggacattccgagcacgccgttacctcctctatgctgccgtcgtctttgatactcctttatcaattgcaaccgtcatttcttccttaaatccgaacagatacgtgaagacaaagccgaagaagtaagcaacgacaagggaaataatgtagtacagaatttgatttgaattcacaaggaaaatgagcggcaagccggatacgccaattgcgattgtcgcaactttaaagaatgcggcaaaagcgcctccgatggctgcaccgagacatgccgttacgaacggtcggccaagtggcaatgtcaccccaaagattagcggctctccgatacctaaaatcccaactggtaatcctgctttaatcacttttcgaagcttcttattttttgttttaaaataaatcgcgaaggctgctccaacttgaccggcgccacccattgcaagaatcggaagcagtggatcatcaccaatcgtattaattaattccatatgaactggcgttagaccctgatgcagtcccgttacaacaagcggcaggaacgttcctgcaagaatcagtcctgagaaaatgcctccagcgtcaattaaccctaatagtccttgtgtaatcaaatctgaaacgaagccgccgatcggctgaagcacgattaacgtcgcaaatcctgtaattaacactgaaatcgttggcgttacgataatatcgagagaagaaggaacgaagcgacgcacgcgacgctctgtccaggccatgaaaaaggcagcgagcatgacaccaactaaaccaccgcgaccaggaacgagctgttcaccaaagagcgtaatatccgcaagggccggattaatgatcagaatacccgcaattccacctaatgcaggtgttccaccgaattcctttgctgcgttaatcccaacgaaaataccaagataaccaaagagtccccaaccaatgaaattaagaatcgacacgattgacgtttcaggatcgacacctgaccggatgacaatgttcgtaattccagcgattaaacctgaggctacgatcgctggaatgagcggaataaagatgctggctatttttcttaaaaacaatttgaaaggcgtagcgtttttttgcttcaaatctgatttcgtttgagctgcaaggccttcaaaaatgtcatcatcatcatccatatcctctgcttcgacgccactcatcttagaaacttcttctgctaccttcgtcacaatgcctggtcctaaaataacctgaaccgtttcagcctcgactacaccgagcacgccgtcaatttcttttaactgttcgagatctacttttgacgaatcaattggtgttacgcgaagtctcgtcatacaacttgttaacgattgaatattcgatggtccaccgagaagaggtaaaatgtcattagctaagcgttcttcttttctcacaagctttccccatttcttctgatgatttcatgaaacgattcaatatccttcatgcgtcttctatgtaatcagataactgatacccctaaggcgtgagtaatcctcccctctcaacacaatggtttatattgaattttctaataattttagtttaacaagttttatttaataatgtaagtgtttttgtgaagttttattacataaaaaagcactcgccattttcacgagtgcttttaaacccttagtaaagcaagtaatcttctcttacttctttaaaatcttcaagatcctcttcccactgctgctgcatttcttcgacgctttcgccattttcaatggcttctcgaatccatccgtttcctacaagaaggtcaaagaacgaaaccccagcgctgttttctgcgcggaattcgaagtcttctgggtaaagatcatgaatcgttttgacaagactaagccctgttgtaactggttcaaatgcttccttatccgttacgtgaatttgaaccccgtgggttaacttcccagcgtgcttcgagaaagatggtgtgaaagaagcagctcgaaaatcaacgcctggaagctcaagaccattcaattcattggctaattccgttgcgttaataaaaggtgcaccaattaattcaaatggttttgtcgttccgcgaccttccgatacgttcgtaccttcaattaacgcagcccctggatagacgagtgccgtatcaagcgttggcatatttggtgatggaagtacccattcgagaggcgtgtcatcatagtacatatcccgcttccacttatccatttcaacaactgtcagattggcgccaatttcaaattcttcattaaaaagttgggcaagctctcctaccgtcatgccgtggcgaagtggaatttcatattttccaacgaaagaagagtactcatcattaagtactgggccttcgactgcttcaccaccaagaggattcggtcgatcgagtacgataaattcaatgtcattctcagcagcggcttccattgcgtaagccatcgtgtaaatatacgtgtagaatcgcgttccaacgtcttgaatatcaaataggagcacgtcaattccttctaacatttcaggagtaggctttttcgtagcgccatagagactataaacaggaagtccagtttcttcatcaatatagtactcaacatattctccggcctgtgcacttccacgaaccccgtgttctggaccgtagagcgctttcaaatcaacatcagcgtcattgtgtaataaatctacgatactgttaagctcttgatcaacacctgtcggatttgtaatgagcccaacgctttttccctcgattaactctttctgatcttcaaggagcacttctacaccaagcttgaatttcttcttatttttatcatgaccatacgcatttcctttaccattgttatcagcgagcgcaactgacaaagatgatagaacgagcaccatcgtcacaagcataaccatccactttttcattctccgaacgcctccccatttttttaaaaatcgggaagaatgaacacttctccccgatcatcagtgttagtacgttaaaccatgtccaaagttataaaggatgccacctgtttcccctggaatcgtaataggtaactttcctgttggtgcattttcaccaaaaatagttgccgcggttgcttcaaaactcgccgttctaaaaccatactgtgtcaggtagctatcaacgtccggatacgccatgatgtcatatggattccgaatgccaacggctataacaggtgcgtctgcttcattcatgatggcattaaccatcatcatttgcggatgctcaggtgaacgcgttccaacactgtacgtgtaagttcctacaataatttgatcagcggaagaaattgtttcacgctgttcgtccgttaacgtgtagctcgaatttgcttcaatcactgtcgtattcgcatgctgcgcttttacggcctcacctagcgtagacacgaaacttctcccaaccacgacaacatgatcatcattatttgcaagcggtaatacttcatcattcttcacaagcgtaatggacttgtctgcgacttctttctcgacagctttatgctctgctgaacctaccgtctgaagtgcttcttgaatttggtcttctacatcaataggatgctcagacttgatgatccctctgttcacttttaacgttaaaatgcgttcaacggaagcttcaatgcgttcttcagaaatgtcaccagattccaccgctgtatatagtccttccgcaacttccggaagaccaacaggcatcaagacgatatccgttcctgctttcactgcccgaatcgctgcatcgacagatccgaaatgatcttgaatggcgcccatgttcatcgcatctgttgtaatgacgccttcataccccatctcatcccgcattaattcggttaacactttgtgagagagcgtggcaggaagtgaaatttccgttccgtcttttttcgaaacaacttttgtatcatcaattttcgggaacgtcacgtgagcagtcatgatcgcgtcgatccctgcttccatcgccttttggaatggataaagctctacttccatgaggcgatctttgtcataaggaacttcaggcaggccgaggtgagaatctacagctgtatctccgtgaccagggaaatgcttcgctgttgccgctaccccagtttcttgaagtcctttcgtataagcaatcccaagatcagcgacaagctcaggatcttctccaaatgaacgaacgccaataacagggttatctggattgttgttcacatccatatcgggagcaaagttcatgttgatcccaagagaagcaagctcctctccgatcgcatgcccgacgttctcagcaagctccgatgaacgcgttgcgccaagcgccatgtttccaggcatatccgttccagactgaagacgcgtaacgattccgccttcctgatcaatcgtcatcagcatgccgtacttttccgaagccgcctgataatcagcgactaacttcgttgtttgatcagttgttactacattctctcgaaataaaatcacgccgccaaggtgatactgtttgatctgcgcttcgatttctggaagcatcttagtcacattttgaccatcccagtttcggtaatctggcataagcatttgaccaactttttcttccatcgtcatgccagcaatcgcatttccaatcaggttgtactgctttcctttttgcttaacgatcgctggagtagacgattttttatccgatttattcactttgtaatcaatcgcaatgcgatcgctgctttcgccatcagaaacgctaatgaatgtgcgtccacgctgacctgttaaggtaacttgtccttcatcatctactttcgcaacattcttattcgatgacttccacgtaagattctgctctgttttcataaaatgaccgtcttcataaatatggagcggatgaagcgtcatcatgtctccatcaaatgctgcgcttacttcaggaacgttttccattaaaattaattgtggcccgtcgctttctgcaccagctcttggcagccacatttgtgaaaacatcatcacgaacgcaagtatccccaccacgatccgtttacttcgtgctctcattttacccctcctgtttgttgaaaattaataagctcgcttcacccattcattgcttgtgaacgatattttctgttgatcgagtttggccgcatcgacgtaccaaccgcgcttattcgttgaaccgtctgtgtgataagtaaagcgaatttttgtcgtattagccggaatagaaacttcttctgtttcccaactttcactcacgccagtaaacgatgccacttcagtccactcctcgccattctctgaaacctcaactgttcctgtgtcatagccttcctccatttgataccacgtatcaaacgaaagtgtcgttgcttcttttacatcaacttctgctgttaattgtttggactcgttattgccatagcctgcgaaccatgggtctgcctttttatccatcgcaactggaatcgcatctgctacttgtctcgcaaatgctcgtcgcgttggtgaagtcgaaacggtttcacgcgtagggtgcacgcggttcgttaacagaatcgcaatcgtttgatttgttgggctcacaacgatcgacgttccagtatacccggtatgcccgagcgtagtgctttcagataaagcatccatgaaccagccctgttgaagctcccagccaagtccatgatcgtctccagaaaactctggaatccggttttcagttaaaagttttacagttgccggttcaagaattcgcgttccgccgtagcgtccttccatcaaatacatatgcgcaaatttcgcaaggtccgctgccgttgaaaacacaccggcatgaccagccactccgtcaagtgaccaggcgctctcatcatgcacctcgccccaaacaagtcctcggttcgtccaaggctggtattcggttgcggcgattcgttcttttaattcagctggcgggttatacatcgtattgtccatgccaagcggctctgtgatttcctgctttacatactcatcgagtcgcatgcctgacaaccgttcaatcaaagcaccaagggtaatcatgttaaggtcgctgtatgtatagtctgttcctggcgctgattgaagtggatattgaaacacatactctaagcgatcctctcgatcttctccgattgtgtagagtggaatccacggtttaaatccagaggtgtgggtcatgagctgttcgatcgtaacgttttcttttccatttgccgcaaattcaggaatgtacttcgcaacagggtcatctaactgaaaagccccatcctcataaagcgtcatcgccgccgtcgttgtgaacagcttactaattgaggcaagatcaaaaatggtatcttcactcatcggaatcggattgtccatttcagtaaagtcaccatcagtgtattgagccgaataaccgtacgcttcttccttcacgatatgtcctcttcttgcaacaaaagcaacagcgccaggcataacctgatcatcaatggcgctttcaagtaaaccatcaatctcgtcaagcggttgttctctcattccagcccctttaatcgaaccggggtgaagaacgggtgaagttggtcccggattgtcccacgaaaaaacggggtggctcttgctttgattcatattgatcttcccctctttctcaattgtgggtcccggagcagccagtcctgaccctggagctaaaagggatgttccaagtgcggtagttagaagcagcgacagcgtttttcttctcatagtgccctcctctttttgattgaatacagctaaatgaaaagctcctctctttttattgaaataacattcagaatattctattcaaatcgtaacctctacatttgtagtcgtctataccacttaagtcatggattaccaaaaaacagcgttatttatagatctttccgcatgggtcattagaatgaatttgaagtattataacattcagttagattatattttgtagctttatttcaaatagttgagcggattcgggtggtgacaggcactcgcggtttttcgtaaactttatgatcaaaatgcccaaaatgaaacaaaactaacttatttccgttttcttaaaacggatggaatgatcagatatatttaatttagttaatttgaaagcgattacataaacaggaaggggttttagtgttgagacaaaaaaagaatttgttcatgtctcttttgttggggagcgcacttctattaagtgcttgcggaagtaatgaaagttcaggaagctctgcatcagatggtgagtggagtcctgataaaccaattgaaatgattgcgccagccggagcaggcggtggatgggatacaacagcacgaacaatctcaaaagtaatggagaaagaaaagattattgataaacgaatggctgttgcgaataaacctggcggcgggggtgcagttggttggtcctatgtaaacaagaaaggtggtaaccatacgcttttcgtcacatcaccaccaatcttgtttgttccattaaatggccaatctgaacttggacacaatgattttacgccaatagcaggcgtaattgcagattactccgcgtttgttgtaccagctaattcaccatacgacagcatgaatgaccttgtcgatgctcttaaagaagatccaacatcgatttcagttgtcggcgattcttctcccggaagtatggatcatatggcctttgtaaaagcggtaaaagcggctggcgtagatattaaacaattaaaatatgtttctgctcaggatggcagtggaatgagcatgctccttggaaataaagtagacgtttattcaactggactcgctgaagcaacggaacaggcgcgtgctggtaaggtgaaagttcttgctattacttcccctgaaccccttgaaggcgaaacagtatccgagttcccaacacttaaagaacaaggaatcgatgacgagttcattgtttggagaggcattatgggaccaaaagatatggacactaaagcagcagaattctatgagcaggctgtcaaagacatgatggaaacagatgagtggaaaacgcagcgcgataacttcggatggaatgataagtttatgtctggtgacgaatttaaagaattccttgatcaggaatataaaacaatggaagaacttttgaaagaagtcggtttagcaaaataatgacagagggtcagttaatgctgacctttctcatctataaaaggcaggtgtctcttcatgctagcaagtgtagaacgtaaagtagctattgttttattcctattatcaattttatatctcgtctctagttttcagctaccagctttcccatacgccatcgtagatgctgacgctcttccgaaaggactgggatttttactcatagccctttcgattttactattcatacagaaccctgttgaagatcgaaagaaaagtgacattaaaaaagatgaaatattgatgttgcttgcggttgcaggtcttatcttcgtctatatactcttatttgagctcctaggatttgtcgttattacgattgtattcctgctcgtgacatcacgtttacttggttatacgaaatggaaaacgctgatcgcagtttcaatcggatttacgctcgttctctatttttcatttaactacttacttcaaatctatttaccacaggggatacttcccttttagaaaggaggcaaaatcgtggatacgatctcgaatatgctatacggctttcaagttgttttaaccttccaaaacatcatgtttgttttcatcggcgtactagccggaactctaattggaatgcttcctggactaggtcctatttcagccattgcgattatgattccgctaagctatggcatggatcccgcctccgctcttattcttatggcaggagtttactatggagcggtgttcggtggatcaacctcgtccattttattaaatgcaccaggaatatcaggaactgtcgccacatcatttgatggttacccgctcgccaaacaaggtaaagctggtaaagcacttgccattgccgctatttcatccttcgctggtggtactgtaagtgttgtggctcttatgttagttgcacctcttatggccagctttgccgtctcatttggaccgactgaatatttcgccctcatgttactcggtctaacagcgatcgcgagcttgtctgaaggctcaacggttaaggcgttaatttcagcaacaattggtttaatcatcgctacaatcggcgttgaccaacaaacaggaacgcagcgttttactttcgggaacccaaatcttcttgaaggaatcgactttttgattattgctctcggacttttcgcgcttgcagaagtttgttcattaatcctctcgaggaaatcaaaaatgatggatggaaactccaatgttggctctttaaaaatcacgaaaaaagaagcaaaagaaatttccggaccgattgcgcgtcactctgtgctcggatttattcttggggttcttcctggcgcaggcgctacgatcgcttctttcatgtcctatattacagagaagaagatttcaaaggacccttcgtcatttggaaaaggaaacattaagggacttgcggcaccagaaacatctaataatgctgcaacgagcggggcttttgttcctcttttaacacttggtattccaggctctggaacaaccgctgttctgcttggtgcccttctcgttgtcggtgtgcaaccgggtccattgatgctgaccgatcatcccgacgttttctggggagttatcgcaagtatgtatcttggcaaccttttcttgctagtgttaaacctaccgcttattccgtttatcgctcggattctttacattccaaaagcgctcttaatctcgcttgttattatcttctgtatgatcggggtttacggagttagcttcagcacttttgacctgtatcttttactagcatttggggtaattggatttattatgaggcttcttaactttccagcggcaccgctcatcctcgcctttattttaggaggaatgatggagcaatcatttagacaagcccttacaatctcaaatggaagttatctgacgtttttcgatagcacggttacgattgtactcctcattctctcacttctttctcttacgcttccttttataaaaagcaaacttagtaaaagtaaagcggaaaatgaagaagaacatttagcatcttaaaacacaaagccgcttctgaaatcacatcttcttaggagatatgatttcagaagcggttcttttttctattcttcgatggaatgatagcgtcgttcaggacgacctactgttccataggacagatcagcatccacttttccaagcgaaaccatgtattccaaataccttctcgctgtcgttctactgcaccccatttcacttcccacttcttcagctgtcataccttgaggtgtatgcttcacgagcacttcagttagctttgataaggttagtggatcaatgcctttaggaacgacttgagtcgaaacctcagcacgtgtcccctgccttgtaaataagtgatccacatcttcttgactcacaactttttgatcattcatttgtcctctcgtctttttgaatttttcaagagtttgtttgaaacgatcaaagattaccggtttaataatgtaatcaatagccccaccgcgaagggcttcctgaactgcctcaatttcttttgcagcagtaatcatcatgacgtccgtttccttgtgattttcacgaatgtgccagagcaagctaagtccgctttcttcaggaaaaaagatgtcgagtaagacaaggtctggttctattatttcaagaagttcctttccttctgaaatgcttgaagcgacacctataacaacataaccagatacattttcagtaaacttttgattgattctagcgatgcgatgatcatcctctataatcaatacttcgatatcagacatttctttcttcccccttaggaatcacaacagtaaacgcggctcctccgtaacgacctgttgagatggtaagatatccacctaaataagtcagagcatttttcacaagagaaagtccaatgccccgatcttctccctttttactactaatccctctttcaaaaattcgttccatctcctcttccttaataccgtttcctgaatcttctatttcaaaaatcaagtcttttcctagatccgtcataaacaaatggacaaccttctctcccccctgcttttcaagggcagcatccatcgcattatcaattaaattacctacaatcgtgacgagcttttcttgctccagccactctggaaaatcactcatactactttcctcatcaattaaaaattgaatatgtaactcatgagcacggttatatttacctaaaagcaaggctgatagaatcggattaggtacagccttgaccaaaagctggacaacctcttgatagccaatcgcttctttatgtattaagtcaattgcttcgtcataggcacctaactgaatcaaccctaaaatggtatacagcttattggcgtattcatgcgtttgagaacgaagaacattcgcatagctttgaacttgtgaaagttctcgtgataacgcctcaatttctgttttccttctaaagctggaaacagcgcctgtaatttcaccgttctgaatgattggaatccggttcactatcacatgattgtgacctatggtgatttcttgatcatactctgcctttccagaacgtaatacttctggcattcttgtgtttggaagaacagagacgatgtctactccttccaaactttcatcttcacttcgatttaacatacgatgagcttcttggttagcaagggtaatgccgccgttctcatcaaccgcaataatgccttctctgatcgtttggagaatcgtatttcgctctagaaacatagctccaatttctgatggttcgagaccaaagatagaccttttcacattcttcgcaataaaaaaaccacctgctataccaagtaataaaattgtacctattaaactcataacctttaactcaaattgatcaactttctgttcaatatcttccgttagaaacccaaccgaaacgatgccgataatatttccattctcgaagataggtgtttttcctctaagggaggacccgagagacccttctgcttttgaaacatatgattcccctctcagtagagcctgttggctatccccacctaccatatgctttccgatgcgatcaagtagcggatgagctacacggatcccttccttatcgccaaccacaataaattcagctccggtcttagaacgaagatcctcgacaattggctgaatggttgcagaaggattttccgacttcatcgcattgactactcccggcatcgccgctacagattgagcgacatttagcgcccgctcccccatctgttcctcaacacttgtcgaatataaatgcgtaaatatcaaaccaagaataagcaatactgtaaataatagtgccaatatcattaacgatagtttcgtctgaagagaaattgattttaccctgctcatgtactcgcttacacttcctgactgaattgtcttactattattctaacgatgaccattgaagagcacaagagtaagagattgtactagctaatacaaaaggaaggtaatcgcgtccccttccttctttcagtcgacattatttgagcaatcccgggtggtgcctgtcactcactccttcaacgcactaagcaataacccccaaaacttctcctgatcaataccacgcgcaaacttcacatttggctctcttcccgtcacatgaagaagatccacgcaggtggagccgtatgtaaattctcccttcgtctcaatatccacacgcaccgtctcgaattcaaagatcgacgcatcgattaaatacgcaactgtgcacgcatcatgaatcggggctccttcaaaaccaaaaacgtctttataggttttggtgaaatacacgagaagctctctaacaaattctgaaatctctctgccaatcgaagcaatctcatcaagaattgcaggtgttgtaatcgcctgatgcgtaacatcaagaccaaacatggtaactggaacgccgcagttgaagaccatttccgccgcctctgcatcaacataaatattaaactcagccgtaggcgtccaattcccaaacgtacctccgcccatcagaacgatttctcgaatcttttcaacgattgcaggttctttttgaatagctaatgcgatatttgtgagcggacctgtcggaacaagcgtgatctcaccatccgaagccaacaaacgctctataataaagtcgaccgcatgctgttcaatcacctttttttgcgggactttaggtagctgaggtccatctagtcccgagtcaccgtgaatatcgggagcaaattcacgcacttttacaagcggttgctcggccccacgtgcaacaggtacatccagtcctagtaaatcacacactttcagcgcattcagcgtcgttttctcaacttctacatttcccgctaccgttgtaatgccttctatctggattcgatcacttgatgcggcaagaataatggaaatcgcatcatcatgaccaggatcacagtctaaaatcacttttcttttttcgctcatgttgcgtctctccttttaggtgaaatggaagaaccctgattagctccaatttaggaggggaatcagggttcttttgttattggattgaatcatatacgatattcgcgatttgctttgaaagtcctccagtacttggataagaaccagtctcaagagggccattgttttgcttatttgttaaaacaataatttgaagatcataaacaggatcaaaaatcacttgtgttcctgtaaaacctgtatgcccgaaagccttttctgagtgcctatctcccatgtaccagcttttatcgagctcccaaccatacccctgtccaaaacgttgtggctgtgtaaaagagtcaattacttggttatcataaagattgacttttccgtaactcccaccattcaacattgcctgtccaagcacggcaagatcccgtgcggtggagaataagccagcgtgtccagcaataccttcgtttgcataaaaactattaccgtcattaacttctccaataagtgtatgatttctccacctttcgaaatcctcagcccgctctggaacgttgtagccaaattccggatcatcgaccatcttatattcaaaagggtttccccatgaggtggctgcgattttacgatcaaggtgatctgaaggagtaaacatcgtatctttcactttaagtggctcataaatatttttctgaagataatcatcaagcttctctccgcttatttcctcaatgataaaccctagcatcataaagctaaaatcactatagcgacgatcggtcccggtttcgtattcaagtggaaggacgttgatatagtttagaacttcttttgaattcttagcatgaaaataagtcggttgccatggagttaaaccagacgtgtgtgttaataggtcggcaattgtgacatcacctttgccattagaagcgaaatcagggatatattttgttacacgatcatttactgataattccccctcactaacaagcttcataaccccttgtgtagttcccattaccttagttaaggatgcaagatcaaagatcgttttctttttcattttccttggtttttctaaaagagcacccatatcatatttctgtgcatcaccataagctgattccttgacgattttcccatccttcgctactagcacgactgcaccaggagtaatattattttctattgcccctttcacgaggcgatcaatttcttcgagagttggagaatccatgccgacactttgcggactaccgtgacttagtttctgtcctttagcagcagttgctgtggaaaaaaatggcgtcgtcaatagaagaagtattaccatcaatagaataattcgttttttcatttttcttcctccttagccttcaagaatttgattaagaaagctcgtacctgcttcagtggattcaatacgaaaataatcactcaaggttgcgcctatatctgccatagtatttcttgtcccaatcgataccgctttcactttagggccagtaatcattagaggagtatattctcttgtatgtttggaatgtccgatcgtagggtcattcccatgatcagccgttacgattaaaatatcatcctcgttaagcaaaggaataaactcttccagccaattatctacttcttcaaggagcgaggcgtaccaattcgtattttctgcatgaccagcaaggtctgtttcttgtacatttactagaaaagccccatgtttttctttactaaatgcttcttttagttgttgaagcacctccgttgtattcacaatagaataggctaggtgctttccttcgaggacatctgccgttttcccgattcgataaactggaattttagattcagctagggtttggaattgtttttgtacattcacaccatatcccatgtgacgaacgtgatagtctctcccatacacgcctgctttagggctatcaattccccactgtcccttttctcccttttttattactgctaaaagtcgctcaactgaagtatgaggaccgcctaatgtaatcactcggcttgtatcaacgacttctcttacaacgcttcctactttaagcgcatattcaaaagaaacttttgtaaggtctgccgtaacattaataatattcccaggtgtcgattcaatgttatcagccacaataatggcgtcgtcgattaacaataccggcaaatcctcataaggataagctactttgaaattttcactcaggagggtagtagctatctcaccatgcacatctttcatcaatcgtttagtgggacgttttgggagactacctacgatctcctgatgtcccatgtaagtatcagcaccgtagtgtgcaagtcgggcttttccataggcaccttttggcgttccggtttcatcgacaagctggtttagacccagtgaatacattgttggaatatccaatattacttttttccgaatatgctcatacgtatttgctacacagtcccctggttcatactcatcacagtcatccatcgcgccaatcccaaaactatcaagaatcagcactaccatacgtcccattctatcctctcctttcgaaatgaacgatttctggaacaccatcatgtaacccacgcacaagagcaacgttcgccctagtgacaaacacttgtgtacgaaaagcatagattgccgtatcaccgattgatattggcgatccacgttcgagccttccatagtaatcaatgtactcagaattaagagactttcctttcaaaaaagtatcaaaaatttgttcaggagagcttccgacataggcaccggtcatatttccccgttcataaaaccctcctcctatcacataaacgttctccttatcttcatgagagatttcggatacgtaaataatagcaggatcctcaggaagctttcgcaccgcgtggagtggtgtagtacctgtcagagcatgacccggttccccatgcgtaacacctgcttttttgagcattgggatggtttctgtactcgttgcactcggtccattgacctgtcgaatctgaaatccggatgcttcaagtatttcttttgccgaaagaatggttttcagattttctgtaaatcgtaactcttcccgctccttatccattagcaataatggaaaagaagtaactcccattacttcaattccatctagttgcttaagctctgagatgactacttgaagttcttctaactgaaagcctccccactgcccagggtaaatggtatccaatgaatgaataactctcagaataacgtcctgtttctttcctagtttcatagctgcctctgacacctgtcttgctcgctcaatcgaaaagactgtaacaacctctggttcgaagccgagaatctcaccccactgatgtttgccaggttgaacgagatgacccacattaccaattttgacacctgactgatataatcggaaagcttcttcaaattccacagcaactgctttttcgatgccatgttctgcaatccaatttccaagttcaccaatacggccaagctgcttactcataaaatacaaaacaaaatcattctcattagcagcctttgccatgctcctaacattttttgctattgtatcgagatcgagaacatacgtattagggggaataagcccagattggtgaaggtgtacccccgcttttattagctctggatttctcttctttgttagtgaaagaaacaatgtagtagcctcctaaacgacagcgtatagatcttttcttaactatttcattactctcctcgcaaagctttttgaagaatacggataacagtctctgctccagctttcattgggttaatacgtaatccgtagtcaaataattttggtgtactctcaaggaaactaccagatactcgataaatcattggcactagttcaaaccgggattcagcaccaactggataggttgctgctccaaatgtcttactgcactcaatcacttcttgagcaaccggctcctttaattcaacaatgacattctttgattgagagtttgtaatataagcctctttcactccatacacttcacctttgtttaacaactcacacaaaatttcaacttgctgactctgaatagctaacgagaccggggcaaaaggtaatgccctaagcaactccatcgcttctggcccttgaacctggctacctccagaataatttcgctgctgaatggtttcgattgcactctctcctaccaccactccaatcccttcaggacctagtagcttaaatccggaaaaagtagagtaatccgcaccggcttggaccccaatgcaaggcattttcaaggcacaataattgtcatcaacaattactatcatttcaggtttgattgatttcactatctgaataacttctttaagttgatacgtatcaattggttgctgtcttgcgtgttggatatagaaaacctttgcttctgaacgcgtaacattctgtttaagggcatcgaaatcattaaaatcaacttcttcagttcgtaatccaagcattcgaatcgtttctttagttgtcatataaataggtgcagagtgaatgatcatggattctcccggttcgaggagggcacttaagagcgagcgaatggcaccagtacccgatcctcgcacaagtaccgcttgattagctccaaatacattcgccatcactttttcaactttcgcagttgttctaggacgcttatagatcggatgcacaccgcgatcaccatcttggaacatttcattatccttaaattctttcgtaataaaatctacaatttcaaactgcttttttgttgcttcttcaaccgacatctgaggtatgacagattcctgatatctcaatgttatgcgctcccctttctactgaaagcacgcgctgggttgtcaattaacatcattcggatatcctcatcagacacaccagcttcttttaagcgaggaacaaattcattgagaacatggtcatatccaataccaccgtgcttatgccaatgtgattttcttgttaaatcagcagataataaaatctgctcaccatatcctctttcaattagatgacaaatcattttaattcgctcttcatcaggtcgataattaattttgccaatcgtatcaaatcctacaaacgccccggcttcaacaacagcaagtactcgttcatcatcttgattaaggtcttgatgccccacaatcaattggttcattggcaatccaagagcagaataaagttcaacttgctcgactcccatcgttccgagcgttgtatgtgtggtgagcggaagccccgtttccattgctgcgattcctgccccagttaagagttcttcttcaataggcttgatctcataatgactgctcccaatttctccaataacgccaggataaacgtctgttccatcaatcccattctttatttcatcaatcatatgttgtgcaaactgatcacgattccatttcgttgcttgatctgggaggaatgggtctttataaaatcctgtacttgcgatgagatgcacaccggttgtttcgcttaacttcctaaggagagtggcattacgtcccattccgtcgttcgtaacttcaaccatcgcctgtccacctgaagctttaaagtagcgaagttcttcttccattccacctatatcatcaagaatagtgtcgggatcttttttgattcgtgataggtcaatacaaaggtgttcatgagctgaacaaaccccaagctcattaggattaatttgtcctctaaccgtttgaatcatcttagctcctccttctactgtggtatttgcataagtcctagaacgacaagaatgttcgccaaaatcccaactgcgatcgcgccaatcggtcctatagccattcgcacaattggtcggcccgcaatctcatttaacaaatagaatcctgcaatgataaagaacccgagaccaggagcaatagcattagctgcgtttgcaccaccaatcaaaagagcaacttctagaattcgactcatcgctgtacgaatattttctcctgattgacgtacaccaggatatttatcaagaaaacgagcaatctggcttagtagcataacctctagaaaaacagtaatagtaccgataatagctgcaacccatacatttggaacaagcaatcctacgacgaaaatgattgtaaatccaactggactataaacacctgttgcaatcgccgtactagcaactagagggataaatccaagtgcacgagctccagcagcgatagcagcatctgttatttttccgtctgcaattaaatttaaagatattggatctccagccataatcaaaaggttcgtagctgcagcaataagcccacccataatcatgaaataaacgacatgctttttaatgcgatcgactctctcactgaaaaccgaagcaagatcaatcccgcttccgtccccttcaggtttttgacgcacagcatatgtaattaagaaaatcattccagtaataagagccattccttcttgatttaacgtaaccgtcgtatcaccgaaagtcatgacaccgctttcatttaaccatacagctaactgccggataattgctgaagtgataaacgttagaacaccttttttaacactgaattgcaatgccacagctaaagctggaaatgccatgaaggttaccacgaccggcgatcccacttggcccattgcatctaaaaaatttaatggtagtttttcaaataaagtgacaaatccttctagtccaactaataaacctgcaccatatgctccacctacaattgctgcaacaggcgtaccccatttatttcgcggggtgatcaatccaataatatctgtgcctagcaaaatactatggataaggataatgcttgctgtaatggtaaacggaatcccaaaaccaacaacaagtccaaaactcatagcaaaagcagttaaaccaagctctttacgtcccattcgcccttcagtattttcaggtacaattggtcgtaagccatcgttaaagacagccaaattcaaattcgcaagaacagctgccatggcccctattaaaatgacgagaaccatttccatgtaatgaacccccttccaaattatagtgctttaattgccctcatgatcatcggcacggcagtttccatatgatctgcagtaaaaccaaatgctttttttccgtccttaacagcctgtaaaattttttcttcattcggtttccttcccggcattgaaaccgtttcacagctgggcttcccaattatagcaatcgccattgctagcgctccgccgcccccagtgtgacacgctccaacatagtaatctgcctgaccagttttcactgccatggcggcttctacatctgatttaactgaggtttccactccatctggtccatgttccttcacaagggcttcaacttcttttttatcgacctgaccacctacaacaattttcatttaaatttcctcctttttgatttcttgaaaaatagatacatagtgtattttcaaaaaggcaatttcagattgtggaatttcatcagtccaattggattgaatccagctaatctccctttttgctacttgtattagatcggatttctctatttccgaaatgagctcatccgggggcggatcgatcgattctccacgcgagatacgcgttaaggcggatgcaaggtgagtgacaagcatttctactttattttggggaagcggcttttgcgtctgactacttaatctttgaacggcttgctcggcgatagctgaagcttctgaactaatcacatcacctgctttcagaatatctaatcgttctttaatcgtcgtcataaaatcaaccctccaatatacagtatttagtatattaattctataagtaattttagaagaaatcccacctaataactcggataaatttctcctttttcaacttgaatttgcaactctttaacgttaatgacagatagatcaagtaaggcatctctgagttctactctctccctatgtaatagcatagtagcctcatttactttcctacttagttcctgagctttaatcgagcggaatgatccttttcccatttcttctgaatgaatgatctcatccttattccaaactgcagcatcaatttcattgttcttgagcatctccatcaactgcatgtagtttacttcaattaattgaacgtcaataccttctgtttcatactccgtaagaagatgctgatcagctgaagaatagtcaattcctacacgcataccgctttgaatagatttgtttttagggttagaaaaaacaatttcatgtcctgaaacgtaggagttctttccaaaatttttcaccatctcgatactaccatcattctcaatagcaagctcagctgcaagccttgaaacaatcacaaaatcataccttccagctttcaacgcttcaattcgatttgatgatcctctcataaatgcaagattaaaaggaattttcattctttcaagcacctgaactaaaccagtagcaaggccttcatattttctcgaatatggcaaaggcatggcacccataacagatccaagtcctgcaatatcccaaagtaactgtcgatcagttctaacaagaaacgtaccaaggtgtcccctcgcttcaagaacaatggctcctatttcttcaagtagacgtaacgctccctgaattgtcccccttccaagtgatgtttctgtaacaaaatcacttacgcgaggaatacggcttcccggctcgatcgctagtagattagcagcaattctcctagctgcgagcccattcttgctgtataatttctcccatttgccttccatatcctcacctcaatatacaatttttcgtattttcactatataggataacttagaatcgaaaacttttcaatgaatattctgaaaaaaacgagcgaggtgaatgcaatcaccccgccgtttccttacttttgataagttatgttagctttttctgtagtttttcttactgttgctccgctttacctttaacgccgattaataggattcattcttaaaacaaattaggattaatcacttttggaagataaaacgcgacatcgggtataaaagccacgactaaaagtactacgaggacaatggcaatatacggcataacggctcctaacgaacgctcaaccggtagctttcctattttcgccgctagaagtaaacacaatccatatggcggtgtcaccagtccaacagccaacgtcatgattgtcacaattcctagtaagataggatcaatttcaaaaccgatcgcaactggcaatataactgggataaataaaatcatggccggtatagcatccataaatgttcctatgaataagaagaaggcaatgatgatcaaaagaaatacccatttgctatcaatgttattggcaaagaattgctcagcccataatgataattgatagtaactcatcaattcacccagcgcatttgctgccgctaaagcgaatagagacaatgaactaagtgttagcgtatcgactagaatttttgggaaatcttttatttttagtgttttgtaataaaaaagaccaatgatcactgtataaagtgaagcaaatgcagctgcttctgttgctgtgaaaatgcctgtaatgattcccccaattaagataactggagtcattagggcaggaatagtaccgatgaactgcttcataaaatttttcatggaagctttttgataagttggatagcctctctttctcgcaagaatataaacgaggaccatcatgccaagaccaacgagaataccaggaatgattcctactaagaacaaagcaccaactgatacattcgttagtcctgcaaagataatcattggaatgcttggaggaatgattactccgatagtagaagatgctgctgtaatacctaccgctgtttcagtgtcatatccctgtttcttcatattaggaattaagatcttccctactcccgccgtgtcagcttgagcggcacctgaaactcctgcaaatagcatagagacaagaatatttgcatgagctagtccaccacgaatatgacctacaatcgctagcgccagatcgattaacttttgtgaaatttggccactattcatcaagtttgctgctaaaataaatagtggaactgctaataatacaaacgaatctaaaccattcagcattttaacgggtacagttacttcaggaatataaggcacattcaaaattcctaacagagctacaatgccaatgacgaaagcaattggaatgcctagaaacatcaagataataaatagacctactaacagaataccaatcattcagttacctccttttcggagaaatttcttacattacggagaatgtgagcaaacgtgtaaatgaccatcgttccccccataattggaatggagatccaaacataccccatctttaattccggaatagatacccatgtgtagttccaaaagttttgtactgcttcgattcctaaataaaataaccctatactaaacatgagaagaattaaatcatttatgagatataagctttttttgcttttaccagttaatttgttcaataaaaggtcgaatttaaaatgctctcttcgattaagcatcacagatgctcccataaatactgcccaaataaacgaatatgttgcaacttcctccgtccaaatcgctgaaacacccatatatcgtgtaatgacttgaataacgattgtgataaaaaacacgacgagaaacaaaacaccgatggttaattgaatccgctcaagcagcttaataagcacagccaaattcccccttctacaaacctgagacgagtgattagatgaatggcgaaggtacaagctataccctcgccgccctcttcttcacttatttcaaatcacgaatttctttcaataactcagtcgcaccgatttcttctgcatttttgtcctgaataggtttagctaactcaatgaaaggttttcgatcaatttcatttacgattgcgccttcatcaatcgctttttgtttgtactcttcttcttgttggtgaagaatctcaacttctttctgaacggaagcttcagctgcttttagtacggcatccttttgctcatcagtataagaatcgaatttctctccattgattagtagcaagcgtgtcgtgtagtcatgagctgtttctgtaatgtactttccgttttcagtcttgtggtgattttgttgaacaaaataaggataggcattctcagaagcatctactactccctgttgcaaggcttgatataactctccccatgctacagacgttggtactgctccagtttcttcccaatagtctgcaattgccccagaagtttgggtgcggaatttcataccttcaatatccgccatgttatttaacggttctttaccataataatgacgtacgcctgctgtccaataacctagtactttaaaagtgttatcggacttctcattaatcgttttagcaatttgatcacctacgtctccactaactgctttctcccaatgatcataactatcaaaaacgtaaggcatagcgaataaatcaatttctttaatacccgttttcgacataaaaccaggagacacaaggacaacgtccgccccgccaagtttaagtttttcaacaagttctgattcgcttgtacctaatgttcctgcatgtacttctacttctatacttccatcgctactttcttctgctacttttttaaactctttcatcccgaattgatatgggttttctggtgaagtttggttatgggccgcaatgattttaatctttccattctcgtcggctccagcattttcactatttccacaacctgcaagaacaccgagagataaaaccataacgagcaataaagttgatacatacttcataaaaaaatcctcctttattttatgaattcgttttcaaaaacgacgttattattttcttctattagctttgcaacatattgccttgccaattctcttaaactctcaaaatcttcatttgtcgatagtagattaggttgaacaagttgactcccaatccctacaacttttgctccagcttcaaagtaatccaacatattttccttatcgattccaccagttgccataatttgaagttgaggaagaggtccaagaatgtttttaatataacctgcccccatgctgttagccggaaaaacctttaccatatcagctccagcttcataagctttcaacatttccgttggcgtcaaggcaccgataatgcacggaactccatacctttttgcgaccttcactgtatgctcattaaccgtcggtgaaacgataaactgagcaccagccataatgactgctctagctgtttcgccatctaatactgtcccagcacctactaacaatccttcaaccttatctctaacatccctaatcattttttcaacctctggtgtttctgctgtaatctcaattgctttaatcccaccctcaaatagtgcctgggctattggtaaaatattatcttgactcgctttgcggataacggggacaatttttgcttcttgtaccttttgtaagctggtcaatttacacacctctattccatatttgcatgtttggctgtcattttttcattatctgttttctttgattggttgatcgtatagatgataatagcgtccaagagcaaatgcagcgattgatcaaattgatttccaagaggttgaatcgtatcaggctctcctggcaatctttttttagtagctgcagggacaactagtaaatgatcacttaattcagctagcctggagtgttcattcgtagtaattgctgatatgcgagtgccaagttcttttgccttttcagcaaaataacaaatagactgagttgaacctgaaccagagatagcgagcaacaaatcatctttttcgatatttggagtgattgtttcacccgtaacataaacttcatatcctccgtgcattaatctcatcgcgaaggccttgcccatcagtccagagcgaccttctccagtcacaaaaattcgtttagctccctctatgtaagaagagaggtgcttcgcttgatcttcgttcacttctgttaaaacctgttttatttctttaacgacagtttgaatgacttctttcatactcctggatcgcctcctttatttgtgtagccgcgtgtctacgattcgcctgtttagtaatacctcctccaacaattaaagtatgaggattgtaaggaaggatcgttggaagcgattcaagattgattccaccagcgacagcgacttgtaaaccttgaatttcattcacaagttcaaaaatatcaccggtgatacttccatttttctgcatgtctttcccaaaatggaggctcaccagatccactcctagttcttgaatttgccgtatgcgatttttattagaaacgcccaataaatcaaccataaccctgccctcatacgctaaagcgacatgcaacatgtctgatatcgtttgatctgacgcgaaagccataacagtcgtaatgtcagcgcctgcttcataagcctgagcagcttcatattttccagcgtcacaggttttcatatctgctacgatcgttgtttcagggaagttttctctaatttctcttacgattgacatcccatattcttttatgacgcctgttcctatctcaatccagtcaatggaatcagatgtctcctcaaggattttcaaacactcttcatacaatagcctgtctagtgctatttgaagtttcaccttgttcacctctcaataaattctctttcgccaagctgggtaaggacttcacccaactctggcagtccttcattatctccatagacacttacaaccaaagagccaatggcgttagaaaacttaagggttctttcaagagtccaaccatttagtaatccgtaaacaaatcctgcatcgaatccgtcccctgctccaacagtatccactactttcttaggtggaattgctgcagcatgaacaagttcaccattttgaaaagcactagctccgtctttacctttttttatcgcaattgtggagatatcatatttttgacaagcctgcgcaatttgtgttggatcatggacaccaaaaagcagttcagcttcatcttcaccagtaagtaatacgtctacataaggaagaagctcagttaaaccgcttcttgcttcttcaggtgaccacaatttcaaacgaatgttaggatcaaatgtgataatcgctccattatctttagcgatcgtagcagctcgtttaagaagagagagatttttatgaggattaattgcagcgaaaactcctgttatatgtaatagtttgcaattccgtaaagttacttcatcaagagtcgcttctgttaaagcctctgtaggggaatggtgacgatagtagaacgttttgccgctaccgtcttctctaatttctttgaaatttaacgaagtagaatattgatccagcaacttcacttccgaaacatcaattccctctcctctagcaaaattgcgtatatattttccaaactcatcatttcctaacctactgatccatcccgtttgcaagccaagcctcgcacatccaattgcgaagttaaattcagcaccgcctgctttccgttcaaaagtggaagcatacctcattggtccgtggtgggaggggtcaaatgtaatcatggcatccccaattgtaacaacatcttttttcataactggtctcccttcaacttagttaactgattctctgatcatcaattttggttcaaaacgatattctggttgatcatctcgcactttatttttcttgattttatctagcaaaagttccgcggccattttccccattttgaatgtgggctgagccacagctgtaataggtggattgtaaaagctagcataaggtacatcatcaatgctaatcaccgataagtctactgggatacttaaagattcttgtttcgaaaaacggagtacttcttttagaacgaaatcatttcccgcaataatgcattctggcgggttagatagcgctaacatttctttaagtgatgaagcaatgaggtcaggatcaacgcattggatatactcttcttttactgcaatccccctattttgaagagcttttttataaccttctactctctcatatcgtggtgtgatcttatctatgaacgaagtagtcataatagcgatacgttcatgacctttctgaacgaaatgctcaaccgctaattcagaagctttttcattgttcagcatgatagaagacgctggaatatctggcacagcacggtcgacaaatactaatggatacttctcatccaacattcttttgtaaagttctcggttatcaccagtcggaaagacgattaatccgtctacctgcttagcacgcaacatttcaatataacgcttttcttttaccggatcatcatctgcattacaaatgattgtatgaaaatcttcttcgtgacaaacatcttccaccgctctgcttacttctgtagaaaaagtatgaaggatgttggcaacaataactcctatcgtctttgtagacttttgttttaagcttcttgccacaatattgggttgataacccagctcttgaatggctgcttctactcttaatttagtctgttcactcatatagtcatatcgtttattcaaatattgagaaacggtactctttgatacttgggctttttgtgcaacatctgccatcgttacaggtttcataaatcattctccatatctcaattagtttactaaaccgatttagtaaatcgatttatctgtattataaaatgaatgtaagcgttttacaacctcaaaagaggaaatagttagattttttaatttttatcaaaaaaaagagaacagaggttaatctgttctctctgctcttcctcctacaacccaacaaactccttcttccgctctcgaaacaccgtccagttcttaaatccaatctccttcagttttgcgcgaacttcttcaaactcttcccctacacgcgatggccaatgagcgtcggaaccaaatgttacacctacaccgtaatggcacgccatttcaagcatgtcattcgccggataccagccaccgcagtctttatgcttgcccgatgtgttgatttcaatcgttgattcgagctcccctagtcgcttgatcgctttttcaacttcaggcgtttcaacatttgtgaaatcgggataaaatcctttcatggcatcaatatgagccaaaatatcaaaaacgccgctttcagctgattcaacaattaacttgtaataatgttctttctccttccgaatgtcttcttcggttaatttctcccatcgacttttatcaaagatgttgtttccattactaaaatgaacggagccgataatgtaatcgaatggatactggtcataaatgcttttatatagcggataatgctcttgaaagaaatcagattctaccccgagtaagacgtcaatcttacctcgatacttttcttttaaggtgagtacctcctcgacataagaagcaaactcgctctttgccattgcgatgcgcggcaatgctcgatccttttcactcgcaaaaaacggcgaatgatccgatatcccaatcatctgaagatcattttgaatcgctgcttttatgtactcttcaatcgtagcctcagcgtgcccgcaacgttcatggtgcgtatggtaatcaaatttcatcatttttaccccttccaaataatagtaagtatttacatcgtaatcctatcctaacccttctactctataagactattttcctctcgacatcaactgacaaataacgggtggtgcctgtcactctgtatttagaaatgatgaactttcttatgagaaaggtcctgatttgtaatgccgtactctatcgttatatttccctagattactagcttattcgaagctttcaagagacctccctcttatttctacgttcttttcccctcatcagctcttatcttcaacagcccgcttctattctatatgcgctttatgtaaatctgagtttacatgaagcgattatactatcagttgtagtgaactttgaaaggatgatgaagatgaagcggagcaagaaaatagcagccttaacgatgagtatcgccttagttggaagtttactttcgacaggggctgcctcagcgagtggaaatgaaaaaacaccaagtatgaacactagcaaactactaaacgttgcgcaccgaggagcttcaggacatgcacctgaacacacgattccatcctatgaactcggtgaagaaatgaaaggagactacatcgaagtagaccttcagatgacgaaggatggaacgcttatcgcgatgcatgatgagtcagttgatcggaccacaaacgggacaggcctcgtaaaagactttacgcttgaacaaataaaagagttagatgctggtagctggtttaatgaaaaatatcctgagaaagctaatccagcttacgaaggaattcaagtacctacgcttgaagaagtgattcaaacttttgggacaggcgctcgctattatattgaaacaaaatcacctgacgtttatcctggcatggaagaagaattacttcgcgttctgaacaaatataatttaacaggtgttaatgaacgatctagcaaagtgttcatccaatcattcagtcaagcaagtttattgaaaatgcataacctgaatccaaacttgccgctcattcagctaatttcttataaagagcctgctactatttcaagtgatgaactacaagagctctctgaatacgctgtcggtattggaatgtctgcttcaaaaattgatgaaacctacgtccaaaaagtgagaaatgcaggattgctcatccacccttatacggtaaatgacaaagaagaaatgacgcgcttattggactggggcgttacgggtatgtttacgaactatcctgatcttttgaatgatgtactacatggtaaataaacgcttcgacaaaaaaggtcctcgttggttactaccaacaaggacctttttgacatttaccagccatattgctgaaggagctctgacaccgccgtatgatcgctctcttccgctatcgcaaatgcctcttcactttcctcaatagaagaaggaagggctcccgctacgaggaatgcttcaacaagggaagtgttttcttgtttgattgcttcgaatagcaatggctccccttcgtaacgagcattcgcatcgccccctctacctaatagcaaagaaacgagttcgggagacttttctttggtgactgccgtaactagcgcactttcatcgtttttctccaccgtaaagtttggatttgctccagaatcaagtagtagtgcaattgtttcttcatttccttgaacgatggaataagttaatagagtataatgctcgccttccacttctatttcaagattaggattataaccattgtgtaataaaattttgataagctcgatgttttcttcctgtacagcttttgctaacattcgctcattgccgatttcaaaatgagcacccatttttaatagcaagtcaacaatttcgttattttcttgttcgactgctacttctagaaggttctcatttttctcatgattcacttcagcatccccatcgtgatcagattcttcatgatcatgtacctctaccccgttcaaaagtaggaactcgacaagcttactatctccttccatgaccgcataagtgattggcgatacgccatcatcatttactgtgtccggtgaaacgccctcgtgaaaaagatcctccatctcctttaatgtcgtttcatccgaacgattctgatagagaagttcccacaattggtcttcttcagtaagaacttcggtatctgttccttggttttctgcactaacttctttatgtgattcagacgtcgttttatctcgatttaattcagaacatgctgctactacgatcaacataggcatgatcatccaaagtaactttcgcttcattatttccctccaactgtctaaaaagtcaattcctaaaccattatatcgcgaatcactgtgaggaaagattaatatttagtgaaatttgtcttcgaatgggacaacttccgcctgtcatacactttaatagtcaagcttcagggaggacgagacgttgtcatattttaaaacgagggggaagcgcggaggttcaggaaaagtcatttttagcttaatcgtcttgctgcttctcggtggcagcatcgcaatttggatctggcaacaaccaaaatcacaagctgtagcaactgtaaaagagttttatttatatgaacaaagtggtgatttcaaaaaatcctgggcgctgtttcactctgaaatcaagaaccgtttttcagatgaacaatacagccaattacgctctcaactgatcacgcaggatattggggcaacgtcatttacttttgatgttggcaaagtgaagacaaaaaagaactggcgctccggagtaaacagcgtcattatgaaaaaagtctatgcgataaaagtaacacagcattttcaaaatcagttcgggaactttgatctcgttcaggaagtgttcgtcgtcaaagaagaaggagaatttagagttttgtgggactataaatgacgaggaatttaactaaacaaacgtttgtttaagaaaaaggtgctggacgaagcatcttttttgatttgctttattttgataagggcgatgccacagtgagttcctctcgtgcggacacataatcacggtattgttttttcttttgtggaagtgtacctgggtagccttctactagtggaagtacgttaagataaggtttcttcatagggactttcacaccataatagcgataactggaccatggataatctgctggttgtaatacgaggtttgctttcattggattgaggtgaatatagcgactaacttctaacatattcgccagggtattgagcggttcatcaaaataacgtttttcaaaaacgtgacccgtcagttcatatcgactattaaaataggtagcgtaacgcttgttcacaagtgacatgattttcgaaataggctgctctattgatctaagttggaggtgatagtggttgttcatcaaacaataagaagctaattcaaatgggtgtgtttcgaagacttgctgaaggatatacaaaaacgtgcggtaatctctctcatctttaaaaaggagatcttttcggtttcctcgacttacaatgtgataaaaatgatttgggagccagaccctcggttttctcaccatctcgtgtatgttgctgaatgagaatagaaaggccatttgccccatggaagcttcgtcaaagttcttcctcctccgctttttttcttctctttctccaagaataatctcccttttcctactcgtcaatgtaatcacttcgacaaataccgggcggtgacaggcactctccaactctccactcgtccgcactcgcccagcactcacccccttattcaacctgatgagggggtttttctccgttcaacactttcaacaaattcatcatagccacttctgccatcttaagccttgttttcctactggcacttccgatatgtggcagggtaactacgtttgataagcttaacaaaggatgattgagtgatactggctcttctgcaaaaacatctaaaccagcggcccaaatatcgccgcccttgagcgcatgataaagagcttcctcgttaacaattccccctcttgctgtgttgattaaaatagcggtttctttcatcgtccttaattctttcagtccaattaagttcttcgtctcagaggttaacggtgttaagacgcagacaaaatcagattcctttaagagctgctcgagctcaacaaattgaagatccatcttttcttcagcttcttgatttctactacggttatgatagagaacgttcatatcgaatccttttgctcttttcgccacggattctccgattcttcccataccaataatcccgagcgttgctccgtgtatatcttgacctgttagctgcatgggagtccaggcttcccaatgtccttggcgcaaataggtagaagcttcaggaattcttcgagctgttgccatcagcaaggcaaaggttaagtcagctgtcgtttccgtcagcacacctggtgtattggtcacaacgactcctttttctttagctgctttaatgtcaatattgttataacctactgccatgttcgctactacttttaatttagatgccttctctaaaagcgagcgatcaatttcttctgttaacatacagaaaaggccgtccacctcttggatttcttgctcaagaacatcgtgaggtacaggttcttcctctgacccccacatccgtaactcacatttttcacgtagactattaacaatttcatcttgtaattttcgcgtcagatagactttaggtttcaacacttttcttcactcccagcttttatttttacctatgctacacttttcacgaataaagtccaaattcctttcccacacagagacattacccgggaaatttcgtaataatcacccttattaaactgaatattgtgttaatatgaagaaaaaaggaatttgaggtgaatcatgtctcaaaacgagcatttttcttgtcccatccgcgttcgttattctgagattgacggtcaaaaaattgtttttaatgcccattattccacctacatcgacattgctactaccgagtatttccgacatgttcttggtgaccgattacaacagctcgctgacgactacacgtttgatcccgtattaagaaagattacccttgagtttataaaaccagcgaaattagatgatgttcttgatgtgacttgtcgtgttacgaaggttggaaaatctagttttgaactgaatcataaaattttgcgaaatagcgagctactagtaaaagctgaagtcgtacaagtaaattatgatatgaatagtggtaaagcgcaggtgattcctcagaaaattaaagacgcactgatttattttgaaaagttgaatcccccttcgttctagggttacgcaaagcaaaaaggtggcatccgctatcagcatgccacctttttgttattctattttttgatattctcctgccattcgcatactttttggttgagtgatgcttgaaataaagagaaaaatgctgctcattcgaggtttgctttcgtgaatcatccctattcatccatcgcaatctgcactgctgtctgataaagcagttgaacccccttctcaatatcatccatctccgcaaattcaagcggattgtgactgatgcctttttcacatcgaacaaaaatcattccgtagtcactgatatacgacataaaaagggcatcgtggaatggaccgctcattaaaattggcgattcgtaaccgagtttcttatcttcttcgctcatgatcgctttgatccaatctgcacaataacgtggttcactcctggtatcttccgtaatcgtgtaagtaagcttgtaagttgatgcagcttcttcaataatcgtgtagagctttttttcaagcatggtgcgatgctcaaggtcgatatcacgtaaatccatcgtaaattctactttttccggaataatgttacgagagttcggaaatacctggacacttccaacggttcccaccgttgtttcttgtccttcttctttaatgaggtgatcaaatttcgtaataatctcactcgctccgaccatggcatcttgccgtaatggcatcggaacggatccagcatggccagcgaaaccttcaagggtaacggttagccagattggtcctgaaatccctgaaacaattccaacaggtttatttttagattctaagacaggtccttgctcaatatgaagctctaagaatgcctcaatgtctccatttctgtagatgggactttctgtaagatcaggttcgacaccgaattctttcagtgcttcttttctcgtcatcccattcttatcttttcgctcaatctcaccttcctctagtaggccagcaagtgctcttacaccgaaaacacctttgttaaaacgggaaccttcttcatctgaaaaacaaatcacctcaatcgttcgcttcggtgttatgccgttatctttcatcgtatgtacgacctcaatggctccaagagcacctgctgttccgtcaaagcgcccaccatacggctgagagtcgatgtgagatccgagcataagaattggcttgtccttctcagccccctctatccttcctattaagttcccaaaaccatcgatacgagctatcaaaccagccgcttccatccatcccttcacgacctccactgcttctcgatcttccttcgaatgcgcaagacgacaaacacctgtttcaccaatctttccgatcttagctaattcttcaagatgactctgtaaacgatcgcggttaatccccattcacactcatccttttcatcatttttattcactatagcaaaactgttttgattgatcattgtacacaatgtaatgaggtaattgaatattatatatatttcgtctatttcatctaaagcatgacgaaaatgacctgccattcgttcgacaaaatcacccaaaaaccgggtggtgacaggcaccgctcgaaccgctggaacaaccactggccgaacgatccctcttgccacactcacactaattgcatataataaagctagagaacataaggtataaaaaagaacgccggtgctttcacaccagcgtccatacagctgctccgcatgacgagcggcggctcaaaaggcaaaaaagtaactcaccttaatccttggccggggcagggtgggttacttctttttattactagaaaccgtaataattgtgaccacgagagaagcaaaactgatcattaaaacaagcgcctcaaatgtgctcatcattataggcagcaccccctttcatcaacggggtaccgccgcccaccctgctttgcagctgatacctattatcttatcatagaccgctaccttaattggatagaccatttacctatgttggtctcaaaacttactgtgctaacaccttaaataaagctaaaagaggtgggattcccccacctcttttagctttatcccttacaatgggcgatcatcaaaatcataatctgctggattcggcgcaacgcgcgctttttcaagagcaggggtatcaggtcgtgccacttgatagacggctgctccaacaatctccgctacattttgaagtttctctttgctaattttatcaatcgtatcttcaggtgaatggtaccatggctcaagcggagcgtggataaagagagctgccggaatcccttttagaaagaaaggcacgtgatcgcttcgaccgagttcaccataatcaactgcgtctgaaatcctcgctccagctgaggcaccaagatcggttacgagattcttatttccatcaggagtgaacatgataagttctcctgcatcgcgactcccaaccatatccatttgaaaatgagcgactgagttttcgatctcctcatcagtcaaagagtccgcatagtgataagagccgaccaatcctttttcttccgcaccaaatgttacaaatcgaagttctgtatctgtaggcgttttcgccataattctcgctaactctaatgtcgccgcgacgcctgaagcatcgtcgtttgccccgggtccattaggaacagaatcgtgatgcgcaccaattgtcacgatttgtccgttatctttattaggatgaggctcttttttcgcaattacgttgtaagaagttttatcaactgtcccagcattttctacacttacagtggcttgaacgttttccttattcagctgttccacaagttgaaggcccgcttctctagtaatcccgacagccggaatatcctgaccatcataagcgtaaccaaatgaattgccagaacgtccttcgccgttaaacataataacgccaatcgctcctttatcatagacgttctgaattttttcataaaaactgtaagaaccgcgctcaattaatgcgatcttccccgctacttcatcacccacttcatctttagaaccaagtccgacatatacaagggatcctgagacacgatcgttgattgagccttcaaacgtatgaacatcgccagcaaagacttgatcattaaaggcaagcgatgaagatccaccatcccactcttgaatggtaaatggctgtaactccgtctcatagccatagcgctcaaactcgctttttatgtactgaacggcttgatattccccttctgtaccggctgcacgaggctgctttgataatagggcaatattgttatacatgttttcactactgattttctttatcactttgttgtcaaacgcatggtcagcttgttcatttggagcaggcttcgccgcatcaaccgagaaagacattggacttagaaccaaccccgtcgccagggctactgtaatcgctttcttttgcaatcaaaattcctccttaaggttatgtgatcagcataattattccattaattgaatgtttagtaaattaggagttcagttctaaatagtagtggttctataaaatctggacttttaacctataagaaatgacactaattcactctagttcagtcgaaatttggatataagtgtagagaaaatgagcattctcggtcattttttagtcgtgtaaattttgtgatcgtcttgtccactttggaaatcatcatttaaacaaatcaacaaagagcccttcaaagatgaagagctcttaaacgatcattcttagctttcattcgacaaattctctcaaaaagcgggcggtgacaggcaccgttatcacgctctccacaatctcaagagcacttcttcctgcaccgtcgcatgctttttcgtcgttagcaaactgacgctcacataaccaagaagcgaaagcaacaccggcaatactacagtgtgcatcccaaacgcattcggcataaacgtatgaaagccaatataactgcccacaccaacgagaatggatgccattgcaccgctcgcatttccttgcttccagtagagtcccatgacgactggccaaataaaagccgcttcaagtccaccaaacgaaaacagatttaaccagataagaagttcaggcggatttacggccatcgcaaataccaatacgcctaatactgcggtcactcctacgctaaatcgcttgatcgtttgatcgcttgcttcaggcttcacataattcaagtaaatgtctttcacgatcgcagaactaacgagaagtaacaaagagtcgaccgtcgacatgatcgcagccattggagctgctagaacaatcccagcaagccaggctggtagcacctctagtgcaatcctcggcattaccgtatcgccaacttcaattccaggtaaaacggcacgtgcaaatacgccggtgaggtgcattccaagcatgatcacacctacgacgattgttccgataatgagagcgcgatgcataccttttgaacttttataagacatggctcggacagccacttgtggcaacccgacaacacctacacctaccaaaatccagaaagatgagacgtacagcggcgtcagagattgatcagcgccaaatggagagatcaaatctggattttcagcccctagcgtcgtgatgatattttcaacacctccgccagcaacgactgttccgataagaatgactagtgttccaccgaacatcacaacgccctgtactgtatccgtgatcgctaccgccctaaatccaccgataatgacgtagacaagaaccgaggcggcaaaaagaaacagcgctcctgtataaggtaggccggttaacgattcaatgagtcgcgcgccaccaatccactgagcggccatcgcagaaaataagaaaatgataatactaagcgcagataaaataaccacgcctttactctgataacgctcctttaggaaatcaattaacgtaaccgctcgaatttttcgagccataatggcaaactttttcccgagcacggataatacaaaataaccagtggcgagctgagtcatcgataagaggacccagccaagtcccattgtataagcaacaccagggccaccaatgaagctacttgcacttccatatgtagaaatcatcgtcatcgcaagaataaatccaccaagctcacggcttccaagaaaatattcctgtaaaaagttcgatgttgtttttaaatgggtagaggcatagaatccaataagaaaaatgataacgagaaaaataatgagtggaatcacaacgtcccagttcattcgccttcctcctcatcaaacggaacttctttaaacaagaagacaaccgctaaaatcacgagaacgatcacaatccccgttccgagcacacagctgtagaaaaaccacgctggcagcccccatatataatgatagtcttccactggtttcgatccaaaaccgtaagcaaacccataccataaaataaaattaatgataacaagaacgacgccgatgagcgcttcacgattggcgattcgatagcgtggatcatcttttggcatcttatcgtgttgctccatgcttttcctcctttaaaacaaacctcgttctattataaccagaagaaagcttcaaccatagtgataagattttatcgtgattgatcagttggtaaaatctcaaaaaacgccgatcacgatcacggaccggcgctttggtttatatcctgtttaaacaaacgtttatttaagtacagctacgcctttcgataagcccttctctcagcataagaaacacatttataacaaaccggcttccgattgccctcatcatccaaataatactgaggacgtacaggcttcttcttacaaatcatacatttctctaaccccatcaatcttccgaaaaaccccttcatttctgtcaacctccttacctttaataaaccaaattggagcaatatgaaacacaatacccgcgcatcgccataaatcctgttaaactaataagacaacatatgacaaataccgggtggtgacaggcaccacgtaccacgccacacatcccgcccgtctatcaaaaggatgaacctatacatgaaagtgattcttgccactcctttctatcatcagcttcgtggtaatacgattaccgtccagcgtatcgccaggggtttaagcgaagctgatgttgtgacggaagtgatctctataacagaaaaaacagattcgatcacagctctcaaagaagccgatttaattcatggctttaacgcttatcgtttttatcagtttatgaaaaccttaagcattccgatcaccaattacacgattacgctcacaggaacggatcttaatcatgatttaacgaatccaaacagacagcatgatgtgatcgcctgtttgaaaaatgcactcgcggtgcacgtttttgacgaaaaagcgaagcgtcgtatcctagaggttttaccagatctagaaagaaagttgttcgtaattgcacagggaacgagttcctcaagtataaagcgctcacctaaaaagactactggctcgttccattttctccttccagcagggattcgagaagttaaaaacattcctttcgcgattaagagtttgaagaaattacgtcaaactcaccccgaggttatgttaacgattgtcggaccaatcattgaaaagaaggagggagaactcgttaaggaattaatactcgatagcgagtgggtgaattatgaaggagctattcctcatagtgaaatggaagggttgtacagtcgtgccgacgtcgtgcttaacacctcccgtagtgaaggacaatcttccgccatacttgaagcgatgagccacggtttaccggttcttgtggcaaaaaacaaaggaaacttaagccttgttactcataacaaaacaggacttatttatgaaggcgttgagcaatttatatcttgtgcatttcgtctcgttgagcaggaatctcttcgcgaagcactcggccaaaaagctgcgaagtacgtagaaaaacaccactccgcaacacaggaaataaccgccatacttaacatgtactcgttcagcttaaacctttcaaagaaaggggataactcgaatgattaaaagtccttgagtagtggatcacacaagggtcgtgtacgactctcctaatcataatgtgatgacgcataaaaactcagccaagaagaaagtgattttaacctttgatgacggtccaggccgcgttctcccagagctacttgatattctaaaaacagagaaggtaccagctatgttcttctggcagtcacgccttctttatcgagacaggccgtggaaaagggcgctagatgaagggcatgtcattggcactcattcgtgtaaacaccttaatttcagcaatctcagttatgccgaacagtttgaggatctcgaaagaagtaaactaaaaatcgaggcaatcaccggtacccctgtgacttatttcagacccccattcgggcgctacgaccttgccacaacgaaagctgctagagacctcggcttaaagacggtcatgtggcgcatcagctccatggattgggaactcgcttgtcatccggaagaaattttaagtaatatcgttccaaaccttgaagatggagcgattattcttctgcacgagctgaagcaaacggttcaaatattgcccgagcttattaaacagatacgctctgagggctatggatttaccgtactttcatagaaaaagaggagatggctaattttatagccacctcctctttcattgtacacaaaacgtcctatttacccctccacctcaacctcattcacaccgtccactttgcgaagcagttcataaatgtctgtcgtatgatttttctcaaacgtcattagtttaagctcaatctgtggatttttttctttcgtatcacgaacccgtacgtgacgaatttcaaagtcattcgccacaattgatttcataaaatcactcacgtttacgctttttttcagcgttaacttcgcccgcatttcccgctgccttagggcttttggaccgatgcgcttaatgatccagggaaggatatttacgctgaaaaggataagaccggcaccaacgaacgcttcatagtaaaaaccggcaccagccgcgatgcctaatccagaggctccccaaataatggcagctgtcgttaaccctgaaatagcatcattgtttcgtctcaagattacgccagcaccgataaaaccaatcccagaaacaatttgagccgctaaccgcatcggatctgttcggatattcgaagaaagctcagcaaatgtttccgcggactcaatcgacacaatcgttaacaagcagctgctgaccgcaatcacaatacacgtctttaatccaagtggcttatgctttaattctcgctcaattccaatcattaatccaagtaaagcagaaacacataatttaattagaacaatcaccatcgttcgtcatctccaccgttgaaatatagaaggaccgcatctctttattaccctattcacttgaaggaaatattagaatgaggcgaaaggtcatgtgtagtaattcgacaaattgtgagcaaaaactggcggtgacaggcaccgctaagcactacccttctacctcaacaaacgtagctccattcagatctcttagctgctgataaatactagttgtatggtttgattcgaaagtaagcaagcgtagctccacttgatggtctttttccttcgtatcgcgcacccgaacgtgcttaatttcaaaatctttcgcctggattgtttgcataaatgctgtgatgtccgtcccttttcgaagcgtgatttttgctctcatttcacgctgccttaattgacttggaccgattttttttattacccacggcaggatattcacgctaaataggattaagcttgccccaacgaacgcttcaaaataaaagccagcgcccgctgcaatcccaagcccagatgcgccccatataattgccgctgttgttagtcctgaaatggcatcgttatttcgtcttaatataactccagctccaataaaaccaatccccgaaacaacctgggctgctagccgcattggatcggttcggatgtttggagatatttcagagaaagttttcgcagattcgatcgaaacaatcgttaataaacagctgctaaccgcgatgaccatacacgtctttaaaccgaggggtttatgttttaattctctttcaatcccgatcatcagtcctagacaagctgatatacatagttttacaacgacaaccaccatacgacaaccgccctccaacaggtatttctattattttaccagtaataggatccttgaatcaaaaagaattgctactattgttcattttggttaaaatgcgcaaaaaaagagccgctagagggaactcagcgactcttaatctattttttccattaatgaatatcttttttcttgaaacgaccgcctcgtacttctgcgatatctgccatcgctaggaacgcggaatcgtcgtggtcagccacaatatctttcaatttcgcttcttctagtcgagtgatcacgcagaaaatcacttttttgtcatcacccgaaaaagcgccttccccgtgcaaatacgttacgcctctgcctagacgactcaaaatcgcatcaccaagttctttgtggttgtcactaataatccataccgacttcgactcatcgagacctttgattgtaatatcaatcattttataagcaacatagtatgcaagaagggaatacatcgcacgatcaaagctaaatacaaatcctgcgctaccaagaataaagaggttcgcaaacatgatgatttcccccactgaaaacggaagctttttactcgcaagtatcgcaagaatttccgttccatcaagggaaccaccaaagcgaatcacaatgccgaccccaattccgagaacaaccccgccaaacaaagtggctaaaagaatgtcatctgtaaaagcaggaacaggatgcaacaaagccgtcgaaatcgacaaaatcacaattccataaagcgttgaaagagcaaaggtttttccaatttgtttgtatcctatataaatgaatggaaggtttagaatgaataagaaaattcccagaccaatgccacttaaatgggagagcataatggaaataccaacaattcctccatcaataacttggttcggtacaagaaaaacttcgagtccaacagccataataatggcacctaatgtaatcataaatgttcttttcgctttttcctgaagcggtgtttttttatgaatttttgtttcatttattaaatcttctaacggcttactttcactcaaaatattgcctcctctatcttccatcaatttgttcttatttaaaataagacaaaatgaggtccaccacatggttgcctgagagctccgatgagagtacgatcattccccaaaatgggagcagtaaaaggaccacccatccaaaacattcgagcgcattattccaccatgatgttttttccatcactttttccacctcaactatgagtaaaatttgatccaagcacgaatcaatatcgtacgaacgtaatcaagaaaacgacatagctgttgctaattattttggcttttaaaggaatgtgatgaggtaattagagtggacagcaaatacattcagaaagcctctggcatctggtgaaatctcgattttcataaaatttttctgaggataaataagatgcggctgtacatcatgctcacttgtaaatggaacaaaagtgccaaacatcttctgcttctgaagagataccgaggaaggataagaaatcatttttgcatctggaagataagcgaattccgagattgtcggtttatcagccgaatgatagtcatattgacttaactcctgtgctgggtaaataaacacaagaaagccgaacaaaaccactaacagtaaatatctcatcgcattccctccttccggtaccatacttatccacatcttattaattttatcactgtatgaaaataattgtccacaaggagacaaaggaattactgctcaatcgacaaaacctgcgtttattcgggtggtgacagacaccacttttttccatctcttcctaaacagcgcgactattaaactactgttttcccattaaaggaaattagatccatttttacagtattttccccatgttgaccctcaccgaataagaggaatacgatgggaaagtgctttagaaattcatgagattttagcaaactatccagaaagaaggaattgttatgtgtggcattacaggttggattaaatggtctggtgacctctcaacggagcaggatacgctaaagaaaatggcagattccattgctcaccgtggacctgatgaagaagggttctggctctcagaacaggcggcgctagctcatcgtcgattgatcgttattgatcctcgaggcggtaaacagccgatgtcgtcaccagatcaacaacttgttcttacgtataacggggaactctacaattatcgagaattaaaacaggagcttcagcaaaaaggacatacttttacatcaaactcagatacagaagttgttctacactcttatatggaatgggaagaagaatgcctgaagcattttaacggcatcttcgcctttgcgatttgggatcagcatgaacaaaagcttttccttggccgtgaccacctcggtgtcaaacctctcttctactcaaaacagggcgattcgcttttctacggatctgaaatcaaagcgatactcgctcacccatccgttcaaccacaagtcgatcgtaaaggccttgctgaaatcttcggaatgggcccaatgagaacgccaggacaggcgattttcaaagatattgatgaagttcgtccaggtcattacgtgatcgcaaccgcagattcgatagaagaatatcgctactggaaacttgaatcacaacctcatacggatgatgtggacacaacgacagaaacgatccgtacccttttaaaagataccgttcaacgtcagctcatttctgacatgcccgtggtgtcgatgctttctggtgggctcgattcaagcggcctcacaagccttgcagctgaggagttcaaacactcagagaaaatgcttggcacctactccattgatttcgatcaaaacgaggatcatttccaaaaggatttcctaagacacgatatggacgaaccttgggttaagcgcgcttctcaacacgtaggtacagaccatcattctgtcacctttggagccaatcaattactttcaaaccttctcgaaccaatgagaggacgagatctgcctggcgtaggcgaaatcgaaacgtcgctctatcttctttttacagaaatgaaaaaggatgcaactgttgcactttcaggtgagtctgccgatgaagttttttcaggttatccatggttccaccaagaaaaatacctcgatgccgaggtctatccttggcttgtgaatctgaagggaatctcatcaatgctttctgaagaaacgaaaaaccaaattcagcctgaacaatatcagaaagaacgtttcgcagaagcttatgaagaaattccgtttctagaaggagaatgtgagtttgaggcgaaacagcgtcaaatgtcttactttttcatcacgcgcttccttccatttatgctcgatcgaaaagaccgcgcgagtatgaaaacgggttttgaagtacgcgtaccattctgcgattatcgcattgtggaatacttatggaatgtgccaattgattataaaaatgtggataacatcgagaaaggcattctgcgccgcgctctaaaaggaacccttccagacgatgttctttatcgcaaaaagagcgcatatccaagtgacaaagatcctgtttacttgaaaggtgtgcaaaaatggatgctcgacattctagataatccaaattctccaattctttctctcattgatactgaaaaagttcgagcgatcgcatcaaatcaggcaaaaggattgaacaccgatcaggcaaaaggactgcttgactacttaattcaggtaaatgcatggctagatgaatatgatattgagcttgtcagctaaatagtttcaccaggagagcgactaggtcgttctccttatttttagtaatctaattgtaatcgttagaatggtttgtctattttccaatcgcttcgacacacatgtcaaacgtgcgtattgtaagcgttcagaaaacaaaatccttcaaatttcgacaacgttttctcgatacctccctgtaatttttacaaatttacaaacattttaaaaagatgcactttttctattacgctttaaattgacaaataatttgctaaaatggggaagttattaaaaattggaggtttgattatggacaccaccatagacgaaaagccgacgaaaaaagggaagttaaaacacccacccggcttgtatcttttgtttatcacagaaatgtgggaacgctatagctattatggtatgcgttcaattctcgtcctttatttgacagctgagctaatcagcgggggattaggaatggagcaagataaagcattaatgctttacggtatgtacactggtcttgtttatttcacgccattaattggtggttatttaaccgataaattcatcggtttacgcacagccatcacaatcggcggtattacaatggccatcggtgattttacactgtttgctgtccaagaacaatggggcctttatctcgggttactgttacttattgttggtaacggatttttcaaaccgaacatttccactcttgttggagagctatacagtaagaacgataagcgtaaagattcagcgtttacgattttctatatgggaattaaccttggtggcttaatttcaccattgatcgcaggtcttttatacgccaatgttttctattccaatacaggtggcgtcgagacatttggtttcaaatatgcgttcctagcttcatcaatcgggatgattatcggacaggttacctttaatcttctttctaaaaaatatcttggtgatgtcggaagaacaccatcttcaaaccgtgtgattccaacagcagaaggtaaagctaagccgcttactaaaatcgaaaagcagcgtactgcagtcattttaatcctagcagtgttcacagtgacattctgggctggattcgaacaagcaggtgcttcctttacgctctatacgagagatttcttagatagaacggtctttggttatgaagtacccgtttccttcttccagtcattaaacccaatgtttgtactattgctagcaccgattgtttcagctctctggttgaaattagcaaaatcaaaacgtggtgactttgcaatccctacaaaaatggcatttggtttaatcttacttggtgtcggatttatggttatggttcctgcagtaatgatgacaggaagtgatgaaggaaatattgcggtgaaagcaagcatgctatttatggttgttacgtacttcttccatacacttggtgagctatccttatctccaataggactttctctcgtgagtaaaatgtcaccagtgaaaatcgcttctttattgatgggtgtttggttcctaagtaacgctgccgcaaactaccttgcaggttacatcgcttcactcacaacatcagcaggatatcttgaaatcttcatctatttaggtatagctgctctaagtttaggtatcatcttacttctactttctaagaagctacaaaaacttatgcatcttgaagaatttgaagaagagcaaaccgtaaaaaaagcaagcacgttctaattctttaatgtcaaaatcaaaagcggttccccttttagtgtgaggggaaccgctttttcatttctctatatttcgacgcattccgccaatcttcgggtggtgacaggcactcgctaaggcactcgcgggaacacacacctcatccccaccaaccagcggtctcaaccagtcatgataagcttccggcgcttcctgaaaccaatcaggcaacgcccgttcaccacctgctacaacctgatcaagatccacctcatcaagcgcgtagacatatttcgatcccgctgcccgtcgaaagataaccatcacatccgaaacccctttgcgcacaagctcagctgctttcacaccagcttgatacgcttctatccggtcctgattcgagcacgcaagctggcttgaccgctgattcatccctaaaatatcagcacgtgctactatgccaagctctgcctcagcaagtttggcaagctgttctgaaatcccaccaaggacttcacgtccgttaacaatttttctcgtaacagtccgagcatccagctttaccccttcactaaggacaacagaagcaaaaccatactctttcaccgcttctcgaatgcttgctaccaccttcacggcatcatgcttctgttcagggagataaatcaaatgcggtccctcattctcatgcaccttcaacaaaccactggccgccgcaagccatccaacatttcgacccatcgtttcgatgattcggacctgttcaaaattccgcatcgcttcaaggtccttgctcatatcgtatgctgcatgagccacatacctcgccgcactcccaaagccaggcgcatgatccgtctcagcaatatcattatcgaccgttttcggaatgccgatgacctgcaaatccacgttcattcgctctgccattttcgagagagcatgtaacgtccacatcgtcccgtttccaccgatgaacacaagcgtatcaatacctgccttcttcaaacttccaacagcttgagccatgtctgcttcgcttaaggtatagcgccctgctcccagccatgcgcctgagacgcttcgactcgcttttgcatgatttcgcaccgagggattcatctcgataaaccgcccctccacaaggccctgaaatccttgaagaacccctgtcacatcttgatcgatctcatctaaaaaccctacaagactttcattcaatacagcagtgggtccacctgcctgaccaattgcaatttttttcatttctcaagcaccaacctctctatccgccaactccatacccgtttatcctttcactgaaccagccgtcatcccggcaacaaagtagcgctgtaagaaaacgtacgccacgatcattggaatagaggcaatgattaccccagcgaaaatcatcggatagtttgttaaatactgcccctgaaaatcaagtagcgcaatcggaagtgtttttacctcgcttgatttcagaaggagcaatggataaagaagatcgttccagacaatgacgaatgcaaagataactaccgttgcaacggatggaagtgatagcggcatcacaacgcgtaaatacgtttgccattcacttgccccatcaatttttgcagcttcaatcaggccatccggaagtgttttcataaacccagttaaaataaaaacagcgatcgggataagaaacccgattgatacgaaaatgacgccccgcagtgtatctagcatgccaagcttatttacaagtaggtaaatcggaatcatgtttacttgcgttggtaccatcatgccgacgacgaaaaatccaaacagggcaaggccagctttcttaggcatccgaataatcgcgtaagcaatcaagcttgcaaagaaaatgatgcacaccacgctcacaccagtcacgatcacgctgttcataaaatacgtcaccattgactcttttagaaaaaggtcctggtagttcgtgaacgaccagctctcaggcatgccgagaggatttttataaagctcaggcgttgttttaaatgtcgcaaacaacaccatgctaaacggcaggatgataatcgccgcgtaaatgaagagtaaaagctgttgaggtatttttttcatcaaacgttcctccttcccttcttaaaatttcacatcgtttgatttcagcagtctaaattgaagtaccgtaacgatcgcgataatgatcataaaaataaccgcggcggctgaagcatagccaaatcgaaagttaataaacgcttcatgatataagaatgtagaaagaatttccgttgcataagacggtccaccaccagtcatcgcgataacaagatcgaacgctttaaaactttgaatcgttgtatacgcgacaacaattgtggctgatggggctagcagtggccacgtaatgcttttgaacgtctgccatttgtttgcgccttcaatttctgccgcttcatagagctctttcggaatcgcgtgaagaccggctacaaaaatgatcagcatctgcccggtatgcgcccagaactgaacgaatgcgaggctatagatcgcgatattccgatcgccaagccacgattttgcgagactttccaatccaacagctgaaagaacgttattaatgacgccaatgttcggatcgtacataaacgtccaaacgaacgctactgataccgaagcaacgatcgttggaaaaaagtaaacagcccggtaaaagatattcgctttcgtatttttcacaagtagcatcgcaaagaacaaacttagcaccgtctggaaaatcaaaacgccaagcgtaaatttcaagttattgccgagtgattgaacaaaaattggatcatccgttaacatattcgtgtagtttgagaagccaacataattaaacgttggtgcaatcccattccaatccgtaaagcttagaaaaagcgcggcaaccgttgggcctgcaaaaaacacgctataaataataaaacccgggagtacgaagaaaaacagcgcccagttccacttctttttccgctttttcgctgttgaagcaacgtagggagaagcaacgctcgctccccctactcgctccacgttattgtttgattgcacggtcaacctcttcttgcgcttttttcgcagcttcttcaggttctactcccgatagaacatcttgaatcgctgtctcaatcgctttacttacttgctccttagaaagcgtatagcgcggctggaacaacgtttccttatctagccatgctgctgtttcggttagttctggagaatcatattccacatcgttcaccgttagcaactgccctgttgcattcgcatactctgacgcaatctcaggctttgttagaaattcaatgaatttcatcgcttcttcttggtgttcagactttgcatttacacctagcatgaacgtcgaagtatgaatcccttcatatttcatttcatcctcagataccgtgattggagaaagcaacccttgctcaatatcaggattttgctctgctactgttgccatcatgtacgatccaagcgcaagcatcgcgcctttttcctgagcaaatagcgcagccgctccttcttttttcgtacctagcggatctttttggaagtaacctttgtcgtttaactcttttatctgactcaacgtttttacaaaccaatcattcgttaacttctcttcacccgtttccaatttcgcaaaagcttcatcagaaggctgattgttcatgaccatcgggttaataaactgactaggactaacatccccagcgaataaaatcggatcgtatccgttgtcttttaacgtttgactaacttcaaggaagccatcccaatcttttggcggctctaggccaagctcttcgaaaacacctttgttatacacaggaatgttatacacaagttgataaggaacagctaactgcttgccatctttttgaccagcgccaagcatattttctgaaaatttatcaacaaatgcttgatcacctagttctacataagcaccagattcctgaagtgcttcaaactggctcccaggaaaacttgcaaatacgtcagcaccttttccagaaagaagcgttgccgaagcattcgcaatgtatgaatctgacgggagcgcattcatttcaacgttaataccagggttctcttcttcaaacttcttaatgattgcattaaatgcttccgtatcctctccacgccagtgaaggaaattaatcgttgtcgcatcccctgactccgctccacccgtttcatccgcattaccacaacccgcaaggacagaacccattaacaaaaccaccatcatcaaccaaagcatttgctttttcactctttttgcccccttgttttcgtaattttaaaaatagtaacgtcatatcgtatagttaaaacgtaatgacctttacctcctttaaaaaagcaccttcacgaggtactctgatttgattatgtgacaattcattgaacttatttcttattatacacaatattaaagcgctttcaatattaaaaataaaaattttcaaactatttattttatagtcatttcatcagattgaagccttgaagaaggcagggttctccaccccgcctaccgctcaagttcaatattatagtgatactgatcactacgatacttcgttttcgtatactcgatcggatgatcattaatgccaagactaaggcgcgtcatctcaagaagggcttcccctggtcgaatgccaagcgcatccgcttcattgatcgttgcgttaatcgccgtgattcgctcatttgctttttttagataaaattgatgctgttctagtacctcataatacatcgcctgatttagatcatatttaattaaaatctcaccaatttcttttggccagcacgtacgttcaagcgcaattggcacttcgtccgcaaaacgaatccgctcaacaagtaagattggttccccttccgataccttcaacatatcgttctcatggtaaaggtcatcacgaaactccactcgtagcaccttcgaatgaggcgtttgcccacgctcgagcacttcttctgcgaagcccttcagcttgccgagattcccaatcaaattctgtggttttacgaccgttccgcgtccctgctttttctctaacaaaccattctgtacgagaatcgaaatcgcctgcctgatcgtcgttcgactcacatcaaactctttaatcaagtcctgttcagtaggaataagcgtattcggtttccaagccccagtttgaattcgtttaattaaaacatcttttatttgaaggtatagcgcttcccctttattatggttcagtttatctgatgacatataagcctctcctcttgagccgccaactgtttggctcacttcatactcttattatagcgaaaaagaagcttgctttaaaagggaagtcccatattagacaagaagccctttttccttcagcatttgatcaatctgaaccgttctgccagacttcatcgactgctctgccgcaacgccaacaatgacagaccagagcccttcttccactttggctgttgttgtcggctttttctcgatgttatcgataaaataaacatgttcataatacgtggctccaccatgaccactctcttcaatatacgatgggtagcacggtgtcgcaatgcgtgaaggcttcccttccccaagaattatttcaaattgatttcgtggacggtgtgccccaagaaaatcttcgttttcggatacttttagacgcccctcatccccacacacaacgagctcctcgtagaacattggagagaacatgcaaagctgaaaactcgcgcgaacgccattttcatagcgcaccgtcaccatggcgttatccacaatatccgattgctcactttgatacttaaactctttaaagttgacgtccattcctccgttcgcatacacctcgaccggtttggactgggcaaacaagttcatgagatcgaagtaatggcagcacttttcaacgagcgttccacctgagtacttcgaaaacttattccactgcgccactttatcaagaaacggcatgcgatgctccatcatgttaatcatcttcacttcacctagcgacttccgctcaagcgcttcatgaatcgcctcagaataaatcgctttatagcgatattgaagaccgatttgaaacaccgcatcataatctctggcaagctctgcgatcgtatgcgcatcttcaagcgtcgttgccatcggcttttcaagtaaaatatgttttccagaagtgatcgcttctttcacaatatcaatatgcgtatagttcggcgtgcagataatcagcgcatccacttcgggatcgtgacaggcttcttgcaaagttggataaacggtaagagtttccatgtcaccagctatggtcgagaacagcgccgtcgcctgctcaatgcttttcggatttggatcataaattccatgaacagtcgcccgtccctccatcatcgtgacacgcatatgttcctgtccgatattgccacttccaataatcgcaaacttgtaggacggcggaacactagcagaaagataccgatccgtatctggtaaataatcaaacttcttgttccgagaaatataccgacttcgtagttcctttgctgctttactcatgagcgaaaacctccttgaatgatttcatagatttctaatgaatggtagatgagggcagtgtcaaatgatcaaaccattaagtaatgatgtttaatcaaacatcgtaatcttttaactcattataatgaaagcgtattcaaaattgcaagaaggttttcaaacggaagagccattcgacaaataaggacaaacatcgggcagtgcctgtcaccgcccgatttacccttcatttcctgtgtgctaaatgacctacccttacaatatacataagatggtagcttactaagacatgttcggaggaatgtgtgatgaaaaaaagcctaattcttaccctttcaatcgtaggggcaatcgcaacaatccttgttagcgtcttaatcggcgtgttgatcggtaatgcagaccttgaagaaaactacaccgaagacctgaagaaaattaaagcagaaatcacgaccgctgagaaagaagccaaaaacgaaggggagaagcttttatcaattcaaaacgagattagtgctgttgaggaacaacttgagactgaaactcaaaagctagaagaagctgaagtgaaagctgaggaagtaaaaaaattgattgatgagaaagacaccatcttagatgatattgagaaactgaataaagaacgtaaaaacgcaaaaaaagagacgagtgggcttgaaaatgatgtaaaagcgaaaaaggacgaagtgagcaagctcgatgacacaatcaaagcaaagaaaaaggagattgatcagcttgaagaaacaatcgtaaagaaaaacgaagaaccgattaaacttaccgcaggccaatacattgtcggcagcgatattccagaaggaaggtaccaggtgacaaacatcggagaaggcacgaacttcttcgtctatgactctagcgggttaccgacagtgaataccatcctcggcgacagtattgttggtacaggagatttcgtcttttttacttctgatggtgatatgattgaaacactgggacctgtgaagttgataccagtcgaataaaagaataaactccccagccaatcggccagggagttttcgacatgatatgactttattcgggtggtgacaggcaccttgtactcacgtgcgcactacatcccaacaccactatccttataaacgccttttctcattctcataaagaagtacaatccgataatgaaccagacagcgatcatgatccattcataaggccagatcaatgcggcaggcattcccggtaagtagagtgcgataaatccgaagctcataataagtgctagataaccataaacaggcgatttagccgctcggaacggacgcttcatctctggctctgtttttctaagcttaataaatgaccaggctaccaggaagtaagctactacaatcccaagccctccggcgtcaacgatccacacaagagctgatcttccaaggagtggagctaacatcgatagaattccaataaataaaatggcgttcgaaggtgtgtgaaatttaggatgcagtcgtccaaaccaggctggtagcataccagattcggccatagcgtaaagtacacgactgccgccaatcacaaacgaattccagcttgtaattatccccgcaactcctccaagaattaatagttttgcgaataaagcggatccaaataaattgcccattgcatcagccgtcgccagctccgttgaacctaattcctcctggctcaatccgagtgacacgccaatagcgatcgctatgtagaagataatcgccccaataacagaaacaacaagaaattttccgatttgagcatgtggaagatttgcctcttcagcaacctgtggaatgacgtcaaagcccacaaacaaaaatggaaccatcacaagcactgtcatgatgccgcccattccacctatgaaatgtggtgttaaatgagctggttctccatttacacccgctccaaaaattaatagcaatcctgctgccacaatgacaagggtgaaaacggtctgtaacactgccgcttgtttaagcccaatataattaatgagcgtgataatgaccgctccggcagaaccaatcaatacccagttcaaatggacatcccagccggcaattgtccaaaggtagccagcttgatagtctggtaataaatagtcaataaccgtaggcaatgcaacggcttcaaatgtagctaccgacacatatcctaacgtaatagcccaggatgcgataaatgacgcattctctcctaacgcgcgatgaacgtactcatgctcccctcctactcgcggcatcgcggaggctagttcagcataatttagcccaacacagataacgagaaacccaccgattgcaaaagcaagaactgctccatacgatccagcagaagttaaccacgttccagatagaactacccagccccagccaagcatggcgccaagtgcaaggaacagaagatcaaatttcgacagaaccttcttgagcttcttcttttccccctccattacaaaactcctttatgcaacgaattcgctgaaactttccgcatggcttcttcgatgatgaacaatccttcttctaattcatcatctgtaataacaagaggcattaaaaatcggatgacgtttccatagacgccggcaccaagtaaaaggagtcccttctgctgggcttctgctaaaacctttttcgttaattccttgtctggtacttttccttcacccacaatctcaattgcattcatagcacctaacccacgaacgtctccaataaaagaaaactccttcgcaagataagtaaatcgctctcttattttctcaccgatttgaagcgctcgctgattaaggccttcctcttcaatcacatcgagaacagcaagtgccgcacgacaaccaagtggacttccactatacgttccaccaagttctccttgatcagcagcatccatgacttctctcctacctatcacaccactaatcggtgttccagcacctaacgactttgaaactgttataagatctggcacaacaccaaagtgctcggatgcaaaataacgccccgttcgtgcaaatcctgtttgaatttcatctgcgacgaacagaatgccatgctgttcgcaaattgatttcacagcctgaacaaacgatttatccggcacaataaatccgccttcgccttgaacaggttccatcacgactgcggctatcgtttccggcgccacttcttttagcagaaaatcgttaaactgctgaatcatgaaacccgtatactcctcttcactcatttgctgtggcttccgataagaatacggaaacggtgctttatacacttcaggagcaaacggaccaaatccatatttatacggcttcactttacttgtcatcgacatcgtcattaacgttcgaccgtgaaaagcattctggaatgtaacaactgcctgacgcccagtgtattttcttgctatttttaccgcattttctactgcttcagcaccactattctgaaggagtactttcttcggatgagttccgggagctaatgctgctagtttttcagctaattctatataaggctcatacatcatcacattaaacccagtgtgaatgtatttatcgacttgatcatgcaaagcttccttcactcttgggtggcaatgtccaacgttaatcgtaccgatcgcaccagcaaaatcaatgaacgtatttccatcaacatctgtcactcttgccccagtagcttctttagcaaaggtcggaattccgcaggttacagcgttaggtacaatattctcgcgacgttctaacaattgactagctacaggtcccggtaaacttgtttgaatcgaagcattttttgtcatgatctatcactccttataattagttgaaaaccgatcgctttccagataaatcactcaacgtggagagaagatgagcttcaacggcctccgtcactttgttcaaagcgccatcacgaaaagcattcaccatatgttgatgctccggaatcgacttcacttcttcaatcggaacggcataaaattcatcctttaaaatcagataacaatccgaccattgattaagcatttccacttgttgaagcaaaaatttattctctgatagtcgcgctggataagagtgaataagagcattcactctcatgaattcttcaaaattctttgcctcatatgcctgcttctcctccgctaacagctcttccatttcaagaatgttctctcgagtaacaattggaaccgctagtcgagcagcataactctcaagcacaacccgcaagtgaaacacatcagcgatctccttgtccgagggattataaacaaaggcaccacgatgaggcacaatttctaataacccttcattccccaatctcttaaaagctgcgcggataggagtgcggctcatctttatctcttcactcacccactcctccgtcactcgttgtcctggtaaaatccttcgcagcataatcgcacgcttcaccttttcataggctaactcttcattccgttttttagctgtcatcttaaaccacctattgtgtccaaagattgtatacaatttattgatttatctgacattttaaattaaacagacgacattttcaataaattctgacaaaataaaccttttggtctatgtatgatgccctttcaaagagtaactgagtgctcttatcctttataaacaaaataaaaacagccctttcctcccaggagttaagagctgtttcttcgacaatatatgagctattccgggtggtgacaggcactcgcgactcgccaacccgtcccctaccccagaaacaccgcgccatacgccagtgccccgacaatcacaaacgcaggatgcaccttcatcttttccatcagaacaaaactagccacaatcagaaagatcgtttgaactagccccgctccttcatacgaactcgcaaagaactgaaacgccataactccaagcaagattgcaatcgtcgggcgaataagggccgtcatcttcttcactttcggtgagttcttaaatcgatttaaaagactcagcaacacgatcatcagcacgagcgaaggcgccactgtcgcaaacacaccaacaaatgcaccaagaacgccaccctgctgaaagcctatgtatcctgccatctttgtggcaatcggcccaggtagcgcattcgccatcgcaagcatttcactaaactcatttacgctcatccaaccgaagcgaccgaccacttcattttcaacaagcggaatggacgcaggtccaccgccgtaaccgacgatgcctggtatgaaaaaagcgacaaaaatatcccaataaatcatgaggagggctcctttctcacctgaccgtcgcgcttcccatctttaccagtcggtttaagtagagcgtaaagcagcaaacatccaataacaatccccggatgaacaccagcaatttcaataaataaaaaggaagcaaccgtcaacgcaatcgtcaaaatccaccctaaattcccctgtgcttttctaaaaaaatcatacgttaacacagcaagcataaccccaaccactggaacgaccgcctgcgtcattccctgtacccatgccttttctcgaaacgtggaaagaaacgttaacaagaaaatcattatcgcgatcgtcggtacaatcgttgcgagtacggcattcagcatacccaatatccctgccactctgtaaccaatatacccggccattttcgttgcgattggtcccggaagtgaatttcctaatgccagaacatctgcaaattcatcatcgttcatccatttgtatttctcgacaacttccttatgtactagcgggatagaagaaggtcctcctccatacccaagcattcccactctaaaaaaagtgagaaaaaggtgccactgttgcatgatccaccaccttccgaaacatcacgccacttcttaataagcggcgatcgttccgtctgttcttgattctgtccctccgaaaaaagtgcctgactgctgatcacgccaaataatttgtccgcggccgaacgcccctttttccagttgaacttcaatttcatgcccttttcggctaagcgcctcagcaagataaggagggaacgtcgattcaacccacacccgcttcccgtcaacccactgccacctcggcgcatcaagtgcagattgcggatttaaatgaaaatcaatcatattcgtaattacctgtaaatgtccctgtggctgcataaagccgcccatcacaccaaatggcccaaccgcattaccgtctttactaagaaatccaggaatgatcgtatgatacgttcgctttccaccttttaacgcattgtcatgctcaggatccatcgaaaagttatgacctcgattttgtagcgcaatcccggtgccaggcaccacaagtcctgaaccaaagcccatgtaattactttgaataaacgagaccatgtttccttcgtcatccgccgtcgctaaatagaccgttcctcctttaggaggttgtcctggtgacggaacaagcgcttcatcaccaattaactgccggcgactatccccatatgtaggcgagagtagatcccgaacagcaactgacatttcctgctcatcggtaatgtacttctgtccatccgagaaagcgagcttcatcgcttcaatttgcttatgataggtatcgaccgaatctttatgatcaaactcaaatccatttaaaatattcagcgcagacaacgcaatgagcccctgcccatttggcggaatctcccaaacgtcatacccacgatactgaaccgaaatcggatcaacccactcaggcttaaatcccgaaagatcttcctttgtcaaatacccattatacgctttcgaaaaagcctcaatctgatcagcaatctctccttgataaaaagataccgcatccgtttccgcgatttttcgtaatgtttccgcgtgaccttttgacttccaaacctcgcccacttctggcgcacgaccgtccggagcaaacgtttcaaaccagtgccgaaactcttcgccctttaactctttttcaaaatgagcgtaagcatccttccaaaacttacttaaagttggcgaaaccggatacccttcctccgcatagtgaatcgcgggcgcaaggacctcttttaacgaaagctttccaaatcgtttcgacaaagccgcccacgatgccggaacacctggcacggtaacgggaatccagccgtattttggaatttcattatacccacgttcgttgactgaatcaatggaaatcgacttcggcgctggcccacttccattcaagccatgcaattcacctttcgtccaaacaagggcaaacgcatctcctccaatcccgtttgaagtcggctcgacaaccgtgaggactgctgctgttgcgatcgccgcgtcgatcgcattccctccatttttcaaaagatctagccctgcctgtgccgctagtggctgggatgttgccaccattcctttattggctaccgttgtcatccgttgagaagcatagggataatgtaagtaatccgtcgtcatggacataaaactcctttcaatttatgtagtgttgaatagataaagaaccgtattctgaacctgaaacgccacaaaaagaaaccttttcatacctcagagattttcccattatataggaagccttcttgaatgaaaaggttttctttagaatatttttatttttcgatcatttatcaaaaacttatctctcgacaactcacccaaacgcactcccaggatcatactccccaagatcaagctcattccgctctccaagcaccaaccgcgcaagctcagctccaagaaacggtccactcgttaagcctgaagccccaagaccatttgccacaaaaagtcctttcacgcgcggaaccgcaccagcaataggtacattacctggcgtaaacggccgaaatcctacctttgtttggacgtacgtactatccgaaaatcctggcgcaactttcagcgctcgatcaataatatggtgaacgccacccatcgttacacgcaaatcaaaaccagcctgatcttcctgcgttgccccaacgacaatccgaccattttcaaatggaaggaaatattgaacgaaaggtggcatcacaattggccattttccggtatctgtatcaggtagatcgagatgaacaatttgcgctttttggggagaaacgaggaacttcatccctaatggctgaagtaattctcgcgcccaggcgcctccggtcacaatcacttcattcgcataaaaactttcattatttacaacgacgccactcacgcttgaactatcccataataaagaggcatctccgcgaatcaccttcgcaccatgcttttccgcacctcgaatgagtgcatttcgtaacgcgtctccattcacacgcgctgccccgctcacatgcacggccgcatagtgatcggacagcggaggaaacagcgcatttgtttcagcagcggaaagccgcgaaacctcacccatctctggcgtatccttccgccgctcgatcgcaagcgccagctttcgctcaagcttcatttcaccagagtaaatgttaatcgcaccaacgcacgcatagccagtctccgtctctccgtcctttttcagcgcttcaattaactccggataatatcgtgctccagcttcaacgagtcgataaaaagcgcctccccgtcgattcgttagccacggacacacaatcccggccgccgcttccgtcgcctggcccgcgtcgttccgatcgacaagcaacacatccgctccttgcttggcgagatggtaagctgtcgacgctcctaaaatacctgatccgattacaatcattgatttcatatcttacaccttttcgtcgtttgtctgattaggtattttacaggaatgttgggggagactcaattgtgggttattatatgaacaaacaaagttcctgactaattgatatttggatagactgaggagctattctaccattagcgagtttaatcaaacgtttgtttaaaaggaggaccaccttatgaattttaaaaaagtgattgacctctctattccggttaacaaccaaatgccagtttacccgggtgacccgaaaccaaacatctaaccaattgccacgtcattttagaagaagtatctcacgcaatcgaaagtatcgctccaggaacaattgcactttttcatacaggctggtcaaaacatcttgaaaacagagaactatttcaacttcccttatttgtctgttgagattgtaaattgtcttctcaaaaaggcatcccaaccttcttcatctatacttttagcgttgatgttcctggtgaaacatcttttccagcgcccgaagtgataacaccaaagaaccgcattaaaggagagtgcttctctaacttcgatcagattgatttcgaaaacccactgatcattatactgccgctaaagcttgagtatttggatgcatcaccagttagggcgattgcggtggagatcgaataaattcccattaccaaaaggacttctattaaatcacgtgcaccaaatctacagagcccgctctcccatgagccggctctgtttcaattcgacaaatacaaacaccattcgggcggtgacaggcaccgcccatctttacctcttaaacaccaccagcttcatctccgtcatttcctctacagcgtacttaattccttctcttcctgttccactttccttcacaccaccatacggcatgttatctacacggaacgttggaatatcattgattagcacacccccgacatgaagacaatctgcggcttcaagagcagtatgaacattttccgtataaatacctgcctgtaacccataggccgagtcattcactaggtcatatgcttcttccatcgattgaaacttattaatcaagacaattggcgcaaacacttcctgacaagaaactttcatatccgaagcggcatttaatatgacagtcggttctaaaacatttccatcagagctcccacctgtagcaaccgtagcaccacccttcttcgcttcctcaatccaggacaccgctcgcttaacatcagatccagaaatcaacgccgatacatcagtctcatcatccagcggatttccacaccttagcatcttcgtcttctctacaaatgcctctacaaatgcattatagttcgattcatgaacatacaccctctgaagcgaaatacatacttgcccctggtaagcgaaagcgcccatgacagcacgatccacaatacctcgaacatcaacaccttcatccacaatcaaagccgaattcgaaccaagctctagcgttacttttttcaaacccgccttgtttcgaataccaatgccaaccgctggactaccagtgaaggtaaccatattcactcgctcatccgttacgattcgatcgccaaccgtctttccacttcccgtaatcacattcagtgcaccttttggaagtccagcctcctcaaatagctcagcgataaaataagcagagagtggcgtctgacttgccggttttagcacaatcgtattgcccgctgcaatagcaggaccgactttatgtgcaacaagattcatcggaaaattaaacggcgtaatcgctccaataacgccaagcggttcacgcacagtatagcctactcttccttcaccaccaacggctgcatcaaacggaatcgtctccccttgtattcgcttcgcttcctcagcagcgaatttatacgttgctatcgtacgcgccacttcgccttttgccgttacgatcggtttggctgcttctagcgcaatgatttctgccccctcatccgcacgttcgcttaacttttgaacaaaccgctctagtatcgaagctcgttcgtgtgcaggtagttttctcatcactcgcttcgcacggtaagccgcttcgattgcgctatcgacatcagcttcattcgccatcggaatttcagccagaacatcacctgaatatggggaaactaaatccttataagactcaccctctagccattcaccatcaatataaaatttcttcttctgaatcgtcgtctgcataatcatccctcatttccttttattgatgaactggagctaacgctgacactacgtcttgaatcacatcaagcgcttcatttaactgatcgtccgtaatcacgagcggcgataaaagacgaatgacgttcccatataaacccgctcccatcacgatcacaccgcggttatggcactcttttaaaatttgtcccgttaattctttatccggttcctttgtaactggatctttcacaatttcaatcgctaacatcgcaccaagtccacgaacttctccaatagaagggtgcactttctgcatatccttaaaccttgacacggcgatatcaccaatgtgatttgctcgctccacaagccgttcttcctccatcatctcaatgacttcaagcgccgcaacacacccaagtggactcccaccgtatgttcctccaatttctcccggattcggtgcttccataacctcagctcttcctgttacagcactaatcggcaaccctgctgcaatcgattttgacatcaccattaaatcaggttcgatgtcaaagtgctcaatcgcaaacattttaccggttctgccaaaccccgtttgcacttcatccgcgataaaaagaatgccatacttttcacagattgctttcacaccttgtacgaatccttttgacggtacaacaaatccgccttctccttgcactggttccataatgattgccgctacttcatctgacggaacttcacctaggaagaaatcctccaaacgctttagcacttcatgatccagctcttcctccgtcatactcgcatgcttccggtaatagtacggataagccattttatacgtatcaggggcaaacggcccgaacccatatttatacggttttaccttgctcgttaacgacatcgctagcaaggttctcccatgataacctcgttcaaacgaaataatcgatttccgtcctgtatactttcgtgcgatcttcacagcgttttccactgcttcagcaccactatttaagaaaaaggttttcttctcactattgccaggtgtcatttcattcaatttcttcgcaagttgaatatacggctcgtacatcattacgtgaaaacacgtatgaaggtattgatccacctgtgccttaagcgcttcgacaaccttcgggggacagtgcccggcgttcatactaccaatcgcaccggcaaggtcgataaatgtattcccatcgacatccgtcagtagagcaccttctcctttttctgcaaaagtcatcattgtattaaaaggacctctcggcacgtgcttttcttttagctccaataactctgacgcttttggccccggtatcgccgttttcaactcaatactttttttacactgttttgttttcatgtaactgcctccctctgtcattttcaccttctatacatgcaagcttcataccaacttttttcagaaaaatagttttgaagggtaattttgcgatatgataaccttagaaagtagtcagatttgcgcgaatattaaaaggggggattcagcatgtcttcattagattatttagagtatgaattaaatgccatcttacatgcatcgaaagataacattgttatcgcggatggcactggcgttattttacgggttagccaaaactgtgaagtcgtctatggaaggaaagcttcttttttgatcggaaaatcagtaaaagagcttgaagaagatggcatcttttcaccctctattacaaggcgtgttctagcagaaaagaaagaccttcaaattatgcaaaaaacgcctacaggccgcgtcgtcatggcaaccgggttaccggtttttgatgaaagcggcacgattattcgtgttatcagcttctcccatgacttaacagagcttcagcatttaaaagaagactatgaagaattgcgtacccagatggaagtctatgaaactgaaattcaagaacttcgcgacaaggagagagttccagaggagtttgtcattaaaagtagagcaatccagctgatctggcaacttgtagaacgcgtggctaattctgatgcatccgttgtttttcttggtgaatctggtgtaggaaaaaacgtatttgcacgtgcgttacataagggtagtgaacgccgaaatggtagttttatagaagtaaactgcggagctattccagaaactctttttgaatcagaaatgtttggctacgagccagggtcgtttacaggcgcaggtaagaaaggaaaagccggcatgattgaacttgctaatcggggcacgctttttcttgatgaggttggggagctcccacttgctgttcaagccaagcttctaaaagcgatccaagaaaaaacgataacgagagtcggaggaacgaagccaaaaacgattgacttcagattgattgcatcaacgaatcagaaccttgaggacatggtgaaaaaaggtacatttcgagaagaccttttctatcgattaaacgtcatcccaattaccatcccgccccttcgcgaacgaaaagaagatatcgcaacactcgcagcacattttctcaaaggattaaataacaaataccgaacgaataagttcttccatgcagcgacaattgaaagcttgtcagaatatacatggccaggaaatgtgcgtgagcttcagaatatcgtcgaacgcctcgtgattacagctgatgcaagaacgatttatccagatgcacttccctcctacattcaacaggatgcggcccagaaactgacaagctttttaccaggtgctgaagagaaaacagggacaacactgaaggaagctttagaagaagtagaaatcagatggttgaagagagccttcaaacaatacaaaacaacttacgaaatggcagattatctcggaatgaatcaatctacagtcgtgcgtaagcttaaaaagtacaagatcaatgcaaaatcgcattaattatgcatttcagcatcaaaagaaagcgcatcgatgcactaacgcatgagaaaagcgtcaaaagtgttgcccctctgcccttaaagttggcatggaacttgcaatatttatccgtgagactaacattcacaggaggttccaatatgtatcaacctaaagactcttccaaatccccgcgattttgcggtgtgagaacgtttatgagattagaacaaattcaaacgacagaaaatgttaactttgccgtccttggcgttccattcgatacggctgcttcaaatcggaccggtcaacgcctcggaccacagcatattcgtaacttctcgacgctacttcgtccatacaatccagatatggagattaacattttcgattattgctctggcgttgactatggggacattgatgttattccaggaaacatccaccgtacatacgacaacatggtggaaggattggctccgcttctcgatgcagatgttacacctgttatcatgggcggcgaccattccatttcattaggaaacctgcgtgctttccacaagaagtacggtccagtagccctcgttcactttgattcacacggcgatacgtgggacaactattacggcgagaaatacatgcacgggacaccatttcgacgcgcagtagaagaaggattaattgatactgatcactccatccaggtcggtatgagaggtccgttgtacggtccaggtgacattgaagacgcacgcgatcttggatttgaagttattccaatgaaagatgtccgtaaactcggatttgatgaagtaatttcacgcatccatcagcgaaccggagatcgaccagtatttgtttcatatgacatcgactttgtagacccggcttttgcacctggaacaggaacgccagaagtcgcaggaccgaacagctatgaagcgcttgaatatgttcgtggactcgatggattgaaccttgttggctttgacttggtcgaagtacttccgacatacgatcacaatgaaatcacagcggctctagcatcatcaattatgtatgaaatgatcacgctgattgcgttaaagaaaagaaatgccctacttacaaccagcgaagaaacagcaagtcagtcttagattaacagaggcacccgataatttatctgaattttgaatcgatagagacctaatcgctacttgtaaggaggagtttagtgttaattctagatattatcatcatcatcgcctatttcatgatcgtcattggaataggcgtcattggctctcgtaaagcgaaaacgatcgaagactatgcgcttgctggtcgtaatcttggtttcttcatgtattttggctgcttatcagccgtcattcttgggggcgcctcgacgatcgggacaacgaagcttggatatgaatttggggtatccggcatgtggctcgtctttatgcttggacttggaattatgggactcgggatcttctttctcaagaagatcgctggttttaaagtgctcaccattagtgagtttctcggaaaacgatttggaaatgaagcccgccttctgagcgctttagtagcttcgatctatgcgttaatggttgcggttacgcaggttatcgggattggaaccgtcatgaacgtactgctaggttggaatctcacaagctccatgttgcttggtggtgggattgtcctattctatacgatacttggcggaatgtggtcggttacgatgacggatatcgtccaatttgtcatcatgacaattggcgtatttttcatcatgcttcctttgagcctatcgaaagcagggggatggagttctttaacgcaacagctcccagacagttacttttcgttcacagggattggcggtagtcaggtatttcaatattttcttcttttctgcctcggcatgatcgttgcacaggatatttggcagcggatcttcacggccagaacaaacaaaactgctcgtctcggcacaattatcgcaggcgtctacagcctcctatatggactggctgttagcattatcggtatgtgcgcatttatcgtgcttccgaatttaggagattctcagaatgcctttgctagtatggcgatcgaaaccgtaccaaccggtgtacttggtcttgttcttgcaggtgtcatcgctgccctcatgtcgacggcttcagggacactcctggcttcatcaacattgctctcaaacgacattgtgaagcgttatttcattaaagaagcaagtgaaaagcaaagtctcatcatctctcgtcttactacaacaattattggtgcaattacaattattttcgctatatggattcaagacgttcttgttgcacttgatgtcgcttacgccattttatctggagcaatctttgtaccgattctactcggtttcttttggaaaaaagcaacctcaaaagcggcgttttactccatcatcagtagcattctcgttattaccggcggtcttgcaatcgaagggcttcactcaacgaatccgattatgtatggcatattgaccagctttattgtgatgatcggcgtatcacttataacagaaaacgatgctactgaaatgacagacacgattcaagaaaggagccatatctcatgacgaatcagcacctctacatcaatggcgcctggcagcaaggtgaaggatatgtgcgtgatctcattaacccagcaacagcagaaacgattatgaagataaaagaagcttctcgggagcaggtatccaccgcagttgatgctgctcgaactgcatttaacgaaagtgactgggcaacgaattcaaaaatacgcgtgctcgctctgcataaactagcagatttgctagaacagaatgaaaaagagtttgcagctgcggaaacagagaataccgggaagcctattcgtgaagcaacgcttgatattggtgactctgtcgcctgtctccgctactacgccaacctgatcgataagcgagaatctaccaaaatcgagatgtcggatggaacgactagtaaaatcattgatgaaccgatcggcgtatgtgccctaatcgtcccttggaacttccctcttcttctcggcatgtggaagatcgctcccgcactcgctgccggtaacaccgttgtgttcaaaccttctgaactgacaccagttactgctatcaagctagcagaattaatcgaccggagcgagtttcccccgggagtatttaatcttgtacctggtgcaggcgatccggtaggtgaaacgcttgtcgcacactctgaagtagataaagtttcgttcacaggcggttcagaaaccggaaagcatattaaccagcagtgtgccatggatctgaaacgcgtctcgcttgagcttggtggcaaatcaccactcattattttagaagacgcggaccttgagtctgcagttgaatggacgatcttcggcgggttctttaaccagggggaagtgtgtgtagcttcgtctcgtattcttgttcatgagtctctctatgaagcttttatagacaaacttgttaaggagtcatctcgaataaaaatcggtgaccccacgcttgtggaaacggaaatgggtcctctggttagcagaactcaccttcagaaagtaaagagctacatcgatctaggcaaggaagaaggagcctccattcacgatggagggcagcatcctgatgagggcttttatcaatcccctgttatttttacaaacgttcatcaatcgatgcgtattgtccaagaagaaatcttcggacctgttattaccgttcaatcattccgagatcagaacgaagcggttcgactagcgaacggtacgaaatatggtctcgcagcaggtgttctttcaacgaatattgctgaagcagaaaaagtggcgtcgcagctgaaagcaggcacaatctggatcaactcctatcacactccttatgtagaggcaccatggggaggatataaagaaagcggtattggtcgtgaacttggaccacatggtcttgccggttttactgaagtgaagcacgtaaacacctctccacaactccaaaaagcaggctggtacacgcattgatctccccctggtaggggctcagtgcaacaataattttcggaatattgaaaataaaaatagggggaaataacatgagtcaacttactgaacgcttaggtcatgacacgattagcccgaccccaaaggacaagcgaagcatgaatttcttctcaacttttgctctctggcttgcagcgaatgtcgtcattacgtccgtaatgacaggtatgatgttcgtaccggatatttcaattgaaaaagccatgttcgccattctaattggctcagcaattggggcaattccactggctctaacaggtaacattggaacacgaactggacttccgacgatggtcatgacaagagcggcttttggtcaaaaaggcgccattcttcccgcactcgtaaacacgatcgttctcattggttggagttggattcaggcatatatggccggtctttctcttaactacgccatcagttacacaaccggctacagcaacatcaatttatttgtcattcttaccgaaatccttgttgtggcgattacgatctacggtcaccgcggtgtggaaagcattgagaaatgggtctctgttgccatgctcatcctatctgcccttgtattctataagctatttacgacttacagcgtttcttcgcttattgaattgaaggtcagtgaaaatcctgcgatatcggggattattgcttttgatatcgttgttgcgacagccttctcctggatgtcgagcgtctgcgactttaatcgccatagcaaatcagaaaaaagcggcatgcttggcacctatctcggctatatcgttgcctctcttattgcaatgggactaggagccgttgtcagcggatttagtattctaaataacatggagcaaacctacgatccaacggttcttctttccgcttacggatttggattcatcgcttcaatcgtcgtctttttctctgttctatccacgaatgtgatggctctatacagcgcaacgatgtcatttatgaacgtcttcccgaagtcaggattttggaaacccgttcttgcactaggaatcgtttgtacacttggagcactattaaaagaagcgttaatggtgaacttttttaactttattctcttgattgcaacactatttatacccgtttttgcgatcgtacttgtcgactattttcttgttaaaaaagcgtactatgatgcagaagatgttgcattcgaccataaaggactctatcgatatcagcgtggtgtaaacatcgttgctgtcgtgacttatgtggctggagctcttttcgcttattacttcacctacgttcaaccgctaaatataggggcaacgattcttacatttgttctgtctggcggctgttactttggtttaatggcagtaacaaaacaactcggtgtaaaaaaagcaacaaccgaagaaattgacgttaaattggaggcataaaaagtgagacatactatttccgctgtccagggaagttttcaaaatggggcagtcgctacaaatctctcaaaaatggaagctattgttgaaagtgtccttaagaagaatcccgacacaaaagtgattacttttccggaactttgtacgactgggtacttcttttcagaaggtatcaaagacctagcagaaaaagtggacgggtcgattttccaagctatgaaaacgatggctgtatcaaacctggtctcacttgtgtacggatacgttgagattgacgatcatggtaacatctataattccattcaatacattgatgcaaacggcagaaacaccgcaaattatagaaaaatacacctcactccgctagagagaggtgttttcacagccggttcagagccagttactgtggaaacagatttcgggacgatcggattgatgatctgctgggacctcgctttcccagagctagctcgaatgcttacgttaaaaggtgccgatatcctccttgtcccatctgcatgggaagagccttatgatgctcctttccttcagtttagcggtgcccgcgcgatcgacaactcagtctatctgatagcttctaaccatactggcaagtcagaaaatctcacctttttcggcaagtcttccatcttcgcgccaaatggacaggttatcgcaacagcagagaaacagtatgatatgattacggcaaccattgattacgactggcagaacgaaataaaacaatccttcttctcaatgttagaagaacgaagaaccgatatttacagctaaggaggctaacttttgaatttcaaacaaattatcgatttatccattcctattacttcggcgacaccgatttatccgggcgatccaaagccagatatccaccccgctgcggaactagataaagacggctaccaggtgacgcagcttaacatcggttcacatacaggtacacatgtagatgctccctttcactttcaaaaagaaggagagcgaattgatcaatcaaacttaacgaaatttatggctccaggactcgtgattgatgtgaccggaaaagaacctggaaaagaaattacaatgtcagacgtgcaggaccaaatagaacaagttattccaggcaccatcgtgttatttcacaccggttggtcaaagtatgcagaatcagagctatacttcaggcatccctacctatctgtggatatcatcaacgacttgcttgaaaaaggcgtaactacatttttcatcgatgcattgaacgtcgatccaccagatggatcagcctttccagttcatgaagccatcacgtcggtaaacggcatcataggtgaaaacttctgcaactttgaaaagatcgatttcgaaaacccacttattattgcgctgcctttaaaacttgaagggctggatggatctccggtacgggcggttgcggttgaggtggagtaaatcattaacaaccttgctaggttttacgttacatgataacaaactcagcatataaaaatagcgaatgcagccacattcgctatttctttattgacgatatgatttcaaacgttcattcaagacttttgtttgtgtatacacggattgatacagtggaaataacgcttgataagtttgtacatttgctttaattggcgtgaacttctttttcacatttaagaaggattcactacacgcttctagtgttgaaaaccaatcacaacctacagctgcgagcatagcagccccaagtgcgggtccttcctcactttcgtacttaatcaccgtagcatcaaagatatccgcctgcatctgaagccacgaatcatttttcgcccccccaccaatggagacaatttcatgaatctcttttccattttctctaaaaatagcaagtgattctttaagcgagaaggtaattccttctaataccgcttttacaaaatgacttctcgtgtgtgaggcatccattccgataaagcttccgcggatcgatgaatctgcatgtggtgtcctctctccaaccaaataaggtgtgaagagcaatccatttgcaccaacagggatatcatcgatgggagcaagcaattcctcaaatgggataccttcagcaaactgatctcgaaaccagtttaagctctgccccgctgaaagggtaacccccatcgtataaaaggcatttgatttactatgattaaaatagtgaactttgccttcaaaatcaaggttatcctggtcttcataggataaaataacgccagacgttccgatactgcaaagcgtacggccgcttttcacgatgccagctccaactgcaccacatgcattgtcagcaccaccagcaaacaccttcacgttctccattccctggattagatctttcttcatagtaccaacgtatgcagtagactcaattaaagggggacagagtgagaggcttaccccagtgcgctctgcaatctcctcactccactttttctccttaacattaagtaatagcgtgccagccgcatcggaataatccatatgaatttctcccgttaaacgatagcgcacataatctttcggaagaagaaaaactctagctctctcatagagctctggctcgttctctttcacccacattaacttaggaagtgtaaaaccttcaagagcagggttttgagttatctcaagcaatgcctttttccctacaagcttctcaatcgttcggcattgttctgttgttcgtgtatcattccaaagaatagccctacgaagcggtgtgttctcacgatccagtaagacgagcccatgcatttgaccagagaaacttattccttcaatagagaatgaaggaagttttcctgcaagctcctttaatgcactgagcgtttgttctacccactcctcagggttttgctcactgtatccagacttcgggtgatgaagcggataactccttgatgcttcagcttgtacccggccagtgcgatcaaccgcaatcactttaaccgcacttgtcccaagatcaattccaacaacatagctcaccgtgattcatcctttctctccgctctgcaataaccgctttccattctttcttctcttcggattcttagacagaaacattcgaaaaagcatttagtaaataggagttgatttctgcctttaatttctccatacggcctgatttagtttgaatatccgtaagtccaaacgcatattgttcaagcttcttaaaatcagtatttccttctacaatttctttgccgatgccttcagaaaaactatgataccgatccgagatgaaattctcaagcaccccgtcctctaacatctgatgcgccgcttttagtccaattgcaaagctatccattccagcaatatgagcatggaataaatcgtctggatcaaaagaattacgacgaaccttcgcgtcgaaattcaatccaccttttccaagtccgccattcttaagaatttcatacatagcaagagttgtagaatacaaatctgtcgggaactcatccgtatcccatccaagcagcgtgtcaccctggttagcatcaacagaccctagcatcccattgatacgggcagtatgaagttcatgttcaaacgtgtggccagccaatgtggcatgattcgcttcaatgttaaatttaaaatgatcctgcaaaccatagttctggaggaaagatagagaagtagctacatcaaaatcatattgatgttttgatggctctttaggtttcggttcaatgagaaattggcctgtgaagtttatttcgttcgcataatcaagcgccatgttgaaaaaacgcccaagattatctagctcaagcttcatatctgtgttgagtaaagtctcgtatccttcacgtccgccccaaaaaacataattctcagcgccaagctcttttccaacttccaacccttttttaactttagctgctgcataggcaaaaacatctgcttcagatgaagtcgcagctccatgggtaaagcgaggatgcgtgaacatatttgccgtattccataacagctttgtagagcttgttctcatatattcttttatcatcgaaacgatggtatcaagattttcatacgtttctttaagagtctcaccttctggcgctacatcaacgtcatgaaagcagaagaaaggtgcgtcgagcttatcaaacagttcaaaagctgcttctactctcgctttagcttgatccatcccgctgtattcactccatggacgcaacattgttccagcaccaaatgggtcggctccatctgcagtaaatgtatgccagtatgcgatcgaaaagcgaagatgttctttcatcgttttatctccgattttttcattagggttgtaatatttaaatgaaaacggattggaagatcggactccctcgaactgaatgcgattaatattgttgaaatatgccaaaataaactcctcctaaaataaaaaaattagatacagaatacctctacctatgaacttttcaccaagaccttaattcattcaactgttaccatcatgacattattgcaagaaaaatcgcgtcgcactctcttaatgccgtgtttatgtaactgctttcatgtagaattatagcaccgtttcaatagtttgtctatcagataaacaaagattgattgataaggatggaaatatgcctagtggggagtgaggtgagtacagtagcttttttgagaggaaggaaattcaagtaaggggtttttgtggtatgtatttttttcgaaggattcttaatcaaaaagctgccatcatgcgctttaatccaaatgattggcactcaaaaaaatgtggcatgacgataagtttcggacagaatttgttaaaaagcaggtaagttctccatcaatttattccccaaactctatgctatactttctatagcttcttcaaatttttcaaaaatattgttagcactagtattttagttgggaggaattatgaaatgacaaatgcttcgagtgctttttatagtttttttgagtgggttactaaactagctcttctcaatctattatggatccttttttcattaataggaggtgttctttttggaatcttcccttctacactcgccatgtttgctgttattagaaaatggttacaaggagatacacagatttcaatccgaaaatcattttggcattactataaagccgatttctggaaaggaaatgttctaggagccattctctatttattaattggcatcatctgtatcgatttattttacatcaagcagatgcatccagcccaatggacttacattcctttgttcgcgtttattctattagttggattagttttcttatatattttccctacctttgttcattttgaaatcaggctaagtactgtctttaaaaatacatttttgattatgttacttagtcccttaacaacattagtaatgatcatttgtctaacgtctttctattttattattaaactcattcctgctttagcatttatatttggtggaagcgccacggctttcattcttatgtggctatcgctacatgccttttcaaaattaaaaagaaaaaaacctctatcctaaaattttttatttcatatcatagaacaagcaagccattacccctagtttcaattttgtataaaaatcatctttcagtttgtttatccactatacaaactaagaaacctctgataaaatgaaaacattgcaagcgatttcattcgaagggaggaaagagtaggtattttctactctgaaaaaaatgaaactgaggcaaaacatctacattatgttaatcacccttgtcgcaactttaggagggcttttatttggttacgacacggccgtcatttctggagcagaagggtcactacaaacgtacttctcagatcatttacatctaagctcgctagttcacggacttactgtatcaagcgcgctgattgggtgtatcatcggtggggttttatcaggatatttctccaagaagattggcagaaagtattctcttgttctagccgctgtactctttttgttatctgctctcggctcagcttatcccgaatttttgttttttagctatggcgatgagccgacttattctttgctaattatgtttaatctttatagaatcataggtggaatcggcgttggattagcctcagctgttgctccaatgtatattggagaaatcgctccatctaacataagaggaacgttggtatctcttaaccaattcgctattattttcggaatgctcgtcgtctatttcgttaactggggcattgctaaggggcagcctctagaatggatgaatgatataggctggagatatatgtttgcttcggaagccatcccggctctattattcttgttgctattgtttacagtgccaaagacaccaaggtatctcgtttctatcaataaaaatgaggaagcgtttgctatcctttcaaaaattcacgatcagacgatggctaaggcaacactctatgagataaaaaattcatttgacacgaataaagcgaaactctttgcttttgggaaaaccatcgtatttgtaggtattttgttatccattttccaacagtttgttgggattaatgtcgctctctattatgcaccacgaatctttgaaagcatgggagcagcaagagacgcctcaatggtccagacgattatcatgggactagtcaatgttatctttacgattatcgccatcttaactgttgacaaatggggaagaaaacctcttctcattgtaggctcaatcggtatgacgatcggaatgttcggcgtagctggaatggctttctctggcattatcggcatcgccacattagtcttcattattatttatacagcttcctttatgatgtcctggggcccgatcgtttgggtgttaatttcagaaattttccctaataaaatccgaggacaagcagtcgcgatcgctgttgcggctcaatgggcggctaactacttaatctcttcgacttatccaatgatgatggaagtaagcggtggtcttacatactctttttatggcatcatgagtattctatcggccatttttgtttggaagtttgttcctgaaacaaaaggaaagtcattagaagaattagagatgcttctacgaaaaaaaggaaatcaggaaaagaaattggcatagtcattatgaaagctcctcacttatgtggggagctttctaatgacaaaacctttccccttttcgcaaaagtaaaggacgaaaccacattggcttcgtccttttatcaatcttattttgtttcctctaaccacagaatacttgttacaccacgtgggtaatatttacttcctatgatttcgccagagataatctgatcactccagctccagacagaaagttccggatgtgtgagccattttacatgcgctgcatccgcttttgctccattttcatctacatggtgcaagatttcacgagcaatgaattgagaaagatacactttgctgagccaggagttgttactagtagaagatattttccatcctccatcctcaaacttacaaaccccttcttgcaataccgtatcaagatgtgtttttaaaacctgaatgtattctccgaatctaccttctgggtccagtgcttctttacaattcgtataataaggaaaaattaacccttcaatggccggaataattcttgagtcattattctccccaatcacagctggaatatacccctgctccgtcatatgacttgccatcgtttgagcacttttttctgcttgttttccagctaatgttgccagctcatgttcaccttgatcagaaaaaatcttttcaagcgcgacataggccgcccacattttccctccaaggtatatattatttctagcctgtcctaaggacacgtccaaactatcatacgtagtaatttctgccccgcccatcacacgacttgaatcaagcccgatcagcccattgcgctgatcaggatctggatggtcgcgatgaaccatgctctcgagacagcttttgaaaacactaatattctccaacaaccactctctatcatgcgtttgttcactataaactgaagcagtaagtacccagttaatcagctgctcccctgtcatatgagagaaacacccatcaattccgtatacttcataagaagaatagtgtggtcgactgatcgtattcgctacgcccatatcatgagtgaagcttatcccacctggatacagcttctcgtcattcggaaaacgaacttgatcttcataactgaatcgatcaacgaacatatctaattcattcttcactgtccatggattcattttcatctcaaaaaacaactgatcgaccgttaaatcaaacgtattcatcattcgatactcgccttcgttaactacccagaaaggcttcccatcacgttcgagcagctgagtattcccataatagcttcggatagcatgggccatcatgaacttctgatcgttcgataaattcgcttcactaatcatcgcattactttttagtgcccgctgtttcaactcattaaaattccccaaagcatattcagcgacactttctatgtttggaaagaattttgtgtagtaataggaagtatccattcctgctgttacaattccacctcgatagaagcagatcgcaaattgatacgtcgctttttcccccgctggaacatcggcgatcagcgtccctactggtccaagaccaaacgtccaattctcctcgtatggagtcgtcaggatattctccatactaaaatgcatcgctgacttcgtttgatccttcttacttgcaatggccgttattcttccttcagcaataccggacagttcttctgtcgtatcatctaatcgacgcatcgaagaataaggatcacttccttcatagccaaaaaaggcacggcgctttttctctccctttgtattatcaatggttaattcagcaagcactgctgggacaagcgttcgtttcagctcctcctcgcttgcttcttctggatcctctacaggttgaacctgtgaatacaccgtaaaagttaaatcgccagcttcccaagtatccgtaccaagttgaaaatctctttcaacttgatcttttggaaaggaatgaatgatctcaggcttgttaggttcagggtccgggttctcaatatcatatcgtttactttcatcttcattcgcaccaaagaatgggagggcatcaaaatgaccttcttgcgtcaatgattccagccctacataaatgttttttctcggtgaacgcccaagttctaaatcgagtccaccaccattacctccaaaccctaatgtaaaacttgaaaaagcgccgatcggtgaatgatgagcattaaaaaaattgttttctggcatggctatccctctcttttcctaaaattggctatcctttaactgcacttgatgaaataccttccacaactttgttactgaaaaagataaacgcgattaaaatcggtaacacgctaatgatcaaggtagcgccgattgctccccaatccgtcatatactgaccgatgaaattttgaatacctaccgttaacgttttgtacttatctgaactaataaacgtattaacaaatacaaactcattccagttataaatcatattgataataacggttgtagacataactggaattgtcattggcaaaataattctaaaaaacaaccgatgaatggaacaaccatcaatgatcgctgcttcttcgatttcacggggtaacgtataataaaaccctagtaaaatcatcattgtgatcggtaaattataggctgtataagtgatgacaatagacaatggatggtcaattaaattcacatttaaaaacatattaaacaacggaatgagagcggaatgaatcggaatcattaaaccaaccataaataaccccagcactagtttgcttaatttccaattcagtctcgtaatcgcgaaagtagccatacttgctaatagcaccgttaatataatggctaccgctgtaatccacacactattgaagaaatagagaccaattcccccatcccaaactttctgatagttttcccagttaaactccttaggaaaggaaaagggagagcccgagaagatctcttgattatctttaagcgagaataagaacaaccagataatcggatagatttggaacactgcaacgatccctaagcaaagatagagtaaaacataacctaatcgattcatataatgggtcctcctaatactggatattttcaccagattccgttaatttccgaatgatgagtgtcacgaccaaggtgatgagaagaagcataaaacctaccgcacttccataaccaaactcataatttgaaaaagccaatttatacatataggaggccataacttcactagccccattcggtcccccaccagtcatcacatagatgagatcaaaatattttaaagaaccaacaatggcaagcacgatcgtcacttttaccacgcccataataagtggaagttttattttataagcgatttgcagagcagacgctccatcaattctcgcagcttcaataatggaatctggaatattcttgagggcagcataatagatcaatatgtaaaaccctgcatactgccatagaattggtataaaaatggcatataatacgagcgtaggctccgctagccatgaaggcggattctcgattccgatcccaataagaatactgtttagaatcccattgcttggattgtagactttaatccatagctgggcgatcgcaacagaagagagaagcatggggatcaaataaattttcctcaatagatcggcaccttttatttttgatacgaggataagagaaatggccaggtaaataaccaaactgagtgttgaaaacaatgcaagaaggaaagaatgcagagcactgtcccaaaacttatcatcttgaataacattcacgtaattatccatcccaataaatttcattgcacttatgccatcccagtccattaacccataatacccacttaatagtaacggtatgaaaatcagaatccctattagtaacagagatggtagaacgtacaatgcaatgacaaacttatttgacataactttattcataaccacaactccatattgttcaaattagaaaacgcaccatacttactcacataaagataacggccactttaatttctatgaaacacaaaaactattcttaagtttaatcgatagacaaagtggtccgaagcgtctcttttttcgaaaccattgctaggaaaaaatgaaagaaactggcctcacatacactagaggccagctacacttttctatctcgttactcagaatctgaaagagcttcctcatgcaacttcgcaaactcttcaggtgtaatttctcctccgaacagcgcctgaatagcatcaaggtgaacctgtgccacttctggactcatctgcacatcagcaaacaaagtgatattgctagcttcattcaattcattgagtacttcgttatacatctctggaagctctacgttgtcactatttacttttgttgcaggaataacgcccgcttcttcaacagacttctctccccacttttctacaaagaacttaacaaattccttcgattcttctttcacatctgagttttctgctacaaagaggccaacacctggtccaccaacaaaactattttcatccccgttcccttcaacggttggaaatttaaagaagtcaactgaatctctaaactcctgaggtacatcttcatttgttgtatagtttggtagatcccatgtcgcgattaaatacatagcagcctggctattcataaacatacttttggcttcctcatcggacaggccattaaatcctttctcaaatgctcccatgtccacaaggttttgaactttttctgcagctgatactaaagccgggtcttcaaaagtgccggaacgatcaatggctttcgttagtacgtctgatcccccaattcgatctgcaagatacatgtaccacaatgaaccagtccatctatctttattacctaatgcgattggttccacattattttctttcaatgtttttactacgttctctaattcttcatatgttttcggcgcctcaagaccatacttctcaaaaatcgctttgttatagaaaacggtcgcaatatttaattcaagcggaagaccatacgtctttccatcaattgcgtatgcttcagttgtacctgcaacaaattcatctttcaatccatcatcgagaatatcgtctagcggcgcaaacatctcaccatctacataaggctccaaaaaccctgctggccatgtcattcctacatcaggtagctgttctgatgtagataatacttttaacttatctttgtattgttcattactaagcacttcaaggttaactttcacatccgggttttctttttcaaaatctgaaatgatttcgcttacaattctgttgtgatctttcgaacttccttcaggccaaaggtgcatgaaatcaatcgttttcgtatcaccactggcttcttcattactgctagaagaagcacaccctgtagctagtatgaccgcgaataaaataatcgtaaagaatgtaaccgctttcttataacccatctaaaatccccctcaaaattaataaaccgctttccgtaaatttagaatagcaaaaatacttctgtttgtctactggataaactaagtttatgttagaataatggtacgaagctaaacgaaaaggggaacgaaatgaaaatgacactaaaccacacatggaatcaacacgtcgtgaaaagagggaataaatcgatcgtattgcaagtcatcaaagataatacccccatttcacgagcggacatagcaaaaacgaccgggcttaacaaaagtactgtttcctctctagtcagtgaactccttgttgaaaacttaatttatgaatctggccctggagaatcgagcggtggaagaagacctgtcatgcttctttttaatgagcttgccggtttttcgattggaattgacctgggtgtaaactacatgctaggcatcttaaccgatttaaatggcaatattgtcaaagaagaaaagctgaatttctttgatttaacatatgaaaaaatcgagtctcaactcatagccatgatcaagagtctctccatgaacaccccttcatgcaaatacggagtagttggaattggaattggtgtacctgggatcgttaataaagaaggcgaaattttattagctccaaacctcggctggaagaacattaatttaaaaaccattattgaagatgagtttggtattccggtgattattgaaaatgaagcaaatgcaggagcatatggcgaaaagaaattcggagtgggccacgcttttgataatattgtctatgtgagtgctggaattggaataggcgttggattgattttaaacggtgaactttaccagggccatgacggattttccggtgagatgggtcatatgacaattgatgtgaatggtctcgaatgccgctgcgggaataagggctgctgggaattatacgcctcagagaaaacgttgcttaacagagccgaagagttaaagttaaacccacaaaaagggaaagaactttgtttagaagaattaatgaaactggcggataaagatcctcgctctgctcatttatttgaagaaatcgggacttatttgggcattggcattaataacatcatcaacacttttaatccggagcaagtgattataggcaatagacttgcttctgctaaacaatggcttagagaaccagtgaacaaacacatcaaacaacacacacaaaaattccaacaaaaaggactaagagttgacttttctgaacattccactcattcttcagctcttggcgtagttgccttcacagtagagaattttttacaaatagatttagtgaactaatataaaaaaaagggattaccatttagcagatggtatcccttttttcgttattttagcaaaaggctgcatactaccatgaccactgacctctccctcgacatggcaggtcatcaatgttccgaagaacgaggtctctaatagtcgagtctgaatgtccaatccatcatttatttcatcactccaaatgtataagttgtcgaggaatggtactcttttcctttctcaagaacgatcgaagggaaatcgggatggttaatggcatctggtggtgactgtgtttccagacacattcctaaatattttctagccggaacgcctcttacttcaaaatcctctgaaatgctgtttcccgtataaagaaccacacagggttcggttgtctcgagagcaacctttctcccactgctttggtcgctaaggatcatttggtcattgtttggatcagccagcaaaaaaggatgatcataaccatggcctactagctcattttgatgatcgttcgacaaaaccccatccataatctttcttccatttcgaaaatcaaacgaagtatcggtcacatcaaccttttttccggttggaaggagctctttattcaactcaaggtaatgattgctttgtaacacaagctcgtgatttaaaatcgtttctttcaaatttccgctcaaattaaaataagtatggtttgtgaggttaagtagtgtatcttggtctgacacacctgcatatgaaatggtgaagtcattctcatttgttaaacaatacgttacagtgacatctaaatttcctggatagccaccttcaccatctgaacttttataaaagaactggatcccgatcttatcctcactatcgaccggttttgcttcccaaatggcgttgttaaatccattcggtccaccgtgcagatgattttgcccatcgtttttgggtaaatcgtagctcttaccaccaagatcgaacttcccgttcgcgattctacctccgacgcgaccaacaactgcgccgaaataattgggatcagttaggtagctttccaactcatcatatccaagtactatattttcgactctcccattagtatctggtgctaaaatttttgttatgatgcaaccataatcgatgcaactgacttctaccccattattgttatgtaatgtgtaaagcgtgatcgtctgctcatttatttctccaaatggttgatgtgtaattttcacttatcctaacctcttttctttcgcgtgtgtcagccccttataaattataacaattttcactttatttatccagaaaacaaactaacgatttaatatttattacctttatttgattggaaaattccattaagaaaggatcctgtgcactcattgtgtgcaggatcctttcttgttctttcactctattccattcgacaaatacttacaccattcgggcagtgacaggcaccactaaaccactaaaacaaatcaaactcctctgcgatctctgccatttgatgtggcattctttcatcattcatcacattctttgcgttcttaaaccgagttggattcactttacgaatcgttgttgttttacctgctttttcatttaaccccttacttgtttcataaccaacatatggaggatagtttacatcgctttcctcttcactaattcgcttcttcctagcttttaatacattcccttttacttgattggttagatcaattgtcgcccctgcacccttcacaatcgcttgtcttgcgccccttcttgctctagaagagaaagtaagtaacaaaaccgtggctactactaaactccagccgctcgttagcttcttccacatacccatcatcctcctgacaagttaccctattactgatctagtatggaacaaagaacgagaagttattctaattcctattcctccatctttttaataggggagtttacaatggttccagttcttcgaatcgtgacatccacagttacatctaccggcaaatttttaaattgctcatcccagtttttttcaactgttttccaatatgccggactcgaccggtgcatcgcttttccaaatccaaaaacatcagactcatactcctgttgcgttacctttaaagcctctttgatctttccctcaatatctttttccgttttctcttctagttcagaaattgtttcccttttcgataaatcgagctcccgacattctacttcagaaactttgccttctacttgaactttaattgttccggaaggttgatgattgatcgccttcgcctttaattctgcgtctgtatcaattagttcaatccctgtttttccaccattctcacatggaacaacaacaattgtacttttcactcgattcattgcatagtgaacacctttactttcaggatcatttaaccacccaaccagtttatcccccctgaaaacagctgttccatgatattgtaattgggtttgaggcttaatttgagcgacgttatctttactttcccccgtcgaaatttcccctttcacttcaactccagttaacatcggctccattcctgcttccattaaatgcgctgaaagttgatcgagcgtcacagttaacgtcggtgcccagtttttctcagacgtttctaaagctgcatataatttatttgccggtatatcttcaagtgatgttaacacttgaagcgtgtcaccagccttcgcatttctcgacacaacgatataaaaatcattccggatctcagggtcgcgtgacaataaatcaatgacatccccaataccttcttttgcaacttgttctcctattaccagaactcgtaagtgcgaaccgtaaatttttcttggggcaatggttgtcattcttctaaacgcttcaagtaatgtctccgcattttcctgatagaccgttactggtgttgtaatacccgcctgttcaatttcacctggattcacaacctgagctgtaaccagatactcgtcctcaaccttgtcaattccatatgcgacagcaatcgctaactcatttaattcattggcatcccaacagccactaagtagaaaaagaatcaaactcccactaacgaatttattaagggttcttttcatagatttactcctcgcacgcttgcttaaagattatctttttctaaaagatgcttttacattcatttaattgtttgtctaaatttgaataaaatgaacccattcgttgaaaaatagatcgaagagagcaattgaggagttttttaacaatgagatatgtacgtaaattaacagatatgaagaaaaagagatcgaacacgaaaggaaaagctgattcactttcttcgaatcagccaaataagttgtccgtaaaccttaaagaaaacataaaagaaatcaaacaaacactaggaaaaagcactgatattgtaacccgagagattgtcgcaggaacagatggtaccatttctctcgccatcatttatacagaaggattggcagataaagacttcgttcaggattttattattaaacccttgatgcttacgattagagatactgagatctcttatcagggtaatctggactcaatgaccattttggaaaatttcgcacttgctaatggggagttaaaagaaatacaagactttgattcactttatcaacatattctctctggcgatacagttcttattttagaagggtatacaaaagggtttgcgattgggtccaaaggatgggaagatcgcggaataaacgagccttcttcgcaaacggttattcggggtcctaaagatggattttctgaaacacttcgtacaaatactgccttggttcgtcggaaaattaaggatccgaatctttggattgaaacaaaaccaattggaaaaaagacaagaacggatgtcgcactcatttatttaaatggtgtagctgatgataagatcgtcgaagaagttcggcaccgtttgagtcaaattgacatcgatgccattctcgaaagtgggtatattgaagaactgattcaggatacaacttactccccctttcctacgatctttaatacggaacgacccgatacacttgcagccggaatattggaaggaagaattgcgcttattattgatggcacaccgtttgcccttttggtccccgctgtctttgtgcaattttttcaatccagtgaagattactatcagcgcttcgatgttagctttcttattcgaatgctgcgctatctttcctttttccttgccttaattacaccatcagcctatattgcagtaaccacttttcatcaagaaatgttacctacccagcttctgattagtcttgctgctcaaagggaaggaactccattccctgcgttaatcgaagctcttttaatggagctaacctttgaaattctgcgtgaggctggcgtaagaatgcctcgagccattggatctgcgatctcgattgtgggagcacttgtactcggacaagcagccgtggaagcaggaatcgtctcttccgccatgattatcgttgtttccataacagccattagtaatttcgttatgcctgcaattaacatggcgatttcaatacgaatgttgcgctttccgctcatgtttcttgctgcaacatttggacttttcggcatgattataggcttaattgccattatccttcacctatgtagccttcgctcatttggtgtgccttatatgtctccaatggctccatttaagttaaaagaccaaaaggatgccatttttcgtacgcccatgtctcggatgtttacacgaccaacctttctaaagcctaaagacaaagttcggaaaaagcagccttctcctaatcctgaatcaaattaagttagactcatctatttggaaaggagagataaaatgtggccgatcataggtatttgtatctccatagtagtaatcgtattgtttgaacgtcctctattaaaaaataataagaaggatacctggattttttcaatccttcttttgatcgccttcggtttatcgatagctcagagcctcgaatatgatctaccaacaccattcgatttcattacggctctttttaaaccggtacaatttctttttcaataatcaaagagggatggtgaaaaacgtggagcctccaaaaatatcatctacgcaattcacaattatcgtgattctatttaccatcggaagttccattcttatcatcccctcaggtctagctgaagcagcagaacaagatgcgtggatcgctggaatcgttggtctagctggaggccttcttgttatcctgttatttaatgcgcttggaaaacaggatacctcgttaacattactcgaaaattgtgaagccattttaggaaaaggattagggaaaactctggctttcgtctttattaccttcttttttctccttgcttctactgtagtctgggatttagtaaacttcctaacgactcatatcttagtggattctcccatcgaagttattagcattcttttcatcagtctcgttattttcgcaacgcgacttggtcttgaaacaatcgttcgatgtggagaaattttcttcccctgggtcatcggactactttttttgtggatgcttttcgctttaccggatgccaaattcacaaatttattaccggtaatggaagatggtttaaagcccatttggaagggagccaccctgtcaatgagcatcccttatatacagctcattgtcttcttaatgatttatcctgcggtctattcaaaaaaaactggcagaagtctttttattggaacactctttggtggacttatcttaattacaatcacattcgcctgcctgctcgttcttggggtgaacggaaccattattcaatcgcatccaagttacattcttggtaaaaagatcagtttcggcaactttatacaacgaattgaagtaatcgttgcgattatctggatgctcacgattttctttaaactggttgtccttttctacgcctcaacgatcggatttgcacaggtacttggtgtgaaagattaccgcatccttacctttccactcggcatcattctactcattctgtcattaattgtctttcccaatgatacatatgcgaatgaatttgcatcaacctcttggattccttatagctttacaatttgtattatacttccattctttttaatccttatcgccaagattagaaaaaagcacataaagcgtaaggaaggagattcatcatggggaccgtaaaattatcatccaaacaattgttttcaataatggtgttatttgaactcggtagttcggttgttgtaggtctgggaatggaggcgcaacaagatgcctggatcaccattttattaggaatgtgtggagggttgatcttattttttgtatatgcttctctatttaaacgttatccagatatccccttatcacagtatgcacaaaaaattctagggaaatggcccgggaaaatcatcgcgattctttatagcctttacttcatttatatcggagctagagtactaagagactttggagaattaattgtcacttcaacattgaacgaaactcccttacttgtgattaaccttctgattagcgtagttattctttatggagcctcgctaggtattgaagtgatcgggcgatcagcagaaattttcttcgtcattgtaatatttttaggcgtcatctttattggattaatcctattgtcaaatctctttcatattgaaaatttacaacctgttctcgaaaatggatggcgccctgtacttcaaaccgcttttcccttagttctcacttttccatttggtgaaatggttgtttttacgatgtttttaccctttttaaacgaaaagagagatggtcaaaaaacaggtatgtacgccatcctcctaagcggaattattcttacgattaccgttatctttcaaatcggcgtattgggcgtctatcaagcagcaagctccactttccctctattagacacgattgggaaagtaaatatccaggacattattcaacgtcttgatcccatcgccatcctgattctaatgataggcggatttataaaaatcattattttcttatttgcatcagccatcagcctttccacagctttttcaatcaaaaagtggaaggtgctaacgggtatcatcacgtgtgtcgctcttattgcctccaccctaattgaaagaaactatctagaacatatccaaatcggattaaatgtcgttccatattatgtccatcctccctttcaaattgggattcctcttcttctttttctagtgatgcacttgaaaaattggcgtgtacacaaatgacccattcttatagcttctatttcaaagagtgggtgtagttgaataactttgatcgaaatcaaatcgccaatcacgccatcttcattcaacaaaaaaagcctcctatcccaaaggtagaaggcttaaaatattctacttactattaattattagcttctagccttccgttccagcttggatttcatcctcacaaaatgcctttccagacgtttgttcacttcttcatgcttctcaagtgctacagagtgacccgctttcccaactacttcacaacggccattctcgactttcttcgcaatgttctcagatagctgaatcgaataagcgtgatcctgttctcctgcaatcgctagaactggtatcttgacgtcttctaactcttcaagaacactctttcgatgtattacctgatgagcagcgtcgccaatcgatggttctagcttcttcatataattgcgccaatagtttcgttccctttctaacgacaacaacgcaagcgaggcatcaccaaacataatatacatcagggtatcgaccacttcttccgctccgttcttctgaagctgagtaacgagcggctggaattcttctttcttatactctgcttccgctgaacttcctagaacgacacacgaaagaaggagatctggccttctagccgccagtctaagcgcaataaatcctcccatcgaattcccgataaaatgacacttctgaataccaagaccttcaatcaacgcggccgcatcatttgtaagcgtatccatatcaaggttttctaaagaagaccgaccgctattcccctggccacggtggtcgtagcaaattactctataatcctttgaaaagtgttctacctgatgttgaaacatatccgaattaaaaaacagcgaatgactaaaaaccaaaaccggtgcatcctttggaccataatcttcataatagagcggtgtttcgttcacttcaataaacgacacgggtaaccctctcctttaatatgaattttgatatggtatgactctacaaagttcgctaccagtttgcaaatccctcttttgaaatgaaccgcgcccgaaaaattacagaaaaaagcattcgacaaatagttccaaatatcgggtggtgacaggcactctcgaaccaccggtcaacctgaccggcccaaacccgtccaaccactccaccaagctacatgatcgctcgttcaatccccaccttaaccactcgcttcgtttcgtttgcttccaaggcagataatattacctgcaacgacttcatcccttcttctccactcactgctggaacggtgtcttgtacgatgcattctacgaaattctcgattacgtgcgtggtttgctgtccacctgcttcatttgtttggattttctgaagttcatactttaaaacatcgccgttcttatactgcaccaccagcgaatgtttcggatcatcctccaggcgaagcaccgcattttccccatagattaccgttgcattatctcctcctgaaacataagaccaactcgcagtcaaagtcccaattacacccttctccgttttaaggatacaaaccgcattatcatcgacgtccgtattttccttcgcatttgtttctacaaacgcgccaacttcaacgatttccccaagcaagtagcgcataaggtcagacttatgtacgccaaggtctcccattgcacctatgaacgcccgctctttatcaaagaaccagcttcctgctccatcaatgctccactgctcaggaccagggtgaccaaacgtagtccggaagctatagattttaccaacctctccactttcaattaactccttcgcttttacatgtgaagcaacgaatcgctggttgtgagcgatcatcaactttttgccatttacaacagccgcctgattcatggcttctgcctcctcacgtgaagttgccattggcttctcgcagaggacatgcttgcccgcattcaatgccgcgatagacacaggggcatgtagtgcgtttggtaagcatacgctgaccgcatcaatctccgcaacatcaagtaagtccaaataatccgtgtaagctttacccccatataaactcaccatttcatctgctcgttccttcaccacatcacagaccgccgcaatttctacattcttctccgcatggtattccggcaaatgacgacgtctggcaatactgccacatccgataactgctactttcaatttttccatattctcattccctccatcatctttcttaagataaaatttcacttggtagcgcttcaggttgtttacatgtacttctcatcttataatgctcgcccttcactgaagaatcatgaataccatgcatcacttcaagaacatgatacgcaagctctccgcttgccctcggttcacgcccggagcataaagcgtccaccatatctatcacaccaatacctcggctattttcaagagatccgtgactgaatgcgacttccgtccattccgtctcgccaggtttccgcaagagtaccggtccaccgaacgtattcggatctggtacactcaacgatccactagttccataaatttctagaaaaggagttttcgatccccaaacatcaaagctagtaatcatagttccaattgccccatttttgaaatcaaggatccctgtaacatgcgtcggagtttcaacgtttattttctgtccatacttaggctcactagtaatcgtgcgttctgatgacgttattcgcgctgatccggttaagcgatgaattggaccaattaaatggatgagcgccgttaaataataaggccccatatcaaacattggcccagcacccgctcgatagaaaaattccggatcgggatgccagctttcgggaccatgtcccatcatgaaggccgtagcagcaacaggctcaccaatcgcgccgtccttaatcaactctctacatgtctgtagtccaccaccaagaaatgtatcaggagcgacacctactaaaagatccttttccttcgccttagctaacaccttctctccatccgcaagcgttatggcgagcggtttttctgaatatacatgctttcctgcttctaaagcacgtagacttacttccgcatgtgccgccggtatagttaaattcaggacgagatcaatcgcttcactttccaaaagttcatctacgcttaaaacatgaggaatctcatatttctctgctttttcaatcgctttatcatgatttaaatcggacacagcgactaccgctaaactctctaacttctgaagattcgttaagtaaatatcgctaatgttgccacaaccaatgacaccgattcgaatctgttccattctctctcactccttatcaaattccttatcctttaacagctccgcccgttagtcccttaacaactttttcttgtgagaacagataaacgacgagcattggtagactagcaagtgttaatgctgccattaaaccaggcacattaactgagaattccccatagaaatcctgcaatcctagtggaagtgtcatattttccgggctcgaaacgagaacaagagcaaagataaactcattccaaagatgaataaagttataaataaaaacagtcatgagggcaggggttaacatcggaagaataatgcgccagaagataccgaaatgagagcatccatcaatcttcgcagcttcttctaatgacttcggaatttcctgcataaactgcgttaaaataaaaatagaaatcggcagactaaaagcgatgtatggacccagtagcgctaataatgaatcatacaaccccatattttgagatagcttaaagatcggaattagcgttgcatgaattggaagcatcattcccgagatgaagaggaggaaaagtccacgattgaaacgaaaattcattctgcttaatggatagcttgccagggctgcaatcaacatcacagccacgaccgctgctaccgacacaagaatactgttcagaaaatagcgtgttaagcccatctgaaaaacgtctgcgtagtttccccattcaatcgatgtgaaaatcgcgaacggtctctcaaaaaatgtgctctgatcttttaaagaagtcgaaatcatataaacaaacggataaccggtgaaaacgagaagaagcaaacctattaaatataaaggcatctttctgagtgattggaccattagaaagctcctttcttcttgcgattataatcgactacttgaatcaggatcgtgaccacaagtgcaatcaaaaacataataaaggcaatagcacttgcatagcccatattaaaattgataaaggcttgtttaaacatgtacgttcccattagctcagtcgcatgattcggtccgccacccgtcataatgtaaaaaatatcgaaagcttttaatgaaccaactatcgcgagaattgaagaactcacaatagtaggcataagtaatgggagtgttatatgaaagaacttttgccaggagttcgctccatcaatttctgcagattcatagagttcttctccgattccaaccattgcagccttgaaaagaatcatatagaaaggcgagaactgccagactacaaccagaagaatcgcaatcatggctgtattttcatcactaagccacgccacgttttcaaacccaagaaaattaataagctggttaataatgccgttaatcgggtcgaacatgtacacccacagcaatccgatggcaaccgtcgacatcaagaaaggtaaaaaataaacgctactaaacaaccgaataccacgtatcggggcaaacaacattaaagccataatcatcccaagcggaatttgtacaaaaacagacgtgattaccacccacgcattattcgtaagtgaagtccaaaaaatcgcatcatgaaataattgaacataattatcgagaccaatgaatgttttatcacttgttccatcccaactgtagaagctatagctcaaggtggatagaataggataaacgacatagaccaaataaacgattagagctggtgcggtgaacagacttatcgtgactgctttcctcatgttcctcttttttgcctgacggacaaccttcgtcgtctcgcttcttcttgtcacctcagctgtttccatctacaatgctctcccttctgttgataagaaagaggggggatatgcccctctttcacttattcaagcagctcttctgcctttgcttccattttgttcgcagcttcttccggagtcatcgataagccgaatagtgcctgcgtcgtatctttatgaagttctgcaagctctggaggaagcgtttgatcataaggcatttgaatatgggaggcattttgcgctacttcatagaattgtttaacaaattcatcctctggcacaacatccttcacggcagccaatgttcctgtacgatccgtgaatttctgtgctgcttctttacttgttagcgcctggataaattcagcagctaaatcaggatttttagattcttttgcaactgaccaaaccggccctgtagctccaccgacctgtgtatcatttcctttcccaccagcaatcgtcgggaatacaaagaaaccaagcttatcttcgaactgcggtgcttcttctctaacgttatttaaaaaggaaatcgtcatatccatcatggcagcctgaccagaatacatgagctgacgaccgcggccttcatcgtaaggaataccattaaagccctcattaaaagcatccatttttacgagttcctgaatgtattcgcccgcttccacataagctggatcatcaaacccgcgtccctctcgattaaatgcgctttcaaataagtctggaccgccaattcgactggcaaagttcattaaataataagctcctggccacttcgttttatttgttaaagcaagcggtgtgacatcattctcttttaatgtcttaatgatttgagtgaattcctcataagtctttggttcttccaggttatatttatcaaaggtttctttgttataaaaaatgacatccagcgataaacctaacggaacaccatacactttgtcatcgaaagtgccgttatttaacgccatttctaagtaatgatcttgatcaacattatctgtaatatcttgtacatttccctgatccacgaaatgcttcaaccaaccgccaccccaactttgaaatacatccggtggattacctcctgacattgaaacagctagcttttgcttatacgcatcattaggcgtttgaagtaacttcacctttacgccatcatggtcttcttcaaactgtttcgcgacttcctggaaaagcttttctcgttcacctgtttcaatgtgccaaacctcgatcactttctcgtctccattatctgaactcccggaagcaccttgatttcccccacatgccgctaacagcaacaacaccataaccgataataaagccgtgactttcttcatgctttaccccctaattttgtagtcatgattataaagaaacgaattaagaatgcttgctaagaaaatagttcatactcatttcaatgctctcaaaaggagaacgcttacatttgtcctgttcaacaacccaccagtcaacattcgactgatctccttgctgaaggacagcgttaagatcaaccccgcctgttccaagttcagcgaagaattgctcaccatccgtcgtcatatcttttaaatgaaccagaggtgttcgatcgtgatatcgcttcatccaatcaacaggattctcgccagcacgtgttagccaataaatatcaaactcagcttttacccattccggattcgtttcatcgaaaatcgtttcaagtgctgttttaccgctagaaagacgctctaattcaaaatcatgattgtggtagcataacgtgagtccttccttgaagcattcttttccaatgtcattcaaggttcggatgagttctgaatatccttcctccgttcgcagttcaggtgcaagaaacggacaaacgattttgctgcttccgatttctttttgataagttataaccttactcaaatcgtttttcagcacttcaagaggaatatgactagaagccgcagtgagtccaagaccatcaataaccttcttcaactctttcgcagacatgtcataatatccagcaaactctacgccttgataaccgatttccgcaacctttttcaaagtacctacaaaatctttctcactttcctctcgtaacgtgtacatttgtactgcaacaggtatattcgccatactattctctccttttcaaaattgaatgagcttcctaaacggatgaccagttcttcacctcctggaaatagtaaaatgtaatggattacattttactataaatatttttgtgagacccttatttattaaagaaggaccctcacaaaaaagtaagcgattacatttatacaaaacagaaaagccaatgagactaagcctgtttgttatatccacaagaatctcgaataataagtttcgtatcgaggacatgctgcttcttcgttaaaggttcacctttaatctgcttcaataaaagctccattgatcgtttccccatttcaattaaaggctgcgcaatcgtcgtaagagctggttcaaagatttcggagaattgaatgttatcaaaaccgacaaccgcaacgtcctcagggacgcgaagcccctgggctttgacggccttaacggcacccatcgccatgctatcattcgcagcaaatattgctgttggggtctgattcaaagcaagaaacttgttcatctgattaaaccctgattcaacagagtgatcaccttcctgtatcaaaacattttccactcctatgtcgtgctcaagaagagcctgtctgtaaccttttagccgatccctgcttaacggaatgtccaagggaccagtaatcattcctactcttcgatgaccaagttgaagtaaatgctccacagcatctcgtgcactgctaatattatcaatggccacagtcggggcagttaaaccttcaatataatctgaggcaaggacgacaggataatcatttgcaagatccgaaataatttggtaatccagtcttgttgttaataaaatcattccatcaacttgcttctgctttaactcatctatgtagctataggctttatcaggctcttgataggtattacccaaaagaaccttataccctgattgactcgcaatgagatcaattccagcaatcatttgtggaaagacattattcataatagaaggaaccataacaagaatggtctttgtctccgtccgtctaaaatacctcgccaaaatattcggttgataattcaattcctcaatcgcttgcaggacctttatacgcgtcttttctttcactgcactcgggttttgaatcactctggaaacagtagcagtcgatacatttgcaagctttgccacgtctgtcatattcgccattttaattgtctcctagtgtttaaaatacttaacctattttaaactataaatggccggtaataataattcaacctaaaatgtaatggattacattttaaatcgttttgataatacacatgttgtcgttgatgctcattatagagaagattttgtttaatttcaatgttttttgaaaattatttattttcatacatcaactagctcttaggaagtccttttactaacagtgattatgacatagaaaagagcccatcaaacttaaatgggctcttttgttcattctatttcattaattaatcgtttaattcattctaagttcctgccgattcatcattttcgttttaacaacgggattttttatcccttcgactttgattaacaataaccttgttgccttacttacgaaaactgaggatccgagtactagcgtaaagacaagcacaatatattctttttgccataccgcatctggtaaaatgctcgaatagatgaaaataatcagtgggtagacaaagtagagtcctaatgcattttccccaatggaatggaagaaaatatcaagcagaaccacttttcttactgaatgataaatccccagcaaggagatcgttatgactggcaccattatcataagagaccattctccctgatagatagagccctccatcagataataaagaccttcgaaaccaattaatccaatcaatgtaacaaatcctaattgattaaatttctttagaaagctctgtacatactcccagtaactagctaaggtacctccaaatacaaagaaaaaaatccatttcaaaagcaatccatcttgtgcaacaagttcattgcctgcagttatagaaggagatagtaaataaaaatgaatcattccagaaataaataataaaagcgaccaaccaactctattttgaacaagtttcaacacaggtagaaagagaagaaattgtagaacgactgaaataaaatacaagtgataagatgaatttcccatcgccatattaagtaaagatcctttccaacctgtaaacacctctacgttcatggctacttttgtaagaacaagatagaaaaggctccagagaacgaataaaagaacaatcttagaaacctcaaaagaacctatccgcttttctttcttcctattctccgattgtctaaatagaaatatgccaacgattaccgcgaacatcgcgattccaaattgactgagttgatatgtaatagaactaatttcattcaatgactgtttttctccgaagaaaaacatttccaaaacatgaacgagtattaaaaacaaacaagtaatcgcacttagaaaaatgatttcgttttgaccttgattcgttttctgcatgagctcacatcccgttgtggtttggtttgatacttctattataaggatgtgattttcactgtgcaggggtgatggctattctttacaaaagattaataggcctgacatgatccttacaattaattcatttgcgctaaataaggacccaccaactaacaatcccctcttccacccttcgacaaataacggggggtgacaggcaccactaattttttctccccccatgccccttttcgctcttttcaaacgatatatagagtgaaaggaggtgatcaacatggcaacagcatctctcatggatacgcagcttcgcctggttcttgaagtaggagttgatgaaaacggcaagtcgatctttcgtagcaagaacttcaataacgtgaaaacatccgctacgcccgatgcgctcttcgcggtcgcattagcgctagcaccgcttcaacagcacaacctgtttgcagttgagcgaaatgactcttctgaccttcaggcgtaagcaacaagagcagcacaattactaagaaaggagggtaccaattatggcgaaaacacttgaacttcaattcaatacgcgtgacaacaagccattttccatcacactgactgatccagttgaacccgtaaatccagtaaccattgccgcagcaatggatgcgatcatcacgcaaaactgcttcacaacaagcggtggtgatgttgtggctaagaaaggcgcgcgcatcattgaacggaacgaaaacgacattatcattggctaattgattttgaggaagggcaattgtccttcctctttcgtctgtgcaaaaaaggaagagatcagctggccccctcattcttagtacgctctttcacaataagttttagttcttccattttatctaattgcagttcttgataagtcatgatttgagacagtccaaggaggatgactccaaagaaaagactagtcatgatcataacaaaaccattagaccaggataaagaaatattccaaacaatgatgccggcgatcgttacaaagataaggatgaaccagcctaccaggaaagcagcaactttaatcccactgtcttgttttgttttcatatgaccccctcaccctctattggaattaacataatatggaaacaactaaactactaaagggcgcttttatcatttataaaaagcatcactagaaattccccagtgatgctctaaacagtgtgttaattaaatacctacggacgttgcttcttgctataatgatttatttcttcaaccaaaaattaacctcatcccgattaaacggcttatacccttgagaggaaccccaattcaccatatgatcatagtcaggatgattgggatcacgaataacatggagaaactcctcaaaaccgccttctccaccaacgtcctcaggcggggcatttccttccccatcaaggcaaacaggatcattagaatgaacattttcgataattttctcaaccttaatttcatgcacccattgatcaccatagtcatacgtgtaaacgattcgagcaggcaggtaatccgaaagcttcttctctgattctaaaaccattggcgtctccccctgaaactcaaaagcatgtttactgctgactaagttcacgagcggctgctcattttcagtcgagtaaaccataaaatcatgaaggtggctatccatccatccgaatgcagcttgtaggatgcgatgaaaacgggagaaagttgtattcgtcggaacccttagcctacgccaaacagaatgatccctaagttccagcgtcacttttagttcaacggcctccgtactaaaaatcgggccacctgaaaacttctctagatccttatataattcctcatttggatgaacgtagctattttttccatcgccatacatcatactgcttacccactgactcaactcctcttgaaaaagcgaatcaggatcaatcatatcttcaccgaattccacattttcacaagctttgtttaatcttgcaacagttgtcggattttttgtttttgcataagaagtctgccctgcgttctgaatcaactgatcaatgatctcttgcttaatcccttccgcttcaaacgttcgttcaattccttgaagcagaagttggtccaacttcttgagatcttttgctttcataccgtatagcacaatcgcatagcggttttggtcattagtaaaaaccacgaccttcttacgaccaagtttaatcaaattagcatgccaggaatgtagcggatcttcatctacctccgtcgcaacatcaacctttaattcttgcaataatttcttggtgcattgaattaacatagctagctcctttatcgacaaatacttacaaatcccgggtggtgacaggcacctttaaaggctttaaaggcaacaacacactaacagtagtccctactcctagttcactatcaaattcaatccgtccatcgtgctcgtgaacgattttatagcaaaccactaatcctaatcctgttccagcttccttattcgagaagaagggatcacccaaatgctttagacgttcttccgaaatacctacaccctgatcggagatagctattcggaaagtctcatcttcttgactcgtttgaatcgttagttctcctccacctggcatcgactcaatcccatttttaatcaggttgattaagacctgtttgatttgattcacttcacactccacaaaatcaagtgcttcttgaaggtctttcttgatacatacattgtttatacgcgcctgcgaatccataatcgataacgtctcacaaataagcgttgtgacatttgcctgttgatatgtgacagcttgtggcttcgcaagtgataaaaactctgatatgatgttttcggttcgattcatctcagacagcatcaactcatgaatttctccatcaattttatctttgtataattgaataaacccttttactgccgttaatggattacgaacctcatgagcaacggcggccgcaagttgaccgataacggacagcttttcggaacgaattaacaattcttccgtacgttttcgatcaccgatatatctcgtaaacgccgatatcgcgagcacatttccatcctgatctctaagcggagagtacgttacgctaacctccaataacctgccatctttatgctttcgaacgtcttcataaccaatgatctctttcccacttatcaccgtatcacaaatagactttgcttcatcacgatttccatcaggataaaactccatcatatttaggggcatttcctcttcagaatacccataaagtcgttgaaatgccaagttcgtttttaacacttctccatttaacgtaataacagaaattccgtcggcactattagaaaagatcgactccaaaagctctttcgtttcaattaaatcctcttctaccttcttccggtgtgtgctatcgcgaccaatcgaaatcagataacctctttttccttcgcctaaaggaccggctgctttgacaatatcaaacgttcgttcttctccattatgtaaaagctgatgttcgaattgaatattagatgcattgtgctttgttagctcagatggaaacgcctcttttaaaaagggaatagcatcccactctgtactcccaatttccgtaaacgttttgccgactacatcctgtccttctaagttaaatagtttcttcgcatattgattcatctctagtatccggccatcatggttttgaaaaacgacaaattccggcatagagttgataagagaacgaagaagttcttcttgtttaaacgcttcttgctgtgccaatttgtaagcagtaatatcttttaaaatgttataggcaccgatgtacgactgatgaatcttaattggaatcgttttaacttcgatataaataagatccccatttttatgagtaatgcttgtttcatagacttgtgcttttcctcgcaatgctttattcgtataatattttattctttttaattcttgaaatgaaatattgtgttcatatgtatggatgatttcgcacttttcatagccaatcataaattgaagagattgattaatatccgtaatgcgtccatcggggtcaacaaaaataattccgtccgggttttcagcaattagaaagtcatgttttaagtgtagttcactcaactcttgcttcatattttcttcatgattcgaggttaatgttttcatacaaacgaaaagcataagattttcttccagataggaaatttcaataagatgagcttccttgtccaaaaccgaagtgaagacaatttcgactggattttctgttgaagaacagttgagttccttcataaaatggtgagcagaatgatcgatcatccatatctgatcaatacgataactttctttattctcatcttctggaagaatctttttcccttctccgttagcgtaaataacagacccttgtaaatctactacgaatagcgggaggggaattctaccataatatttttcataactcacagcgcccacaccctccaaaatttggattccattccttttattatctcatattttataatcgctgtaaggcttcacaaaagaaataaaccgctgacttgggcggtttactttttccttctattttcttagaaatagcgggcactctgcctacatacgaagcgattaatcaaacgtttgtttaacctcaacttagcgatccgttttagaaactctcttaacctcttgaatatagataaaaacttttcttcacgtaatggagttccttcactctaggtactttcaagtcgatagccccactttgtttgttataccacaatcgtaatccatctaaaaaaacgaacttctctgtttcggaaacttctaatttcatcatttatcgctcaaccctttctttagtagtgcccctcaacaaatgcctgctcttcatcagcagacaataaccgactcgcctttccgattgatccgttattcaaactccagagctcgttatgaacgtagactgcgttttcaaaatttccgtttttccatttcattaacgcttgctcatataaatcgtaatgttcatactctcccgtaccttcgacttgatcgagaatggcgagcatgtcgtcaatacgcgcatctgtcatttcgacgagcgtccatttttcatctgcatgaactttttgatgcgtcatgccatgaagagtgttcataaaatgctgctcactaggaatatcatcattagctgttgaatttgttccctcgtcaatatagcgttcctgattaatcccctctgctgcgtctgctgagcccgcatccgacgcttcagttacgtctttttcttctattaaactcgtatttatatccgagataaaccagtaggcaagtccaagagtgagaaggacaattgatatgattgaaattagtagtgttttcgtagatggcatgttttggacaactccttagtatgattgcttattcattttatcttcccgagctaaatcaatgattccagataggttaacgatacttcgcttaaggactatatattgtttctcaagctctctcgctctttccatgctatcgtcttcaagagatgccgattcgtttgctagattgtcagctttagtatagatcttgtctatctcgctttttaatgctggaagttcatcagagtatttcatcgctaattccatccgatctctcactaatgcactgcgattatgaatctctttgatcccatcaacgttcacaaaccaaactaactcaacatctttatcatagacctgagtcactggaggcgataaaagttcgacttccatgtcagcagccttttcattgatatatcccataactacgcccatatattgatcttctgtaggaagtgggcggtcgtcaacttcagggtctctctgcccccaatcaatacttgtaatatagcctgtatctttcgaaaaactatatccattctcgtactccacactggaagcaattttcgatttctccgatgacaaacgattttcttctggcaactcccattccaataaataatcataaattttttggtaatgctcatcttgaaattttcttttatcaaattcagcttgttcgttcactaattttttctccgattcattttcatcgtcacctacagattcatccgattgattaaaatcttccttttccatactctgttctgtgccaaagaaatcagaaaaaccattagacccaagaataagtaacagaagtaaacaagtaagtatagatagggacgggactaatcgtcttgttttccgcttggaaggacgactatgaatcactttgtaataaatccgctccttctctccttcactcacctcgcccttcttcaaaaccgtctcattcatatccctgcgaagatttttcagcttgtcctccatctactcaacctccttataaagctcacgaagttgcaatttagcacgccttaatctcgttttgatcgtctctgttttaatccctgttagctcttctatttcttgaagacttagatcttcataataaaataaaatgatcacttctcgatatttcaccgaaagcgaaaggactttctgagaaatttcttctccttcacttttttgaacgaggatctcatctagcccagtgcctaccttcaaattttcgtccccacgaaaaggaatcatcgacctgaaccacttactcttcaaataatctttgcagcgattgacggtaattttaaacagccaagttttatagctgctgtctcccctgaaatgttcgatgtttttaaaacaagaaataaacacttcttgagtaatgtcatcggctaccgtccaatttttcacatatgtaaaagcaaggcgcttgatcggctctgcaaaatcatcgatcaactccctgagtaattcatttctctcaaactcgttttctcttttcttctcccccaactagctcccccctggatttccctgtatgatagacgactcacttcccacgatcggttcaaaaagttcactttttagtgataaacaactaaatataccttaaaatggtttagcttcaaaactataacacaaaaaagaatcacagaaagcacgagcgctttttgtgattcttcgcgtatgatcatacatataggttattaatcaaacgtttgtttaacctttcaaaaccagcatgttcttctccacatatgcccagttttgaggaaatgggaaccgcaatcgccaataagtcgccccaagcaaatcataggcttgcatttgtttgtatttctccttgatgctttgaatgtcttcgaaccaaaccacgtgctgacccatcaagttataactgtaagttggcgcctgtgctatctcattgtattgaataggtagccatccgttaatcgcacgattttgtgcactttgcaccggtatcatttcggctggcttctcctgtgcaggcaatgaccaatcatagccgtaaagactcatcgccatcatcactttgcgatggtttatctgactcgtagcatacattaacatctcttccacccaccagacagaggcaattggatccggtggaccaatcgcatagccatagtcaatcgtcatcactgaaacgatgtccgcgatctcaccaaccgcccgataatctagaaagcctaccagtcgatttgtcggcatatcgctgcttttcgcatgcgcattaagttggagtgttagattgccaagccccttctttagctcttttaaaaatgacgtaaaatcattccgcctctccggtggcacaaattcaaaatcaacgctaacgcctgcgtatcctttttcctttactgttctcacgagattttgaacgagcgttgctcttctttccttattttgaagcacagtttcagctaactcaggactgaacgtttgaacatcataattactgatgacaagcaaaggcttgatgtcaagcgctttcgcttgttttaaaatcgcaccatcatcgattggaataaggtctccttttggcgtaaaagaatacgtaaataccgctaaataagtaatcgatccgctcaggttgttcaacgtttcaagataaggtgaaccttcaatcgcatcaaaaaaaacgagcgtttccatttgatacttctgcatagagggaatcctgattctcacgccgaccgggagagctgttggattcaacgccgggttagcttcaacaattgcttgaaccgacgtcttatactgttgcgaaagattccaaaacgtatcgccctgcttaagctgataaaattgttcaggtaaatcctgatctggaatatataaatttagaccagggacaagctgatcagagacaagtccgtttaaagtttgtatcgttggaatcggcacaccgtaggccaatgaaatacgccaaagattatccccacttaccaccgtatgaaccgccattgaatctcctcccaattatgcagcaggctatactgttagtgtattttgggaaagaggggttcatgaatcgtccagaaacctaagcgattttaactccaaggaccacttcgacaaatagttacacacttcgggtggtgacaggcaccaatcaaaaaagcccggggcgcgccccgggcttttccatcatcctacttctctaataactgcttcttcactttctcactaaccgctgactctccaccaagcacataaagctgattaattcctaactcatcatatgcttcctcagtagcagcaggcacttcgtcagacatcactaacaacgacaccgcatcacgtttcgctgcaagaacggatcctgatagggcatcagcaaagtccattccagttgaaatgaaagcggcgttcgctgattgatttaataaagcaatatttgcagctgtttcaaaacggtcagctccaccaattcgttcagcaccaggaagttgatccaatacttcttctgtcacaactgcctcgcctcccacaacgatactttcatcaaagccttctagaacgtgttttgtatctttcggtaactcatctttttctgttaaaagaataggatagccatttttcgctgcataaggggcaatggcaagtgcgtcaggaaaactaagtccgttggctacaatggctttcttgggatctccatccagacgagccgcgatattcgcagccgtttcaaaacggtcatccccactgatacgctctacctttagtcctagccctttcaactgatagttcacataatttgaaacagcgctgttaccaccgagaacaatggctttggaggcaccaagtctcttaatctctttttgaatatctcgattcatagaatgactttctgtcagtagaataggagcgtcatatttgtaggcaagcggtgcaccggcaagcgcatcagcaaaaccatcgccgcgtgtgatgaccactgtatctgcctgctcccagccttcttttgaaatctcgatggctgtttcataccgattatcaccagaaaggcgcttatcaaatgatttttcactatcgacttttacaatcacagtcgttaatggatcaaggtgaatgctattctttgttagctcatatccagaaggctcagaaaccttcttcacaccggcttcatcatcatcaacaagcacttgaccgatcgttaaatcttcatcaagcgttaatgttctctgctcatcatcagcattcacaaacacgtagtacgtgccggttttatctgttgaaacgtttttatacccaattgttaagtcggtctctttcatttcaggcgcatcgactagttgaacattcgcatcgactaactcttttgtaccaagtcgaaaagcgtctgttgattttcttaagtcgattaacccactcgtataagtcattgtttccttctgaatgccttcttccgttaccgcactccagtcaaacatattaatggcgtcagtggaatcataagaatcgtgaataaaatatgggtgctcgaacggctcgccattctcatctaccatatacgtttctttcgcttcaggctttccttcgcctttccactgcttcgttcggccgtattcctgcccggcatgtaggaaggaaacaccctgacttgtcataatcatcgcattcccaagacggatccgctcctgaatttcttcctcatgatcagccgggtctttcttaatcgactgcgcgatgacatcatgaagcgttaagttatcatgcgctgcaatatattgaaccacgtccccaggatcatccgctacaaaattccccggctgtcctttaatgttattaaaaattgtctcaatatcgcgggcaccgccggttaagaaacggggttcgccttcacttccgaaacctgattttaattcgttacgaatttcatctgaaaagacgcttgcgctatctgtatggttcatccaatcctgatcagctggcatcacttcattttcatcgtttccatccccaacgaacgttctccatccttcgccaagcataattaaattcggattcaactttttcgcttcatcgtaagcgatttgaacgctttccgcatcaaggtcacccattaaatcaaagcgaaacccatccactttaaattcatctacccagtacgtgatcgaattgatcatcatttttctcgtcatttcgtgcgttgtgccaagtttcccgccgccatagccggttttcggattgccttcttcatccatgaaatgataatagccaggcatcaaatcttcaaaaatgctaacgagcgccgtgtggttataaacaacatcaagcaccacacccatatcacgcttatgaatttcatcgataagcgcttttaactcagcgatgcgcgcttctggatcctctggacgctcggaatacatgcctgatggagagaaataactatgcgggtcataaccccagttatagttgtttccttcagaagagtactcaagttctctctcgtcgtttgcaagctcatctccaaagtagtatttcatcactggaagcagctgaatgtgtgtgacaccaagatctttcaagtaatccagcttttcagcaaaagagttaaatgtgccaaactgggcatcaagttcagattcaagatccgggtctgatgtaaaatctctcacgtgcgcttcccaaataatcgcgtcttcccgcttttcgaatcctggaatcgaagcaaaatcaagctttggaccaatcgttgcaggattcacaatggccgcttttccaacggtatcttcatcatcgtctgtggaagcagccattgatttcgcataagggtcaagcccaatcgttgtctcaccataaacatcgatctcgaactgataatagtagcctgttaaatcgtcgacgccagtgttcgactgatcaagcttaacctcccaaacacctttctcgcccttcgtcatcgcgatatcttgttttattaacttcgactgatcgtctttgtcataaagaagcaaagaaacagaacttgctggtggtgaccagaatttcatcgttgcctcaccgttatcatgaagcgtcacgccaagatcatttccatcatagacaaactcgtcatctaccagttgccaatcaactagagcctgccgttctctttcgttgtaaacgactttgtaagcttttgttagatctagttcgcgacccatagtgagaacaaacttctgcccctcactttcaagcttttcaatttcaacactttctccatttccgtccaatactttcaaatcgtcaaccgaaagactctcaggctttcgatttagcaatccagtaatctcgtttttctgtgtaatcgtcgcgcttgaaatttgagtgctcaattcaggttcttctaaataaacttcttcctgtccttgaactaaccaaaattctctctcaccagaagtgggaaaagtgcgatcatcagacgtatctttttgatcacctttatgtacgataaaattcaagccatttgtaatttcattgacgggaacatcaacgtacattccatagctcgtttcctgttcaaatgcgacgggatttccccaatcaactttatagtcaatagcaggattctcgtcgtccgcattccataaatgcagtccccatccttcatagttatcatcggctcgctggtaatgcacgcgaatatgatcttcaggtatggctgcctcatctgatacagatgtctctgctttcgagtactgcggcgtagcaaatactcctaagaccattaacacaacagtgagcaatttcattaatcgacttacattcaacaaaaatctcctcctctggattaaaaaatcgtctactagttaagtagtgaaatcgtttgcacaaaagactaaaaaagagacggcttagttaaagcgctttcttcttttaccataacacaatattttcatttttttcatttcatttccgattttaaaataaatggttattatgtactaagcctcttcaaatacaagaaaaagatgattccgactcaatatcggaatcatctctaaataaaaacaaaactaatctcgacaaatacttacaaataccgggtggtgacaggcaccaatcaatctaccgaaagaatatcatcctccactccagtccccacggcacccgtaccacctaaaataatataatcagtcgtttgctcttctttaaagaacttataagtagagtctggtagctgatttttctttgttagaatcgtaggtgcaccaaatttagctgctagtacagagccagtcaaagcatcagcaaagccttcacccgtcgctacaaagacgccgtaagttggtagcttcagcttcttcgttacagcaatcgatgtttcataacgatcatttccttttattctggttggggaaggaagttgtttagcaactttctcactgaccgcatttggtccaccaatcacatacgtttttgtataattcgacatagccttctttgttgcttctgatagctcatttttatccgttagaaaaatcgggtgaccgtacatggctgcgtaaggtgccatagataaagcatccgggaagttcccaccatacgctacgacagctgttcgatttggtagaagtgtctctgcaatcgcagctgccgtttcatagcggttctctccctgaattcgatttacagttaacttcatatccttttttagctcattttctactgatgacgatatcgcattcgatccaccaagaatcgtaaccttcttaacgccgaactctttcattaagttctttactcgcttatctagctttgctttcggtgttagtagaatcggtgcatccatttggaaagcgagaggggctcctgctaaagcatctggaaatgtagcgccggtcgcaagaacaacgttatctgctccctcaggccaacccgctctagcaatttcgatcgccgtttcataacgatcatcacctgaaatacgttgaatatattccatattcatagcagataatgcatacatgctatccgaaccgccgccatttaaatcaagagctccgatgtaataagtcccttctggtatcacataaagctgcacctgaacaccgtcgtatacttcattcacatctggagtgatccagtccccatatccatctgcaagaagaaaaccgaggtcaatccctggctgcgccgcaccagaaacaaccaattccatcggatttttcacttcgatttgatagacatcaacatcttgccagtcaaacgtgccatacaccgtatcatcaagatttaataagttcgctcgatccaaggtatcatttggttcattctcccaataatccgttagtgttttcactttattaggatcagtaccaaacttgtcttttacctgggattgaatcttgtcaagttcttctctagtaaaagcagttcctttctcctgctccacctttttaatttcattttccaatctttcatgaccatcatttgctgcataacctttgataggtaccgaaagtccactaagtaataaagcaactagcaaataaacaatcgctttcctcatgcatacatcccccatttttcccaaattgtgtcatatcacctctctattatataggtactaggaaccagaaaccatgagaggttctgtcgaagattaagaaatattacgaaggaaaagttgaacattatgtctacctatgtcattttcaagcgtctaaaaaaaagagtccgaaccaaaataaaaatgattcgaactctcatataagcgattcattttgcatctcctactcatgctttttttacactttcaaataccatctttttctatgacaaataaaagcaataaccgtccaaaatagcaaattaagcaaagcataggctaattgaggatgcggaacgaaagacgcgacaccttcataaagaatactcgccaacggttcattcactccgtcaattttcaacgtaagatgaaccaagaaagacgccagcataaatttaccaaaataaatcaaaaagctgtttcgtccaaaggcttctaaataccaaacaattggcttcataaatgtctctttggaatctacttttcctttatcgaaaatgagatataagattgataacatggtagaagttagaccagcagcaagcatcgcaaaagccggcgtccataacctcttattgtatggaagaaattgatgccaaactaaagataaggcgatgacgagcaacccaattgctaacagttctttccacgctccggtttcttttcttgaaatgattaattttccaatggcgaaaccaaatagaacattcgataacgctgaaaaactcgttactaacccttcaggatcatacccccgctcaccttgatgatacatatgattttctccgaacacggcgctatcaataatgccagatggattacagtctggctgcggtaactgatcttcacacgattgtcctattgtaagaagaccgccaccataaatcgatgaaaccaacaaagcaatcaacatcaatttaagtggagacttcacaaaatatgtaatggtaactgttacgatccccaaaaacgcaaacatctgtaaaacaccagtccatcttaatgtagcaaaatcaaggctccacgtgacaaccattgtaaaaataatgccatatacaatgagacgaactgttcgctttaggatcttctcccacttcactccccgctgatatgcaatggccatacttgcaccaaaaatcgtgataaaagtaggaagaatcacatcaataatcgtcaccccataccattcagcatgacgaagactttcatactcaatactacctgctggtattgtacttaaaaaaacggataaaacaacaataatccctctcaacatatcaagggaatagactcttttctttttcatttgctgagctttaggcataccagattcctttcacacacattcttatttctcctactatgaaagtatacactagcccaaaaaactttgatagaattgaaaagtgacaattttccagttcgggggttcagatgagagttattttcctgtctttactattattatgtatcactattagtccgcttagtgcgtgcagtgtcatggaagcagagccagaaacttctgtgttttatgcccctcacgccgacgatgaagtcttaagtcttggcccatcgatccttggacaacttgataaaggaaacaaagtagctgttgtcttgctatcacatggtgaagccagtcaatcattgaaaacgattaatatcttgttatccgagatgaaacaccctcctcttacagcagaagaatttggcgactcacgagtaaaagagttcagaaaatcggttaaagaattagaagttgaaagtgagaatgtatatgtttatgatcttcctgatggtgaagtaaaaaaagaagatgtgatcagggttatgaaagaaatgaataagcgctacccatcagcaagccaccataccttatcctatgaagatcctcaccgcgatcactccgcttcaggtttagcattaaaggaactagtagaaaaaggaaccattgattcagcccgttactaccttcctatccaggagtttaagaatttggaatatgataatacatatcctgttccagagaatcgaacggacgaatacgataatagtttaaacgcttatcgtatatgggacccggagaaagggttttatagtattggctaccattctgtgaaatcttattttgaaaaggctgaaatgtataacgaaagtcgttggcataaataaagcacataagttttccataaatttaagcatttttcttaaagattggatttcattcattctacgaaaacgctctttaacctttcagagaatttttttcacactcaatgatagcgattacaataataggattaaagtcaatgaaaattttagaagaagccatcctttctcacaaatgatgtctttccatcaataaagaaatagatgacgtccttcaattaatagcgtctctccttacataagaaatggaagcggttcacttaaacaaacgtttgattaagtgaaccgcttcctcttaactattgtgttttttgagatcgtaaaaagcttcattgaaaagtcaccgcgatcctcccccactaatcctagcaatcacttcttcaataaaaataaaaaacaccgttctcgttttttcaaacggcagcaagctgctatcctgaataaacttcgataaataaaaaatataatcggccatcgagtttaacgtgttcacatactcctctaataccagcatgatcgttgcaccattcttcttcgtttcagtaaacaaattttcaaaagaagaaaatttccctgtcacagatagaacgatcaggagcgtatcttcatccgccaggcgactcgcaaagtcctcgctttgtgccaccgttacatttttatcggaagaaatggttagcttatacccaaaatactctgcactaataaaagacgggcccaaaccgtagataataatcttcttatacttttggaaaaccgaaacaaaatcttcaacgagcgcaggatcaaagttttctagaaactggattaagcgctcgatttcacttgatttcgttttcttttccatatgaatctgctggccgctaaaatagagcttatactgcttaaagttatcaaagcctaatttccgaacaagcttcgatacttttgacggagagacgtcacagagctcggcggcatcaatgatttttaacttatcatttgtagcgacaacatccgctagcttgctatgcacttgttcttctaattttgttagatgattcgtatctaatttaatcataactcttccattcctttcacattgctccttgactcgcgcagcgaaaacaagcaaccgccatttcctattcgaaaataacggttgctcttctcttgaactgatcatgtcacaatgatcaataggtctaccataacatgattcccaaagaatgcttatttaaaaatcggataagaaagcttcaatatttcatccgtatgctttctaacatttttcacaacagtttcattcaccttgttataaaaatcatgatgatcagagatcggtttgaacgttttttctgttttcaccatttgctcaatcgcttcagaaaaatcatcgtaaacacctaagaactgagaagcactaatcgccgcacctaaacaagcactactgcttcccttgcgtcgatgcaccggtaagccaaacaaatcggctatgatttgcatgatcacatcgctcttcgaaccgccgccaataacgacaacctcatttaattgcacatcaacttcttctaacatttcatcaatgttgtttttaatattgaaggcaatcgcttctagtatcgagcgataaatatggtatcttgaatggcgctgatcaaagccaatcatcattccttttcggtatggtttatccggtgaagccaaccaatccaaaatcgtaatcaagccctcactaccaacgggaacttcttccgccttacgattcagaaactcttcctctgaaactcctagcttctttgcttcggttacgagttcttccccaattaaattcttaaaccagctaaccgtccacaatccccgtcgaataccgtttgattcataaacgtatttgaatggaatcgatgcaaacgtaggaaaaaagtttttcgcatcttcataatagttatctctcaatagcatcgaagatataaaagttccgagtgaaatcatgattgaactttcgttttgaatccctgagccgagcacttccaccgctttatcatttgacgttgcgacaactggaatgccttcactgaaaccaaactcctccgcaagctcaccacgaatagaaccaagcttttcaccaggcttcacaaggttaaataacatctctctccgcagaccgttttcatgaatcacatcatcatcgtttgaccaatccaacgtttcgcgatcaactggccaaaacacttcacagttaccagctgtgtcgttgtattctcccgttaaccgaagtcctaagtaacctgaagtggtcgttacatactgcacgcgatcgtcttcgtgctcatatggttttgataatcgagcatccatccagctaatggctggatgggctagattaccgtcttcattcagcaaaacgcggcagcaacggatcgtacataatccaatcgcttcgatttctttcggatcaccgttgaaattcgataaacaatttttcacaccgtgataaacgctatcccataagtcatcatccggatgaatgacgacgcctggttcaggggttaaggtttcccttaacgcctgtgaaccgtaggcgacttcattcccttccagatcaaagatcacaacttttgtactttgtgatccgttatcaatccccatgatgtatcgatttgccatgctttccctcctagcctctaatatactttttcacttcgctcggttgagggaaaatcgttccgtggttcatgattccttttggatcaaacgcttctttaagtttttctaacatatagtacgcagagccgtgctcttcttttgtccattcagaacggtacttcccaataccatggtggtgacacatggagccgccaagcttcaacgtttcttcaataatgatttggtgaattgggtggtgataaatgcgcatttcatcttctggtgcacagttaatcgtatagttgtaaacgaaatacatatttgttccatttaagtagctgtgagatgaatgaccaccaagcattgtgagctcgtctgcacgatcaaattcatttttaatacgttcaataacgttgttataaagcttcggaatggtttcccaatcagccgacacttctgttgtaaagccatcatgagtattgtcatcaatcatatcctgaatttcacgctcgatgcggctttcatcccagttcaagttgttaaaccatgactcaattaacgaagaatcaaccttttcaacaataccggactgaaacttttcaactgcttcttcaatcccagcgtttgtagcttccacgattcctttagggccttctgccatgaaaatcaacacgcacttatctttataaaagtgctcaaaatgctgtcttgcatcttcttcagaatacacgcgtgcaacagaaggacgatagccgttcaccattacttcgcgtaacactttaattcctgtttctacatctttaatcaagtagccgtggaacgcattgttctccggattgtgtttaaaaatcttcaccgttacttcagtgatataacaaagtgcgccttcattcccaatcgcaatgtggcgaatatccgggccaccagaacgtctcggaacgtttttgatttttgaaacttgtccttcagggaaaacacactcaagaccaacaaccatatcttcaatcgcaccgtataaagtagaaagctgaccaatacttcttgttgaaacaaggccaccaaattgcgcgactggcttggactgtggagagtgacccgttgtataccctaacttacgaagttcatcttcaagcgtttgaagctttacgccagactgaacagtcgcctgcatattgtacgtatccattttgataatctcattcatcttagagccgtcgataacaatggtggtttctttccaattctcaagaccaccctctgtgcctgttttcccacttctcgggatcacgttaatgttattttcattacagaacataagaagtgttttcacttcttccgtggaataaggaaaaacaatcgcaagtggtgctggaacatcaaggacattttttgttttcgcatactttttgtagcgatccgccgatgcgtcgtaaagcgcctcttcatttgtcacgatttgatcctcagaaagtagagactttaactcttctaataggtttttcatcatttattctcctttatcgatatcatatttttatagaatttatcgtacgagatagccaccgtcgacatttagtaatgtaccgtttacatagttagacgcgtcagatgctaagaaaacaactgctcccatcaggtcctggatattcccccatcgattagccggaatgtgatcaaggacgcgctgattgctttcaagattatctctcgtaattttcgttacgtccgttgcaaaataccctggggctatgccattaacctggatgttgtattgagcgagttcatcgcaatacgctttcgtgaaaccggctagcccatgctttgtagctgcataggctggcgaccactggccaccgagatacgaaaataaggagcaagtgttgataattttcccacttcgctgtgggatcatatacttagctacttcatgagacagctcaaaaggcgcattcaagttaactgacaccattttatcccaatgtaatcttgtaaacttcgtaacgtctggttcgtttatgttaaccccagcattatttacgagaatatcgattttaccaaatacgcttacgcattcatctacaatcgctttacaaaaaccgtcttctgtcagattgccaaccattaaatgatagtgaacgccctccgcttcaatcagcttcctcgtctgatcatcgtcttctgtcatactaacggcaaagatatttgccccagccttcgcaagcgcaagcgcaaacccctgaccaattcctgaattaccaccagtaataatggctacttttcccttcaaactaaaaaagttcatattaaaatccgtaatgtcatttatttcggggttcatcctcaaccttgccacctttcagaatggtttaactaggtttattctaatctttcagaaaataaaaggcaaggattattagagaaatttctctaatattaataatatgtaatttaatataagaaaattttccttaaaatcatttgaaaatgctaagctagcttcctttacaaaactcctttttataattaaaaaagcaactactctattaaataaagtagttgctttcagttaatatcttttagcggagtatcgcttctcccttactccccatcataattactatcaggaagcgtatcccagaaagacgtatccgctgaatcaatcgaattatccgcaagcgcattaagacttgccttcatcgccgttacggcctgttggattaggtaaccattgctcttctgcccgagaacatagtcatcgcgataatgatcggccatgccgcgcatttcaaaaagaagcgttgcaataccatactccatcgctagtccgttgcgactaatcgtcggtgcacttccacctggatatttcgaaagcagtccatatcctttggcttctaccgcgttatatacgatagcaccaagttccttcgactgttccacgacttccggatcgacagtctcatttgttggatacaaaatcgatcccgacaccaattcgccagtgtcaccgagtgttgtttgagtcccttgatgatgcaggtcaatcatataatccggagaatatttttgtagcacattttcatgaagcgccttcgtttcaggctgttcgcgatcgacatggtcacgattaagatcaacttcgttggcgttatagcgcgtatgcgtaccagaaacatagtcttctaaggaaaaattcacatcaccttctgccccgtcgacatttagtcgtggcgcgatcaacacattcacgttatcaaggatgttttgcacgtcttttccgttcgatgataaatacttaatcacctcaagcgcgccttcggttgttaacgtttcattcccatgctgctgcgttaggaataaaatcgttgggttatctggattcatgttgccaaacttcgcaaggtaaaggtctctgcctttaacggactgaccgtacacctcgagctccagcgcttcagaacgctgctcaactttttctaaaaagctcaccatttcttcataagaatgcaaacgctcattcttgatcgtttcattgccgccatagtttggcccattcggtccattctctccggctagcgcggtattccctgttaaaaaggatccagacactagcatcgttcctgccactgttaacgttagaatttgttttttcaccgttatcctcccaaaaaatcacattcgctatttatgttttcgcttacattttgtcacaagctcctaccgttctgttaatggaatctcatcatacgcttcaggattaatttcataaacatttccgctcgtcacgccatcaataatcccataaagcccaatttcaacggccttaatcagtctacctttttccttctgaccgtagctttgcgtttgtcccgtcacttcaaacagcaccgcgccgcttccattaagagcgaatgaaccaagtgccgttcctggtaaatccaaaccttgcggatagagcgtaatattatcaaatggtgaatcgcctcgctcctgcagggcgttataaaccgaaacatttaattgctttgagaaatcaccatcgtatgtatcggcatactcacgatatttcgcgccctcttcactgtctggatctggaacaaaatctcctgaaattgagagcgtcactttatcatccgttccctcaacgaaatattctccttgatgatgcaagtcaacaaacacatcgactttaccaaactcactcgttagccctttatacacatcacgaacggtttgcgcttcaggtgtaatgtaccagccaggattcgaagagttacttggaaaatcttccggttgtggcacatagttaagatccggattaaagtcgcgatttacatcaaagcctggattagatgcgtaatcccaatattgattcgtatacgtgtagtagttccatgatggggacgcactagcgagctgaggaaaatcatttacgacctcactccacgacatgtcattgccacgacgatttaactctgtcgcatccggattcaccattggcatcgcgacgatggttacttcctcacgtatctttttagcttctggcgaattcgagccaagctgctgcagtaaattcaatagtgctgccgtacccgtcttttcgtttccatgaatctcactttggacgaggatcactttgtcccctgaaccaaccgttgctgtataaatttcacggcctagattcgaataaccagccacttccacattcacctgtccctggctgctccgatcaatttgctgtagctttttgctgagctccgcatgactaataaaaccagagattgcgtattcctgactttgcgcttgaacaggtttgacgttcggcgctgccattgtaggactagcaaagacggatgaaagtaaaagcgtgctacataagacggttaacttcttttttcgactcatttcattcctcctcgattttaatagactgtacaaagtagtcattctctttccgctacctgaagccctgttgattgcccgtaaaaccaatcgtttgaactaaggtagttttacgaaatagttccttttacataggaaaaaggcatccagatctaaagtgaaaaaggacgttagatggagatcagagattctactctacaaacttttgattctaaaaacctaataagttctattaaaaatgtcgatataaagagtataaaagaaggaagatcctgtctgattatggtatcctggtaaaatattcatattaaggttctaaatggagatcgataaaaaagagaagtagcaattcagatgctacaacaaatgggtacaagctaagagaatattttccgatggtcgttttcatcagtcaatttcttgcttgtccattttaataagatcaaagaaattcactaatagagagcgcggtgaatttcaaacaacattctggtaggggtaagggcgtttgaaaggggaaagtcttgatgaaatttgacgcatatatacaaaaatcaaaagagaattgtgccaacatatacggtttgaaaccagaggagattccttttttaaaggtttcccttgcaccagaacaactcgaggctcgaaaacgtcaatttgaaccgattcgaatcatcatccaacaatttatgcaaaaaatattaacctacacttcagaaacacctatccttgtcgttgcgaccgacggagaaggatacgtcctcgatctacatggagatcaaataatacatgagatggtggaaatgttaggaatcacgaaaggagttcgctttgctgaaaaggatgttggaacaaattctgtttcgcttgcactaacatacggagaaccgattcaattaattggaaacgatcattatcatcactgccttgaagggatcgcgtgtttttcagctccattttcttatggagaggaaggcactgtctctcttatgacgacaaaagaatatgcaactcccttttatctcggattattgtcttcagcagtcgatgccattgaaagagagataaaagttcagcttcaaaatgaacgctttcaccttatgaatcaagtcttaatgaatgctactccacttggcattgttatgacgaatcaattcggagaaattcgagaaatgaatgaaagcgccgaaagaatcaccgggtggctcgagacagaattaatatccaaagacattgagatcattccagaattaaaatcattcattcgacaagtccttcatgacaaaaggaaattggaaaatatagaagtgatcttttcacaaggtgaaatagcttgcctgttagatgtaatgcctctctttgaccggtttgatcaatttatcggcgttttcgcgcagtttcgagatatgcaatcgtattacgaccttcaaaaacgggtcgttcagtccgagaaactatcagccattggaaaattaggggcaggatttgctcatgaaattcgtaacccattaacctccattatcggattgacgcagctaatggatgaactgccagacgagaaacagcgagaacatcgcaaaatcattaagtcagagcttgaacgcatgcgtcatctcgtcgaccaatttgtaatgctaggaaaagtacaggtaagtcaaaaaaatccagaaaacctacagcgtatcatacaagatacggtatgcctgatgaagagctatgcccgtgaaaaccaagtaacacttcatcttcagtccgctagctcgaatcctatcctttcgatcgatggctctcaaatcaaacaagttcttatcaactttatcaagaatgcgattgaagcccagccagatggtgggtacgttcggatttcattatatccgaacacttcgtctatgacagtaaagatcatagacgctggacccggcatgtcaccacaaatgctggatcaactaggttcgccttttattagtacaaaagaagatggactcggaatgggactggcgattagccttgatcttattaaagcccatcatggaacatatacgattcactcaacagaaggtgagggaacaacggtagagtttacacttcctctgtataatgcagaaggatgatgctacctatctttcataaagcgaaaaccaggtgggctagcttacctggtttttttagttttaatcaagatgccgtaaaagagatgattatccaattgacctcctgaatacaatagaataaaccattattatcattattgataataatagcaataaaggagagcttatgagtcaatccaaagcagacatcattttgcatccagtccgaatgaagatcatccaatacctcgcaaaaggcgatgcaaccggctatgaaatcgtaacagttctgcctcaaattccacaggcaacgctctatcgtcacctgaatatcttaaataaggaacacattatagccgttattgatgaaaaacaaattcgaggagcagtggaaaagacgtattcgcttcaaaaagatggcgcccgaattaacgctggtgattttaaaaatatgagtgaagaagagcaaatgcagttgttaaccaccctctactttgacttactaaacaaaaccgaagattacattaaaagtgagaatacgatcgaaaaagatccttttggttttaatcgggtcgaactccatttgacggaagacgagttccacaacatgcgaaacgatctcattggagtctataagaaatacaatgatcggaaaacgaccagggaaaagcgaaccatccatatgactcagattttcctgccggaacccggtgaaaagtggaacgaaggagagtgaatgtaggatgaaaaaaatcttaccactaagtgcactgttagccattcttggcgcaattggcggatactttgttgcgcaaggtttggatctcggcgggagcctggaaatccctgatgaaagcatgctcaccctaaccattcaagcaggaataatcactttcgtcctcagtctgatcggcttactgctacaaaaaaagactccctttcagctaagcgataaaacgaaggtacgcagaggcgcaggtcttgcggttttatttggacttcttacaggatttatcattatcgcaggtgatgcctcccttttttcaaaatttcttccggagttagaaacgaatccgccagttttttcgttatcaggcttactcgggggcgttttttatggaggtgttgtggaagaagtcatgatgcgcttattcggcatgacgctaatcatttttctcattagcaaaatccgaaaagggaaaaacccatcgaacccatcctattggatcgctattattctaacaagcctcctctttgcagtcggtcatctaccagcaaatgcattaatctttggagagttaagctttattgttacaacaagagcgctcatcctaaacggcattggtggcatgtttttcgggtatctttattggaaatatggcttctggtttagcgtactctcccatatggttgcgcatattgggatgcaggtgatttttataccgatgttttattaggaagactaccaacatgtcacaaacgcactaaaaaggaaaaaccaggtaacctaatcaataaacaggttacctggttttttgagcattttttgaccctcattttttaaaacgctcctgaccctcctccaccaccgcctgcacctgatcctccccctccgtttgaaccagctgccgatacggcagtatgctggtctgctttctcaaaccctgattggaacgtttcagctagaagaaggtagatcatccattcattactttgcgaggaggaagcaaagctagcggacatttttcgctttcctgctccgatttggtagagaagagcatgaacttgctcatcttcatcccacgttttccattgatcgctcaacttaagtggtgtcagtgtttccataattcttcttcccttttcatttaacggtcgatacgcaatggcaaagatgagaaagaagatgaaaagtaaaacaactgaaaacatccagagaaagagaccatggtatgcaaacaaaaagatacttgtgaaggatacgagtgcagctatacttgaaatccaacgtgtcttcgctgctttttcagttaactcatactgcttcacttctctccttaccgcttccttccaggctgagaagcttctttggtatttttcatgattcttcttctctttcacatagttttccagatcatcaacatgaaaagtggtatcgtctgctatttcatcaaacaaccattcaattaatctcgtttcatgcttaaaatctgtatccctactcaggagttcaaactcttcatctgaaatcttcttgatgttcccttttcgaacgagttcaagcaacgaagcgataatcgctgatgctttaagatttcctcctgtaaataaaagagtcgcaggtaggctcatttccgtatcaggaaagcgtccatttccgctaagctgccgttcaatttcaattcctgtcaatctctttcttctgatggcttgaacgatcaatccaactgcaattagaagcaacccaccaacaatcacaggtgcatatccaccccactgctctttcgcttccatttttgccgctacttctgcatccattttctctttttcagcaagaatgttatcgagcatcggcttttcggctgttagaggtgcttctgaaaaaagagaggcatcataggcgatgcgaatatctcctttttcctcactcgatacttctcccaggttgaaaacgaccgtcccctcatcaattgtttcgacagtgtcataggcttcatcatatccatatgctgctttcacatcagtaggtttgggagggacaaccgtgattcgcatattttcgtaagttgcttcattgctatcatcgaaaaaaggataataaaactgggcgacgtcttcaaaccgttctactccttgattgacggtgtaggtgatgtcgaccgttactgtttcatctgaccctcctcggtaaattttgtacaggttcccctccttcttcactttaagattctccccattttcagaagcttggaagttatgaattgtcgtattctctttcgggataagtgtccttgtaatgccgttaaactctccttcaaattcgtacgtgtgggtttcttttacatcaacctgaccgtccttgtgcaattgggcattgatatcagtcgattcaatcgaaaactccacagcccatacatgcgttggtatgaacaaaataagaagtaagacacatacacttagcacctttttcataggattaccttctttcgagtacatttacaattttatatacgattaaaaaagggaaaagttacaagtgaatgacttgcggacataaaatctgttttaacgttaaacaaattattgtcacaataactttaatgcaaacggttgcgtaaacgttatcagctggtatatactattcaaggaaaacgctttatcagtttaacgaagtatccctttagtacttcacttgaaaattcatagttttggagcgcgatcattgccagtaaagcaatcctattattaaacatgtccatcagaagctgttcgcaactaccagcgagtgcagcatttatttttttatttatgtgcaagcgattgcattgttttcgaattttcatagcttattaacttcaaaatctatccatacataggaggaaatcatgttacaagaacaagttgccacaaccagtgaaaaacgatatcagaaagaattacccgctctccctctcacgacaatctggttaattagtttcggttttttaggtgtacagatggccttctcattgcaaagtgcaaacatgggacgaattttccaaacccttggtgcagatcctcataatcttggattgttctttatcttaccaccactcgcaggactaatcgtccaacctttagttggttatttctcagaccggacctggatcccagggcttggtcgacgtattccttatctactcgttggtgctgttgttgctgtcattgtcatgtgtctattgccgaactcaggtagtttcggatttacagcagtgacagccatgacgtttggagcgattgccattttgtttatggatgtctcatcaaacatggcgatgcagccttttaaaatgatggttggggatatggtaaacaaagagcaaaaaggatttgcctattcgatccaaagctttctatcaaatagtggtgctgtattggctagcatttttccttttgcgttaacacttataggtgtatcaaatagtgcaccaaaaggagttatcccacaatcggtcgtcatttctttttatgtcggcgcaggtgttttaatcatttgtagtctcgttaccgtattgaaagtaaaagagtatacaccagatgagtttgccgtttatcacggcatttcaaaagaatcgacgaaagaaaaagtaaacatttttaaattacttggaagcgctccaaaagtattttggaccgttaccctcgttcaattattttgctggatgggttttcaatacttatggacgtatggcacaggcgccattgcgttaaacgtttggaatacgagtgacccttcaagtgcagcttatcaagatgccggaaactggtttgggattttaacagcggttcagtcgattggagcagtactctggtctcttgccttatcccgaattccaaataactcacggaaattctactactcgattagcttattgctaggtggaatcgggtttggatctgtcttcttcgttcacaatcagtgggcactcgttatttcctttacgttaatcggaattgcatgggcagcgatgatgaccttcccattcacgatcctaacgaacgcgctgaaaggcaaaaacatgggtacataccttgggctgtttaacggtagtatttgtttgccacaaattatcgcatcatgcttaagctttgtactcttcccattgatcgggtcttctatgccgtttatgatcttgctttcgggtgtgttccttgtcgttggggcgttgtctgtacctgttattaaggagacgtatgcgaagtaagagaacggaacttagaactagcaagacgaagtagtcaattttcattcctaaacataaagacacaccagaacgcttctggtgtgtctttaattatgattacaatacttaaaagctattgctgtaataaacggtgcactgctgcctagtttagcgtggacaatccattctatacataaagaacaataaaaacttaaacacttttcaaaattatggtactttaatcatattacagtttttatagtaaggagggaacattctgtctatttatagtcaaatgttgaaaggtctactggaaggaagtatcctttcgttaatttccaaaaaggatacttatggatacgaattgcttgaaaagctaagagaagggggatttcttcatgtaagcgacggcactatttatccattacttttaaggttagaaaaagaaaaactaatagaaagctacactcgtcctttcgaaacagggcctagaagaaagtattatttcattaccgaagaaggtttactagctttaaaagaaatacaggattattggaaagacttgaagaaatccgtgaatttgtttatggaaaatgaagaggtgaaatgatgaatagtattcaaagggacaagtttacattatcaaaaaataatcgagataaatataacgagttttgtttatttgtaaatagtagcaatatcgatacagaagccaaaaataaattaaaagatgaaattttagaccatctcattgaaggtgaaaaacacggcaaaacatttgatgatttatttagtgaaaatcctagagaatactcacaacaactaatagaaatgctaccaaaagcaacttttaaaacaaaagtccgtttcttcttaaacgttatctttatatcaattattattagtatacctatcctgtttttcagcgattcagcttcggaatttttattcactctagtatccttcccattattggcaggggtattgtcacttttttgtttccgcatatttaaaggtacggttttcaagaattcttttaaatatataattgccattatcttagtgattcaattaatatcgatcgtctatgtttatttcaaaaatgctatcatataagattttgcaaagattttacccagttaatcacgaaacccctcctcttatgtaaatcctatagtaaattccattcttatttttatatgatactcatataaggcttgtataacaaaggtgggatttacatatgaaaaagaagataattttaggtagtgttactgtcggaattctcagtttggttctaattaacctatttattttccaaggcgatcaagagacaactgtaaaagctgaagaagaaacatatatcgtagaggaagaacgtttaaccgatgttattaacgtcggtggtgaggtaaagccaaaaaatcaggaaacttattatattgacacatctataggaagtttaaaggagttattggttgatgacggtgaggaaatcgaaattggaagtcctttgtattcttatgaaaaccctaaattattagatcagttggaacgagctgagttatcaaaaagtcgtgctcttattcaattagaacaattaaacagtcaggaagataaattaaatgaagagtctaatgatgatgaaggggaatttactcccaacgcaataggtgtagataaagaatcgatcaaatttgatcgaagattagcaaatttagactacaaagaagcagaattagaaatttcatctttacataaagaaattaaagaactgactatccatagcaaaatgaaaggcatcgttaaaataattgggaatgacctctcacttgggtctccaaatagcactgtcccccttgtaactgttgtgtctgaaggagagtatttggtttatggaaaacttcccgaatatgattctccattagttaaccctggaatgaaagttaaaattaaagcaaaggcagtccctgataaagtctatgtgggtgaaattgtaagtgtttcctccttacctgataatttatcagaaggtgaagattcttctggtaacaaggagtccatgtacacctataaagcaaagtttaaaacctctccaaaagaaatgaaatctggatactcagtaaatattgaagttcagatagaccgaaaagataaacaacctattatccctatagaaagcattggaacagatgaaaagggagaatatatcttcttgaaaaagagtgaggaaaatatagaaaagacctatattgaagccggcgtcattaatgaaggatatagggaagtattaaatggacttaaagttggagatgaaattcttgcttcagttgaagagtctgatttagaaagtgacaagagtaaatgattaaattggagagtgtaaataaaacgtataaagtcggaaatgtggatgtccccattctaaaagacatagatttatccattgataaaggggaatacgcttcaataatggggccttctggttccggaaagtccactttaatgaatattatcgggatcttagatcgtccaactcgagggcactatatatttaatgaagaaaatataaaaaacaaaaatcaaaaaacactagcaagtttgcgaaatcaatcaattggattcgtgttccaaagctttcatttgctacccagaataacagcagtcgaaaatgttgaactgccattaatctatggtggttataaaagaagtgatagaagagaaaaggcaatttatgctctagaaaaagtagggttagttgatcatatgaagcaatatcctaatcaactttcaggagggcaaaaacaaagagttgccattgctcgtgcaattattaatgaacctttattaatattggcagacgagccaacgggtgctttagatacaaatactggcgaaaaaataatggagatattcacccaatttaataaagaaggtcacacagttgtattagttactcatgaattagaaatagctcactgcgcaaaccggataataaatattagagatgggaaaatagcagaagatcggaggctatcttacgatgaatttttgggatagtttcaagatctctctaaatgcaattgctggtcacaagatacgttctatactaactatgctagggattgtcattggcgtgagttctattattataattgtatctatcggtcagagtggtgagaaagctttaaaatctaacttagctggttcagacaacaacacgattgatatgatgttcacttatgatgatgaaaataaaaactatagtaatgaagctctcacctatactacgcgtgacatagaaaatctccaatcaattcctgaaatagaaaaagtagtacctaaaaatacggagtacactactatttctggttccaagcagtccaaaactgttgaaatgattggtattacatcacaatactactttttagaaaatttagaagttaatgaaggcagagagatatcttcatttgaaatgagtaattctagaagagtcgctttattaaatgaaaaaaccgcaaaatctttatttaatttaataagccctgttaatcagtatatagaggtaaacggaatatctgttaaaataattggcgtttatcaagaagatattcctgtagaacttcaaaccgaaaaagtattaataccactacaagcctggccacttatatttaatacagaagaaatcacctcactcacgatcgtagcggacaaggtagagaacatgcaagtagctggtgaaaaagcagtttcaatgatgaacaacactaaagaattgagtgaggaaggtacttttgaagtactcaacatgaaagaaatccaagacggtattgcctccatcactaagatcatgactggaattgtcggcgctatagctagcatctcactatttgttggtggaataggtgttatgaatataatgctagtatcagttactgaacgaaccaaagaaataggaattagaaaggctttaggagcctcacgcggaaaaatacttttacaattcttaattgagtcagcatttttaacgttcattggcggtgtcattggaattgtgattggttactgtggctcttacctattttcactattttctgattggccctttactgtttcaatcccaatcatagcgataggttgcttattttctatggcaataggggtagtttttggcattatgcccgccaacaaagccgcaaaactagaacctatagatgccttaagatatgagtaagaacctcatctatcattcaaaaaatgataaccacctggctactaattgattaacttcagaagttcagaacgtaaaactgcatagcgatttgcagtaaacttcacatggtatatcacatatgaaaccacacaaaaagagcttggagatgctatttcaagctctttttccttcgtttttctgttaaagctcctcgtttcttgaaagctgatttcgagacactttcctttgcatatttaaaaaaacatgtatatgcattaatttaatagaaaccttttcagttttaaaataaaagataacatactctagaacacagcttgtttcaccttttaccctcctcacttaagatcttgattactgagcaacgtcggaaatgcgctgctacatattaatttctgtcgctccagcgttgattataatcctagtattggagatatacaattttctccgcagccacttttcgcctggcgagatatgcatcgttttgtgcgcgtttaaatcactcttatggttcgttcaatgatatatttctcgtgtctaatctagtctgatacattgtgataatcgtttcgtcaatccactgtgagaaaagcaatgtgccgatcataaagttcctctaaacaatcgtatttagtatcgagcgagactacacaccatttttatgcaggattaaattttataacatctgcatttccaaataaaaaacaatcaataatttattgattgttttgttcatatcgattttggtgtaataaacccttctataaacgaggctaagaataagagaagaacaatcgatccgactatatatgaaagtcttttccaactctttttttctgtataaaacttcagtccatataaccccaaatagccggctaaaataagtgctggtatttcaaacaaaccatgaggtactactgctagaaataattccgtcacacccataccacttaagtaatttccagctaatactcctcccaaccaaagcccattaagaaataaaataggtacagtaggaatcccgaatagcaaaataccggaaactaataataataccacttttaaattttgaataaagaaaaatagagaaccttcaaatccttctctcttatcataataattttcagagttcatccctagtacagctgtttcagtattaactgagagtattaaagtgattccaaggatcatacctccagcaaaaagaataatcgaaaacaataataatgatttgtctttaagtaatatattcatatcaaccacctaaaggtttgatttttttcacgattaatggtatatatagtaaatatatatatgtattagttatacttaaagagcaacgaggatgagtcgttactctaaaagattgattagatattagtaagctactgcggtctttttagctccttttttaagcaatgattgtgctgtaaggataagagctgaagttaaaccaaagcttgcaaacaaggaaattaaagccagtaccgttgatcctgcttcgatcgcggatacaattacattagcccagtactgggaaatacctagtgcgccggcaatgaatgcaaaaatgaattccatgttttcttcctcctttcttggggaaatgttcttgtaacgaggtgagtcgttacaagaacaattaagtattagtaagctacagccgtctttttagctccttttttaagcaatgatcttgctgtcaggataagagctgaagttaaaccaaagcttgcaaacagggaaattagtgccagtaccgttgatcctgcttcgatcgcggatacgatgacgttagcccagtactcggagatacctagtgcgccagcaatgaatgcaaaaatgaattccatgttttcttcctcctttcttggggaattgttgttataacgaggatgagtcgttataaatacgaactacttaagtattagtaagctacagccgtcttcttagctccttttttaagcaatgatcttgccgtcaggataagagctgaagttaaaccaaagcttgcgaacagggaaattagtgccagtaccgttgatcctgcttcgatcgcggatacgatgacgttagcccagtactcggagatacctagtgcgccagcaatgaatgcaaaaatgaattccatgttttcttcctcccttctttattttctattacagggttgagtcatcacactaataaaatcatgtttgtaacgagcattagtaagctacagccgtcttcttagctccttttttaagcaatgatcttgctgtcaggataagagctgaagttaaaccaaaacttgcgaacagggaaattagtgccagtaccgttgatcctgcttcgatcgcggatacgatgacgttagcccagtactcagagatacctagtgcgccagcaatgaatgcaaaaatgaattccatctttttcacctcctctcaatggcagtatatttatattgcttgcttatcccaataacgctggaataagtgaagcaatgatagtgaaaccaatccaagtcagtgcaataacacttatactttttttggtggacacttggacacatacccctactcctaaaccaattagcaaaatactccagatattaaaaacttcaatactattaaataaatttgttaaaaagagcgagtcaacaaaattctgaacggtaaaccctaaacttgttattggagttgtgactgtaccctgatctatgaaaaggagattaatgaatttcccgatgagtataggtacttgagcaattaatacgatatggaacagacctttaaaagttaatcgtatcttacataagtgaagtattaatttgtaaagtgctgttgttattaataaactaaacaacaattgaatgacagagaaaatactcgttccaatatacaaaattaaatatgtactttcattttgcaattctggagataacaatgatatcacttcgttagatttcactaagtcttttgctaagaagaaggatatgattccatacaacaccaagatgatgtaggcattcatccctattttacgatctatcctcagactagaaaaaaaattagtaggttgaattaatacatctaaaagactagagggcttgtaggaagcctttcttctttcaggagcttctgctactttttgtgcaacactcattttttaatcctccttgtgtatttcgaatatgagttcataatactataaaaaagggatatttaaacattaattacctattgtgactatttttgctctttttgggggtaataattgaactatcttataaataaaatcaataaaaaagagcagcacttcaggtaaaagtgctgctctctttatgataatttcaatggatcgtttattttttgttggtatttttaatatatccgaaagttgtaatagataaaatcccgatcaaaataattccaataatgaacgaatccgtcaaattcccctggtacattgaaaaaacgagtggggggattgcaaaaagaataaatataacagaagatgtaataaaaagttttttactcatttagttaactccttcactcaaagttcttataaaataatcttctagactattatcttcatttgtaacagctgtaacgtcaatattggattgtaaaacttcaccattattgatgaatatcaaactttcgcagaaattttgagcaacctccagttggtgagtagacaatactatggaattaccttcattaacataattccttagtattgtttttgttttcttcatattaatgggatcaatacctgagatgaattcatctaataatagtaacctagggttatttaacaatgtagttaataacgttagttttttcttgttgcctaatgataaattctttatttttttcccaacttcgttttgcaaatcaaaatacttcactttttctccgataatggctttattaactcgaattttaaatagttctgccgtaaaacgaatgtattcttccccagttaactcgtcatacagaaaaggataatcaggaataaacataacatcttttttggacttatcgatcggcttccccagaaaatgaacttcccctgaatcaatatccattagacctgatgcaatttttaaagaagtcgtttttccagcaccgttttgtcctaagaacgctataattttgccggtaggaatgttgaaggtcatatctttcaatatttttttattcccaattgtttttgaaacttgattaaaggataataacggttccataaatcaacctccttacaaagatagttgctcaatttttgatagttttctcaacttattccgtgcaaataacataaataatattagtgaaaagaataaaaggatagcttctccccattgaattgccaataaagtggaaagattgatatagtctgttaagtaaaatgctgtaggaatcatacaagctggaataaataccccaacgattaaatatctaacaattccctgtattgaattttgatcaggatagtcttccaattgttcaatattaatgtagttgaaatgtggactaataattgatggcaaaaataacaaagctgataagaacaaaaaggagaaacagtgaataacgacaatgactgcagcctctactaactttattttagagaataggatcagtgttatatctgccactattaataaaggataggtatagataataaataataaatatttatatttgaatacttcccataccgtttttccagctaataaatgaataatgacgtttttcccttcactatcgactgaaaaaaaccctgttagttcactatagattgaagcaatatgaaaatagacaaagaagaataaataaaaagataaaataaaataatagattttctctccaggattcaaacctgtcataaaactcaccattaaaccgagttgaaaccaaaaaagaaacgatccagttaacacagggaaccgatataagaaatagtctcctcttaacagatgctttacctgcatgcgagtataatttgacttcccaaaaactttagatggaattagtttttcaatgatagtaaagggataaaaattctctgatcggtttttggatttaaattgcgtaataataaacatgaaagcaaataaaacaatacaagctgaaagcaacatgaccccatcgaaaatgcgaacttcatcaaataataatgatgccaaaaaattatgagggaaaattgggtatttaaaaatgacagttaacggtgtgagcaagtctttgaccacttcggctccctggctaagccagtcgttatacttagctacatcaacatcattcgacgtaagtggaaaagatttaatccagggagttagtatttttcctccaaaaaaagctagcgccactatcaccattcttatcaacagattaaagaacaaacggaagtaaaaatgaagtctggttctttgagaactcaagtaatgataatgcagaactgaagtgactaaaccaatactaataaataaaaacagagtcaaaatgacgatacccactactccgaacatgttcatatctgttaacaatgaaagagctataataatcggcacataactgaaaacgtaatctttaacatcccacacaatagcctctaagtataaaaatagtctagcagtttgagactttactttcgcatgaatctccaaccattcgtgatcaatcgaatgtaattgccacttagaagaactaattcccgaaagtaccgaaaataggaaaattataaaaaataacaatgaccacaagacttcaatatgtgtgtttaagtaagaaattgcctggcttaaagtagttaaaataatactatttgaagaagtattatcaagaaggtattgattgaatacagttgcctttaataagaaataggttccaaacaatatcatgaaaaagttaactatacttagtaaaagtgctgctatccaaaaccattttccaccggggatttttttaaaaaaggttatatagttccattgcactttccatctgatcattagtttccatttaatccatgaaatgaccatttcacaccgccctctatcttgtaatgcaatatatacgagtataaaagttgattaaaccttactctatgtaaacttaaatcaaagatacctttatatctagggtctagaagtattaaggccattttcatgtaaattaaggggtttttacgtcataaatagagaatacaaaaaagcgattacaagctactgttggataatttttgaatacgtgttatctttgtatcataaaataggtaggaaaataggagtacggatatggattattttttcaagatatttgggatttttatggaatttttcgctattttatttttctgtacagctttcttaagtattgatattaaaaaaatatatagaaatgaatttctggctatatggtttctgggaagtatagcggtttttttgttccaaacttttatcacagtacctccatacataaatttcagtatatctttgggtattttgcttttacttatttcaacccttatgaaagtaagattgttaatatctctcgctatagtcgttcttagttcgtgtctatttatcttcttcgagtttgtgtcactttctattctcgataatttttttgacgtctatttaattttagagcagacttccctagcccgtgttttaatttctttgccacatatatgtgctctggtattaatctccatgcttttttatgtgttcagaatatcttttattccatggaagatcattcactctgaaaaactagataagcataataaaaaacactttcataaatatattactttcttgttcattaatttagctttcatcattattatggttttcacagtttcatatagtgaattttatttaggaattgaaagcaaaggagcatttttcgttatcattttgtgcactacgtatctactgtttttttctcagcaactattaaaagaagaaacaaaacgcttagagcaccatctcgacgaacaatatcaagaggatgtcaccaaatatttccgacttataaaatctcaacgacacgattttgtacaccatttaaacactctctatggtcttatactccaagacaatacacaagcaactagagaatacatttccgaattaattgaggatgtcagaaccacaaatgaatcactccctttatctcatcctgcgatgtcagctttattgttaactttaaaacaaaaagcttctatgaggggaattgatatggccattattattaactcccccttcgaatcactgccttgccgcgtttcagaaataagcagggttattggaaatctaattgataatgctattgaggaactaactccacttcctcaagaagaaaaatggattgaagtcatattagatgcagatggaacagattacaccatcttaatatcgaattgcggagaaattgaagaaagtatctctcaaagtatttttgattataattttacgacaaaagagggagatcaccaaggactaggtttacctgaaacaaaaaggattgtagaaagctataacggtttaatctatcttgaaatagatgagggatatactagttttattgtatctctcccaatagcaacttaatgatgaaggaggaagtaaattgaataagtttaacgtattgatcgtagatgatgaaccgaattgtaattacatacttaaaagtcacttaaacaactacacagatatagaaaacatttatgaatttacagatagcagagctgcttttagctacttagaagaaaatccagttgatttagtctttttagacattgacatgcctaatatgaacgggctcacgttaacgaaagagttaaaaaacaagtctcctgagatttcagtggtttttgttactgggcatacagattatgcattatatggatatgagctgtatcctttagacttcttaataaagcctattaaccctttacgcttagaacaatgcttaacacatttcagaaaaatacacactaatccaaaagtaagtggttctgtagaaagaaatacatctggaaaaaaaatcagcgttcgaagttcaggttctatttgctttatcaatgttaaggatataaatttcatcgaaaaaagaattcgaaaatgtgtgatcaatacgggggataataaagaaattgaatgcaatcacaccttgagtgaacttgaaaaaatgcttggcaggcatggtttcattcgccctcatcaatcgtttttgatacctttagataaaattagtgaaataaaacctgatgaatttatgaaatcctatgtaattgagatcgaaaatgttaaagacgaaattagagtaagtaaaaatcgttataaagaattgaaggaaatcattttagaaacgctataattatactcttaaataataaacttcaatttcttaaataggtcgaaattatgtataagtgatccgtattgttgtctaagtatgtaatattttaactttttataccatttaaatacaaaattaactagagatttatgctactatatacctgagattaaacaggaggttggtatgagtgcttttagtcctaaattaatagccaccaaattttcagaaagagcaattctgtttagtaatattgatccacgtgagaaagatcgaattcgctatggtttggaatggggcatatctggcttttatcaaattgctcttactctactgataggatattcggttggattatttattgaaactcttttagttttaactacaatctcatctttaagactttttgcaggtggagctcatttttctaactttaactattgtttaatagctagtgtaagcttgattattggaattgcattctcaggcccttttctacttcatattttttctaatgtaaatacgctcttacttattacatatccaattttgctggcttttctttggaactatgctccagttctatttaaaaaacgtaataaaaaatccaatcgtgaaattcaacaagcgaaacacatctcaatcaccatctcagttgcttttatgttcctaagtttttgcttacccgatatatacgctttagcgatatatactgctttattttttcaggtattcactattaccccttttggcattaaaataattcattttatcgattctaaattaacaaaaaggagataggatcatgtttaaaatcaaaagtagcttttatgcttcagtagccacactaggactagttttagcaaacatcactgcaggaacaacatgctttttggggttatacgaacctgaccttccagatgaggattaagctaattgccttaaatacttaatataaaatcctgattccttttaggggaatcaggattttatattaaagtttagttctattgtgttaattaatcttaaggtaaagtaatacgagagcgttagaagtctcagtgaactagcttcttcatttagttttcaaactctgtaaggattcatataatttaatggcattacgagaatcctctctgtaattcccctaccccatctgcgccaaccgctcataaacctcacgcaaattcgaaaaccccatctcctggattttcttcaaataataacaccaaagctcggctgtcatctttgcgtctccaagagcatgatgacgatcgttcacctcaattccacaattcgtacagcactcctctaattgaaacccttttaattctggatcagcaattctgatcagaaaagaagtatccacaatgcgatggtcgaagttagcacgcatcaaactccaggtggcatgctgcatgaaggcctgttcatgcttggcgtgatgggctactaacgtgtgcccttttataaatttataaaattgagccaacacttctgagaggggtggagcgtcctccaaatcttctgctttaattccggtcagttctgtcacctcttcagaaggggctgtattagattgaaccagggaataaaatgtttcctgttcaatcgtttcaccagtaacttttactgctccaattgatagaattgcatctcctttattcggataaaaaccggttgtttccaaatcaaacacgaccactcgtaatcgattcaaaggcacttccaacgtgttcttcattttaatttctttctgcatttgcctcagcatggaaatatggtgagggttggattggtcttgaatcgaggcgtacatgctcgtattcactttgccagaaagctgctttaaatattcaaccatttgattcatcttcatttagaaacacccttttcgaagtactttgtggtgtcgttgtaaagctcaatgccttgtttcatcatatcctttagctctttcttctgttctttaggaagggcatcaatcttcacataatgaacggcttcataattttcttttcctccatacgtaagccggaactgtagaagtttcccgaattcctcttcataatgcttacgagctgagcgaccaatcgtattgtctgataaagcaccaagcctcgataacgtagacgtgttcattactctctccttcaacgcaagaagccttactgcattgacataagggaataaagccgtctgttttaaattgatctctcccatgtgcgaaccgtgcgtttctacaagaatttggccaaatacaccgattcccttttgcaagcgcatcgtgttttttaacattctttttaataagtatggcgactcttcgattttcaggtgaatcaattcttttaactcttcaataaacggatcatgtcctaccaacactctcgcatcaataaaaatcaataagtgacggatcgcttcaaaactttcttcctctatccaattttccagctgcattttccactcttcaacagatttacaccacagtggattggacgccatcacattcccatcacagtattcatatccaaccgcatgcaggccatccgaaatttcttttccaagcttaagaaaataattctgcgcctcatcgctcgtcatctcataaacaatcccatgatcctgatcactccataacgcttgttcaaaccgcccgccacttcccattaaaaaaaatgaaaaaggagagggaggtggcccccactcttttttcactttctcgattgcaagatgaacgacttgagtcatcagctgatcatggaattgattcagttcaatatggtctgtagccacatgcttgatttgttgttctctcatgtttcttagatcttcatacttgtcgaaaccatcttccatactgacagcccctttgcttctcaattaaccggatattgagctttttccaccttgttgtcctgactgttcgttcgtatgcaagaactctggatagccatagctaccgtgctcactgagatcaagaccaataatttcttcttcttctgtaacacgtaaaccgttaagcactttcttaatgatgacgagaaggataaacgagaccacaaaggcataggcaccacttgccccaacaccaagcgcttgaacgcctagctgaccgaaaccgccaccgtagaaaagtcctggttgaccaactgttgcgagttctggtgttgcaaacaacccggttgataacgttccccaaacccctgctacaccgtgaacagatagagcaaaaatcggatcgtcgactttccgtttttcaaagaatctcatgctgtagaatacgataaacccagcaactaaaccaattacaaccgctccccacgtgtctacgaatgcacaggatgctgtaatggcaactaatcctgctaacgcaccgttcaacatcgttggcacatctgcttttccagttacggcccatgccacaaccaacgcggctacggctccagcacctgctgctaagtttgtattcatggcaacaaatccaaagaatgcagcgtcagcggataacgtactacctccattaaatccgaaccaaccgacccataaaacgagcacaccaagtgccgtaaatacttggttatgtccggcaatgttgttaggagaaccatctttgttgtattttccaattcgtggttttaaaagaatcgttgcggcgaaagcgcccattgcacctgttaagtgaacaaccgttgaaccagcaaagtcctgcttcccgtgctcagctaaccagccgccgccccaaatccagtgagcaattactggataaacgagaactgaaaataaaaccgcaaaaagtatataagctgttagctttgcacgctcggcaaagcctccaaacgcaatggttaaagatatccctgcgaacgctagctggaataaaaagaaaactggcgccgaaagccctaatccctcaatttcataacctgaatagaaaaagtccgttaaaccaaagaacgcatttccttcaccgaaaatcaacccgtatccaactgcccaaaacaccaatgaggcaatcccaaacgtgaagatcgtcttaccagcaatatggccagcatttttcattcgcgttgatcctgcttcaagtaaaatgaagccacctagcatcaaaataacaagtaatgctgaaaccatcacccaaagactattcaccagaaacatcgaatccattccaacttcccctttcttttttcagaaccccaaaaggaattttttgaaaatgttaatttatctgacatttattattataagtatttttgcatgaacaaaaatcgtcttcaacaatcatgttacattatctctctgactatatatgatgagtagtcagaaatgaggaagaagtgtttcttgttagcttaatcaaacgtttgtttaagaatgatctggagctgccagacaataaataaacccagttaaacgaataaaatgttcgtttaactgggtattcattagctttatctcgaaatgcactttacatcgattacgcaaactctccctgctgactcatcaccttttcccctttcacccacgtttcaagaacttcaatctcctttaattgttcaggctgaacttctcctgggtgagcagataagaaaacaaaatcagctgtatggccttcttcaagtttgcccttcgtcttttcctgaaactctagttctgctcctgtcgcggtatacgcatggtaaatttcgtcaaccgaaaggcgctcatctggaatccatcccccttccggcttcccgtccccatcctgccgtgtaacagctgcataaatgtgtataagcggtgacagagggccaattgggcaatcggagctaccagtaaacggaatgcccatcttgcttactgttttccatggattgcaatacttttcttgttcgttccctacccaatcagccgtttgatcatattcattcatcataaagcccggctgaatttcaagataaggtttgattttctttaatcgctccaataagtccggtgcaagaatttgggcatggataatccgatggcgcattttacctgcccctaccttttcaatggcattgatcgcctgttcaaccgttcggtctccaatcgcatgcatcgtcacctgcatgttgttgtcatctgccgtcttcaccatttcatcaagctcttcctgcgaataaattaatgtaccacttgtttctggctgatcatgataagcctgtcttaacgctgccgtatgcaggcgctgagtcccatctagaaaaattttaaaagcgcccattcgaacacgatcggagccgtcgcccgttcgtcgctcatagtgattcaagtaatccttcatgttatcaagattgtaaacgtaatgatgaaggtgaacctgaacgggtaggtctccttctttttctaattttcgatagctgttccatacgcgatcaaacgacccggtataattcaaatcatctgtatgaatcgatgtaatcccatgcttgagtaaatgaggaacggcatcacgaatggcttcatacacttcatcttctgttttctgtctgaaatgaaatttaataaaatgaacggcagagtctttaaatcgacctgtccattttccactttcatctttttcgataaatgtgtcatgattcttctcaagatcatcgtgttccttaataatctctagggcgacatcattcacgatgcattcatggccatcgtcatgaagaaaaaacattggcttgtcatattccaattcatcaaggtcctgagcggttaagagatgatcgatatcggtaaactgactatcaattaatcccctgccaatcacccactcgttttcttccatttcctcttctgtgtaacgatctcgtacaattcccttcatctcttcccacgtcgtcactttacgtagatccagttccttcttcattaaaccgtaacgaagcaaatgcaagtgcgtatcattaaaagaaggcgcaatggttttaccattcccatccacaatgtcgctgtcatcaccttcatacgttccttctccaacataagaaattttcccgtcatcaattataagatgacctttttcaatggtttcctttccaggttgatagattttcacattgttaatgacagacattctttcactccttaatcttggaattctattaattatctaccccttgctagagaaattattcgctgagattcgtggggggattcgggggatgcggggggacggttctcatgattctatcttaaaataaaaataataaccataagagtataaattacaaagatggtgcttataattccatataaaaaagcaggagaactaattcattttatgatctagttctcctgcttctctttattgtcaacgaatgaatcaggagaaccgtcccacttgattcataagatgcgtgaataatgtttaacctcttttagaaacggataccaggaaagtagcaaatgtaaaattattctaaatattaattgtgaggagggaaagaattggaacatgtaaaagcattgtttataaaaggagtagtaacgattgtcctgctttttctagtattgggaattggttatgacgtatcgatcatcggagtattaggtttaagtattgtgctcggcgcattgtcttatgtggcaggagatttatttatcctccccaagtacgggaatctcatggcaactttcggagattttgtgttaacttttctggttgtgtgggcaggcttacagctaatctcatttgacggctccgcagtaatagcttctcttatttccgccgcatttatagcggtagctgagtacggatttcacctttatttatccacgcatgttcttcctgcgaataaccgcatacggacgaagatggaaggagtcgagaaatcctaaaggcatgtagcttctcatgacaacctgtacggttagacgccgctgggtagaaatgaaacaaggaaaaagccaatccatcagagcatgatttcatcgagctctgttgattggctttttaacactaattttacttcatcgctacctgcattatctttttttgataggttattgagctaaacctctaagcaaaaaagaagcacggctggatgtcagccgtgcttctttcctatttctttcattctcgtttacgatacttttacccagtgggctgcttcgttacttgaaggagaaggtgggaactgttctccttgctctactttgatttctgaattgtcacttccggaagagctgccgttgacaagacgatctactttgtaagtaccgttttcttctgctttttcaccagttttgtaagtctttttattagccatcttaatcaacctccaaaaatgaatttagaaagacttcaactttctatagtaagcatgttgccgaaatttatcactcctaaacgaaaaagatagaaaatggtaaaaatgtatccctgctaatactaaaagcgtgctcaatgaatcgtcgggacggttctactgattcacttgattacacataacataaccccaggaggctaatgattagaatcctggggtttctttaaatctttaaatgaagtcatgataaaagagtgttctttatctaaagttaattaaacttcgaaatgaatcatgagaattgtcccgccaattctataaagtccttttcctacaaaacttgtttgatgcttcccttcttcagtgatctgggaactggccccagattcactaaactttctacaattactgaagcgttactgtatcgtttctatgctaacaccgtgatttcccttggggcggaaatactgtctcctcaattattacaaactcttactcataatttgtagtagttataaaatcaaaagctccagctgaagtaatttcattgttatattcaaaattatatataagaattactgcattataagatttcctcaaatttatatttcccctgagtttcggaacaataatttcttcatatgaacacccatttaacaaagtagagatatcactactgctttttttatagcttactttttctatggtatcctcaactgtttcatccatatcaatattaaagtcaataaaaaactgggaagggacggattcaccatcctcatcataagttaaatccacataatctcctactgagtgattttcttcaatattacctaaccaaactgaaacccatccctgatttcccattatattatcctccttctcctagtttaatctaagaccttttggtaaagccataaccccaccttcaagcctgtaattagcctgtgggacctggaacctgtccctttgtcccccgatttgaagggttctactagtatatttgaaaatttaaaacaccaggtgaccaatttaatagtttggttcacctggtgttttatagattttcacttgtctcaaacagtccccaaaagttctaaaaagtcattttcctacaatccttgttggatgttttcctccctcagtgggactaggaactaccctctagttcccctaattatatctttctaccttttcacatcaaaaatcttcttcccaaacttcttttgcatccaataacctttgtaataaaaattcataaaaattttctgcagtgttaaagtcatctagtcctccttgcttattccaagctaccaccgggcattcattgttctccatcttgcttgtatctaagcaataagcaaattcatctacatcctcaataactactaaattatcattcaatcctaaatctctataactttctgtttcaataaccacagtagaaatattagacttggctacccccaaaatatctataccatataaaccaccggaaccataatcatttaagaaccacttataactttctggaaattttaattttagactatcttgaacattttcaatttgtttaatatctattcctccagtaaaatcatctggttcagcattgctattaataaaattaattaatttatctctattcattcaatattcctccctctataattcacctaaatctatttctttagctctccatctccaatttttcaatctaaagttgctgtattgttttttcaaaacaggatcatttctaaaactacccccattttccactaaaccatgcaatattctatcgtattctttatgcatactactaggaagctccaccattgccccaggctctctttggattaggtgatgaagttctattttagtcccatctttccaaatgggaggtcttccccttttcattaattgaaggtttgtcttgccagttttaggatcgactctctcgtaatcaatatctattttgatttttaatcttttcaatttcagccagtaagtctaacaacttatcttcacctctatttttttgggggatatacaatacctctggcaatggccatttaatagagacaaggggacaggtattattagtggaagatcaatcgagagatgaatctgaaaaaccgtccccacgattccaggaattagcgggacgagcctactgattttgtataaaacataaaaaccagttgagcgaagcattagtaagatgcgctcaactggttttcattaacgctttttattcttaaaatcggtattaaaaaaaaacggaaatgtttatattgcgacatcttgataaccaacttctgttactttctcatttaataagcgaagtcctagtccgttttctgtatcccaggtgcaattaaataaaaccccaatatgtcgttcctcaaaaatatcttcatatggaactacaattccatctaaacttatcatttcgagtatttgatcagtagtctcagctactggataattttcatttaattcagtatcaaagcctaattcaatccgtttttgcgcgtaataagttaaaatagaattcaataaatcccgttgtaaatcgttccaatttttcattaatgattggtaggctatatattgaccttcatcaaactgaccatcttccccaccatcgatcattagatctatctcgatttcatttccaaagaaatctatagtcataactcttgaccatccaaattcacactcaagttcacccaaaattgcatcttttataatcattcaaaacttctccctttgtttattggcaaatcctccatgcccaaaagctcctgcatttatctcaccaacaccaccgaggtgtccaaattagaatcaacttgacggttctactgattcacttggttacacataacaaaaacccaggaggctaatgattaggatcctggggtttctttaaatctttaaatgaagtcatgataaaagagtgttctttatataaagttaattaaacttcgaaatgaatcatgagaaccgtcccgctaatcctaaaaagtccttttcctacaaaacttgtttgatgtttcccttcttcaatggatctgggaactgtccccagatccactgaactttctacaattactgaagcgttactgtatcgtttcttgctaacaccgtgatttcccttggggcggaaatactgtctccttgtccaaccaatcgcaaatctacttaaagtgaagcatgaagtcatcgtgattccattcgtcaacatttattacaaatattcttactcataatttgtagtagttataaaatcaaaagctccagctgaagtaatttcattgttatattcaaaattatatatgagaattactgcattatatgattttcccaaatttatatttcccatgagtttcggaataataatttcttcatatgaacacccatttaacaaagtagagatatcactactgctttttttatagcttactttttctatagtattctcatctgtttcatccatatcaatattaaagtcaataaaaaactgggagggaacggattcaccatcctcatcataagttaaatccacataatttcctacggagtgattttcttcaatattacctaaccaaactgaaacccatccctgattttccattatattctcctcctagtttaatcgaagacattttggtaaagccataaccccaccttcaagtctgtaattagcccaattattaagtcgtctaacaaatgtattataatcgttggaagtagctattagcccttgaaactaagtgccattgctatacgtttttcgtcactaactacttccctcttcccaacactaaaatgaaccgtttccctattagaggcagtgggacaggtaccttatccctgaaaaaatctaaaaaaacaacacttcatgtatagaagcattactgtacataattatattaaaaccgcgattcacggtgagacgggaaacctgtccctatgtcctctgttattttttttatctttattcgttcttaagaagataaaagattcacccgtcgcataatgagtcttctagttcattttaaaatacaaaaaacagttgaactatactttacattagttcaactggttcttttttggaacagtgggacaggtaccttgttccagcaaatatttaattaaacagacatgatctgatcataaactttctactatgacgaaagatatctctatcgtttctatactatccctctagtacgtagaatctgtccctttttctctccacatactctccttataatacacttttcaaagcttcggttatcatttcttcaaaactactatattcttctactatatctccactgggtttatctagctccagaaatgtgtgtttatctatatctaaacaataccacgaaatatttgaatcaccgaaaaataaataattaccttcccaatcattttcttgccaaatttcattcgctccaataaaaccgttatttttgtcgtactgattggcattatagataaccaaaccattaaactctaaaccgtttacttttttcaaaaaattctcatattcatttatctctggatttataattgagttgcttgaaatccattcttttatttctttgatattttcatcgttagtcgatgacattattgactttccatcttgatttttaatcttttcaatttcatctattaaatctaaaagcattatttcacctctatttttttgttgtggggtatacaataccttctggcaatggccatttaataataactgaatctcctacttttaaaccttttgttaaattcttttgtgaatttgtaagaactttatgatgtgggtcgttttcaattagtattaaattgcaaaaatcattatttcctccatcgtctaaaggtagtttatgatgaacctggtacccatcaggcacaagtccattttgcaaattgttaatatctgtcttggttaaacctgcttcagataattgtttcattttcttttcgtctcgtactaaatcttgtaaaaaattttttctgacagaactattaaatttatttcttaattgcttgaactcttctcgattacgtttagtataagttatttccttttcaattatattctttagtaaaacttcttttccttttaatatcccaacgtgttcagtctcctcaacattagtacttccaatcctttttctattactaaaatgcaacgtttccttagcattcttccccatatctcccacattagtaacatcaccaaaccctgcaaaagcataatccgtccgtaacggaaccttataatcaagaaccttccgcacaatctctttcatatccaatcgcgtattaatcagcggaccctgcaccactttttggtaagtctctttcatgactttccttgtaccgtcagggtgaacggtatgcttgatactgttcatcttagctgtgccgcttttaggtacactcaccttcgccccagcaaccatcgaagccagcccaaaactactcacccaatgctctttcgaaaaatcatcttctggattcaccgcgcctttcaccagatcggctccaccactcgtcaaatagttcacaaaatcatacggtgaatccatagctttatcagatcgttcgtccattgcactaacagcacctcttaccccatcgaacaatcctgaggtgagataattcccaaagtcgtagagagaatccattttcttttcgccacgctcttgatatccagcccaaaaatcagtaccaatctctttaaaactattaaccgattcaataaaaggattctcattttcctccacagtcgattcaacttcctgaaaagtttgctctttcttcacgctagccgcttccgcttggctcgcagcaatcgccgagtaaatatcactcgaatgaaaagaggacgcatcgtaatagattgaggaaacttgatacccctgagttgatgcattcattagttcactgaacagagcggttagaacttgttcatcactttccaacatcgtgtatttactcgttaactcttcatcaaattgttcaacgctctcgatcgtcttttctcgtttcacctttgcttcatcaagttgttgatcgacttcatttcgcgagaaaacttgtaatggttgaatgtcgctgatgcgagcgaaaatccgttgcagatcttcctgctgctctgcaatcatttctctcgctctactttcgctattcgatagctcatcttctaaaaaaggaagctcaacggtttcgttttcaagatttcttgacgccgccccttctggaaccccattataaaaagcgatatttcgatcaacgagctgaagccatagacttaacacatcaagctgagcctgataaaagcctttcatcgcatccgcacctttgcctttaagtgcttcatcaagttcaacgatactttgaaaagccttttgaagagtgatcaactgttctcgtagcgtctcgtattccctttttcttgtcgacatagtatctaataaggttgaagcttcatagactttcacttataacgactaccccttctttatgatcttgtgatcgcttcatcctgctctttaagtgaatccacattggctttcgtatcctctaggtttttttgtacaaccgtaatataatccttcaataaacgttggaggttttgttcacgattgatccaggcatctgtatagttcattttgttacggccaagttgacctgttgaaggttctggtaacgttagatgttgaacggcatttttcgcttcttccaatttcgtgatcacttctgaataattaagtttaatctccgtagaagatcctccgcctgaaacggctttatacatcagaaaatcctccctttaatatgattgattttcgctgttacgtcctctgcataatcttcacctttatgtaacaaagattctgcttcatgtgcgagactccctagaaagctaaagtgactttgctgtgcttcaagagagtgaatacgtgaatcgataaccctttggtacaaatcgtactgttcattccctatctgaactatggattgataggaagcctctcgatcagcatcatatttatcagaaagtggtcctacccattgatctgataaatcaggtcgtcgcaaattccgaatttccccgagcaacaaattttgctcacgattaatttcagctttcgcttctcgtaaacgacgtatttgatcagctatttcactcgcttttccatttatcagtccttgaagactacttaactcgccataaatccccatgacttcacctcaattacctcatatgaaaacaatactccaagatctatcttaccatttacccacttcaatttatttccaatccttattttctaaataaaatgagtataaagtctgaatactactttcaaaaaatcgtacttaaacgaattgtagaaccggccctcattttaaattcaataattacttgaattttcagataaaatagtattacaatgatggagaacatactaaccggtcggttttctcgaaatttagtacctcattattaaaggaggggattagatgtcatggcaaaaagaagttgatgaattacgaagaagagaacagttggcaaaagctttaggaggggaagagcgaattgcaaagcatcattcacaagggaaatacacagtcagagaacgcatcgatcgcttattagatgcaggtagctttcatgaattagggactttagctggtaaagctacatacaaagatgggcagctatctgattttagacctggtaacttcttgtttggaacaggtagaataaacggtcaaaaggttgttatcggtgcagacgacttcactgtacggggcggtgctgctgatggagccatactaggaaaacaggagtattccgaaaaaatggcgcatgaattacagcttccactcattcgacttgtagatggaacgggcggtggaggaagtgtaaagatgcttgatgataccggttatccttatgtgcccgtaaatccagcctgggattatgttgtaaaaaatatggctacaatcccggttgtcgctgcttgtcttggttctgtagcggggttaggtgcagcaagagtagctacctcccacttctcagtaatggtagaagaaacgtctcaattgtttgtagctggcccaccaattgtaaagccgggacttggagaagatgttacgaaagaagaacttggaggtgtacaagttcataagtcaagtggggcaattgataacattgcttcctctgaagaagatgcattccaacagattaaaaaatttcttaattatcttccgccaaatgtatggaaattacctcctgttaaagaaacgatcgatgatgcaaatcgaaaagaagaagcattgttatctgtaatcccaagaaatcgaaaaaaaccttataagataagagaaattcttcctatgatatttgatcatgagtccatctttgaaattggtcgcttctttggaggtggaacagtaactgggcttgctagattaaacggttatcctgttgggtttctagcctctgatccatttattggaggtggtgccttaacagcagaaagctgtgaaaaaattgagcgctttgtcgatctgtgccaaacatttcatctaccaatcgttaatctagtagatcaacctggaatgtcgattggccttcactcagaaaagaaaggaacaatacgcaaaggtgttcgagcaatttcagccatttatcaaacgaacgtccccatgattgaaattattcttagaagagtctttggtgtaggcggtgcagggatgacgaatgggcatggtctaaacaaacgatatgcctggccttctggtgactggggttctttgccaatagaaggtgggatacaagtggcgtaccgtcgcgagctttctgcaagcaataatccaaaagccttaatggataccttactagagaaaatggaaaggatgcgatctccttttctcacagctgaagcatttggaatagaagaaattattgacccgcgtgacacacgtcccctgttatgtgagtgggtagaagatgcctacgagttattaccacaacagattggatactcttatcactcaatgaggccatagtgattcaccgttcaataatatagtttggggtgagaatatgattagaacaacagatcacttctcaagcacgcttcatactgatcaagaaatcgtgacaaggcaactcgaacgctgggcagacgagattggtgacaacatttattttcactatggagagaacgacaaaagctactcatataaaaagttcaatgaaatgactaactcgattgcacactatttgacttcctctggaattaaaaaaggtgatcgaatatcggtttttctaaaaaatccgcttgttacaacacttgctatgtttgggatttggaaggctggcgccatatactgtccgattaactttaactataaaggaaagcttctgacctatcagcttaacgacactaagccagcactcctaattactgaaaaaagaatgctgcctattattaacgaaattaatcaaaaagtaaccattccttcactcattgttcattctccaaaaaagcaagaccacgattacaatagcgaggttagtaattatttatttgaataccctgcaaaagaaatacctttcgatgatcttcttcgaggtaatacagaaaatgttatgatacctgttcattactctgacaccgcgaatatcatttacacttctggaaccacaggtcctgcaaaaggtgtcgtacagtcctatcgctggatgaatgcctacacacatacctttagactctttaataatcaacacgatattgtttataatgatttgccactctatcatgttggcggtgcatttgcacttgtagcacgagcagctttcgtaggttgtaaggttgccgtctgggataaatttagtcctaatgatttttggaagcgcatacatctttccggagcttctaatgcaatcttattagatgtcatgattccctggttaatgaaggcacaagaaaaaccggatgattacaaaaaccctttaaacaaagtatacatgcagcctcttccagattatcatcataaagttgctaaacgttttgggtttgatttcgtttttgcgggatatggtcaaaccgaatctggcaatggttttgtatcaataattgaagaattggaagaaggtaaaggaacacctcataacctttacaagggctatacccacaagcagataaaagaaattgcaaataacgtaaagattacaataagacaaggttcaacaaaacttagaaaaggacatatgggtgccccctctccttttattgaagcagctattctaaatgagaatgataaagagtgtgccgctggagaagttggtgaacttgcttttagagctaaatatccttctcttatcctgaatgagtattttaataaacccgatgctactaaaaaagtatttcaaaatggatggttccacactggggatgctgcctataaagatgatgagagtgattattattttgttgaccgtcttggcgatgtgattagacaccgtggtgaaaatatatcttcctatcagatcgaagatgccattaacagtcatatgtctgtccaagtatctgccgtcttccctattcccgcactagaaggtgatgaggatgatatcgccgcctatatcgtgttaaaagcagatgaaattgaaacaactgaatcgattattgaattccttaatagggaaataccaaagtttatgctaccaaattatgttcgttttatagaagacctcccacgaacacccacgaataaaattgaaaaattcaaattgaaaaaattactttctgaggagctttcttgtgattcgtagcaggcaaaatggttctgttctaaaccgcgtttattattttgaaattgataaaaacaaaggaggatatttgattgttatccctactttatcaaaaatgggaagcctatgcttcccttcctcagagcaaagcggaatctattgtgaaagagattctagaacaagaaaaaactgtataccaaaggactaaaaaacctcctatttatatgtatgatgctgaaaaagaacaggttatttttaaaacagatgagctggaaattgccttgatttatgtatctgcagaccctcttacccgtatgttttcaaccattataggaacaaaaaaccattttgatggaatcacttacttatcaatcaattatgaacaaagcggccaactggctctcaagacttttttaactaaatttaacatgaaaatttcgcatgaaccctggaaaatcactacctacccacgttttcagtttgctttccttttacaacatattaataaaagaaaatggatgaaagccatttattcttaatgaacaaaaaggaggaattcccatgtctaatcaatggtttcatttacctcgtcgggatggcttgtttttacttggattggtgctatataccattattttcttcttaccgtggagttatgaaattaaaattctaaatgttacgcttcttgcctggggcgcatatttgttacacattcttgcacctgctacagctatttggttaattctcacatcaagaagtcaatcggttaaaattaatcagtcgaaaagcttaaataacgattaaggaaagggggaaataaaatgaaaactgttgaactctcaataatgatactttacctggtcttcctagtagtattaggattaattacacagaaacgaattcaaacaggctcaggaatagacgactattatgtggcagggcgaaaaattggtacaggggtgaattcattagccatgatggctgcgctagggagcggtggttcattcatggcaggtccaggaacaatctggagcctcggctttcctttcctggcatggatgacagtgggttccatcgtgggtttctctgtcgctagtgtactcgttgcaaaacccctacgcaattcaagaaaatttactgtttcagaatttctggttgagcgttacggagggagtttctttaaaatagccattcctattgtcattattattggatcagctatgtacttaatgtcacaaatgaccgcagggggactcattgcttcttacgtaactggcctttcctatgaatggggactagtgattattgtactagtatttatcttctacgtatctttaggtggaatgttagccgtaacctggacaaatattcttcagggcgctttgatgatttttctgattggttctatagtagttggcggtattctaaatcttcctattgaatgggcagatttctttctaaatgtcaccgaagttaaccctggaattggcgtcgcaggtgctacccttccaatagccgcatatattggagcatttttaacttgggcaacggctatttgcgtaacacctcacttagtcatgagaatatttactgcctcggatgctcgatctgcaaaactttcattaaatattagtatgctagtatacggactactaatgcttggcgcagttttcataatcgttccatttataccgactttgggcacatctgttcttggagatcagccttctgatatgtggatgcttcttgtagctgaccagtttttcgggccaatattcatgggcattattactgcaggaatattggcagcagtcatgtcttcaaccgacgctcttttgctagccgtgagcagtgcctttgcttacgatttgtacaaaggcgttttcaagcccgatgcaagccgaaaacaaatcctaaaaatatccatgctatttacatgggtagtggggattgcagtcatgctcctcagcttgaatcccccatcatttcttattgtactttatacagctgctgtaggctttatggttgcatcgatgtttgcccctcttatattaggtatctggtggaagcgttccacaaaaacaggggccattgcagggttgttaactggtgcaattagttttctattcttattcttctttcttgaaatgccttataactctgaaattcttctttctctccctttgtccttaacagccaccatgatcgtttcttatttaacgaaacattcttcaacagacgtgattacaaaaatggaaagttaccatctagattaagatcactttccattgtattatcataaaaaacgagaaaagcaggtgaacctatcacaaaatagatagctcgcctggttttctttttgtgtgaatcagcgggaatcgccgggacggttctcatgattcacgctctaaaaatcaaagtctgcgagacacccaatatcctcgccatctgccgttgcgataacccctttattcgttttagctttcttataactgggtctcttttctctttgggtaaactttttacctgtgcgagttccacttcacctatgctcctcttaatcaaaactctcgcttcgtcatcggtcaatctccttttttcatcgtcgccctctcctaaacagtgctcttcagtgatagattcattaaactctctaaagtgttcaatagctaagtgacgatcttgaccaaataggttcaggacaaaatcacaatctagccagctcgtttctgaacacccccgataataatgcgcacagctactccatggccaatcatttacacccttaatcatcctagctttaagtggattttgatgaatgtaccgaaccactgtaagaaggtattttaccgtctcaacattttcacttttaaaacgatcttcaaagagatgtccggttgtatgatatttaaaatgatagtattggacgaaacttatcgcgagtcgttttaatgtgagagagatttcttcatttccttcctttaagagaagatgaatatgattgttcatgaggcaccaggcatagcttttcatctcgtacagaagggcgtacttctccaaagtttcaagaaaccgaattcggtcatcgtcatcgtgaaaaatttcctggcgattggctcctctaaaaatgacatgatagatggatgttttgcttttttgtcttgcttgacgtggcatgtcaccctccctattctatttgtccagatacgggattttaaattgttttcatagcattccaataacggaaacgattgaatcagagttatgtggtggatgaaatggtgggttaatacaagaagcagcggggcgaaagctagtagataaatcgggtagagacgggagcataaattctatgaagggaactgaaagatttaaaatgcgttaggtcgtggctggttcttttagaaaacgttgtcagtgcgaggggcgaataggaagtaaaggaacttggatttgagttatcaagaaggaaaaattcaaatttccggagatgaaaataattgatccataagtcacaatcatctactgatttttccgttcatttatttattattcttctttctagtataatttcctttatccgtaatataaattttactgttctctcacgttctcccctcaacagaagacaaattcatcgctaattaatatttaatcaaacgtttgtttaacctatcaattgctttaatttaatagttaatatagactgcgtggctgcagattcttttactataaaagaaaaaacaggtgagcgactcgttaagacgaatagctcaccgtttttcttttgattcttatttctgatcattaactttaacttagcgaatcacgagaaccgtcccaacgatgccccgcgatgcccacgatgcgcgaacgattactgccaaacctcgcgtgaaatctccaacacgtgctgcaccttttcccattgttcctcttctgttagtaagtttccttcctctgtagaagcaaagccgcattgcggacttaaacaaagctgctttaaaggtacatagtctgaagcttctgcaattcgggctttgactctttctgcgtcttctaatttaccggatttcgaagtgatcaaacctagaacaatcgataggtctgaacgattgacatgacgaaggggttcaaatccaccagaacgctcatcatcaaattcaaggaaaagtccgtctacgtttaaatcaccgaaaattgtttctgaaatatcttcataactgccggaggtcataaaggtcgatttaaaattcccacgacaaatgtgcatagtaagaagaaggtcgtctggtctttttgctattgattcattgacggccttggcacataactttgccattttttctgggtccttacctttcgcttcaattgatgcccttccttcttcagaaaagaatgttgcccacgaagtatcgtcaatttgcaagtaacggcatccttcatcatatagtgcttggatcactccctggtaagcaacaaccaggtcttcaatcaatgcttcatcactttcatagacgccatcctcgattcccgctctgaagaaaagcatattcggacttgggatcgtgaacttagccacagtatctcctgccatcttcttaaggaacttaaaatgctcgatcatataatgatccttgcattcaactttacctgttactttaatcccacgggccttcgtctcaaccccttcgaattgaagacctttatcggtttgaaaaccttcaacgcccttcaatccttctaggaagtcaaaatgccaccagcttcttctaaaatctccgtccgtcactgcttcaagcccaaccgctttctgcttttcgactaacttcacgatttcttcgtcttccacctgtcgcaattcctgctccgaaatttccccttttgctttttgtaagcgtgcctgcttcaaacgttcaggtcgcaaaaagctcccaacatgatctcctttaaacggcgctcttacggctctttcttcaactattttcgtcaatgtaatcccttcttcctgtaaaatttcattgttttttactatgtagttatcaactacataaataaccctcttctaaataagaagagggttatttgtgtatgacaaacgtctcttcttatcttcaagtcaatgcttctggaattagcacagtactttaaaagtctgctgctaaggtttcatcgggccagtccctccacctttcttgataagaaagtcatctattaaattggtttgttagtttattagtatacatgagtcgcctaaggcaagcaacgggggaatcggggaatcgaggggacggttctcctgattcccttgctataaaataaagaacagacaggtgagctacgcatcaaaatgaatagatccctgttttttctttgactcttctataaaataacaatattaaagcctgccattaaagcgaacgaagtgaaccctaaaaccattttgctacgtttttttcctaaatttttttcgtccatttccaactccttatcgttctcattttggtataacgaaaaaaaacgagcctatagaattgctctttaggctcgtcctttatatgaagaaactttttatcttcaaaattcatattaaaaataaacgacttttcaccgttcgcaaactttagcttgctcccatacctccatcaactctatactgacttcctgtaatgaatttactctcgtctgaagcaagaaataaaacaagattagcgatatctttcgtttcaccataacgctgtaaaggaatcgcggcagtttgctgcttatgcacctcttccccttttcctgggttcatcccttcttcaagcgaagtcatcatacgtccttcgactggagaaggatggatagagtttacacgtacctgatttccagcagcctcaagcgcagctgtcttagttagtccgatgacaccgtgcttggatgtcacatatggtgatactcctggactacccatcaaaccagctactgaggatgtattgatgatacttccacttttctgttcagtcataacaggtagcacatgttttaatcctagaaaaacaccaatgacattgacagataagactttttcaaaatcctccactttctgttcagtaataggtgctacttttccctcgatacctgcattgttaaagaaaacatcaatttttccaaatcgatccatcgtttcttgaacataattctgtacttcagattcttttgaaacatctgcttgaacggatatgatctcaccaaaggattctaattgactccgcgtttgttgaagagcttcttcattaatatctacgagggtgacttttgccccttcttttagaaacaaacgcgcggcttctttaccaatttctccacttccaccagtaacaattgcgactttttcttgtaatcgtgccattagaacagcccctttattactatttctttctctattaacaattcctccctataatttggtttaaacgtaaatatttggaatgaactatctgatattctatatgttttgaattggaaatctatcttaaaaactgaagcgttgattgaaattgtggtaaataatccttatgagcttcaagtagttcatcaaggacgttttttgctgcatttgctgagtgaactataggatttgcagatagtgcttggagcgcagtattataatcacccgtgatggcagcttgaatggttaattgctcataggctttcactgcctggataagtccagaaatttttaagggcgcacttcctatacccagcggttttatattcttttttccgataaccgcattcgtttcaatgaccacatgatcaggtaagttagaaatggctccattatttctaacgttaacaggctggatatcctttcggtcattatgaatcgagtcaattagattgatcgcggcaacagaataatacgctccgcctctttgggaaagttgttctggtttctgatccaaactcggttggctgtagatattgaataattcttcatctaatttcttcacaatttctccacgtgttccttttaggctagcctgttctttttcaatttgaaacatttcatcggttaaataataatagcgatgataatcacatggtaccatgccaagtgatttcaaaaaggttggatcccattttgcaccgtggatgttcttcatacttggtgttgcatctgacattaattctagaactttatccgttacttcctctccattcaagtaaacggttttcccccaaacaagatgatttagcccgatataatcaatggatacttcttctggatccacatcaagtaaccttgcggaaaggaatttaagaccaattggtacattacatagcccaacagtcgaaatagaggtatgattaacaacggcctccgtaaccatcccgcttggatttgtaaaattcactaaccatgcattaggacaataagcttccatatccttgcatagatctagtgttacagggatcgttcttagcgcttttgcaaagcctcctggtccaacagtctcttgaccgattaagccatgtttcaatggtattttttcatcaactattcgagcatctagtcctcctgcacgaaattgactaagcacatagtgtgcgttcaaaagagctattttgcggtctgatgtatgttcaactttcacatctactttcgctcgcttgaacatccgctttgaaagctctaccattgttgttaatttatttatagcttcaggcaaatcaaagagcactaattctgtgacaggaaacgtcgcctgcttttttataagaccttctataatttcgggggtataactactccctccgccaatgatggcaacttttatcccgttcactttaaaccctcctttccactaattcttggatagcgctttctaattttctttgtttgttcaccatatcgagcatttcttcaattaaatctttctgagcaagtgcattcattaagtggtcttgcgcatgcacgagaagtaacgggatatcaccaagtcgattttttgcgtcattctgaattaactgggtttgaattttgtgtgctttcaataagctagttgtcgctgcttttaactggttttctgcttgctctgaatgacctgcttttgcacttcgtaacgcttcaaaagcttcagatttagcagtagaagcttcaagtattaattgcatacagctttgttcgatatccattactagcaaaacctcctgatcaacctgtagtcattacgaatttattgagtaatctgttgtttgcgttacgggagagaccgtttgctgttcttcttgatacaattttttatcccacattctgaagaatggataataaattcccattgcaatcaagatatttatacacattaagacagcgcctcgccaatctcctgtcgttaataagccagatattggagcaggtgtcgtccatggaacaatcaagtaaggacggcccactagtccaagtgacatggaagtatacgtaacgatggcaataatcattggtgtaatcataaatgggataataattaatgggttcatgacgaccggtgcaccgaagataaccggctcactaatgttaaaaaagctagaccatatggtcatcttcccaaggctcttaaggtgctttgatcgtgcacgccatataaatagaatcgtgagagccagtgccataccagatcctccaactgcaagccagatcgcaacgaactgctgactaatgatatttggaatctcttcccctgcaacctttgctgctgcattttgctctgccagactataccaaattggtgccatcacactcgctacaatggaatctccatgaataccagcagaccataacaactgaataagaaagaccgcgagcaacgttgcccataagcttcctccaagggcttgtagaggttctttcagtatcacaccaatgacatcatgaatagatagacctaatgtgacatcaagtagaaccccaactccccatacgataacgataatcgcaaatcctggaatcaaagcagaaaaggctctccacactgagggaggaacaccatctggcattttaatcacgatatctcttttgttaaaaaagcggaagatctctaccgtaagaatcgaaagtaatatcgctacaaaaagtccctgactccccattaatcctaatggaatattcccatcttcggtatgaggcgttaccatcaaaaaagacaccacgcttaataccccggatgagagggcatccatatcgtaacttttcgccaaattataggcgatagcaaaagccgctataagacccataattccaaaggtggcatcgactggaatcgttaatgttttaacgtatggttgcataaactcagcccactgaggaataggcggaaaggcgatgattaagaagatacttccgataataaagaggggcattgtggtaataatcccatcacgaatagcacgtaaatgtcgttgttccgccatcttccctgcgaaaggcatgaagtgattttccataaatagattaaatcgattcatttcatttccccctggcatatttattttttcgaatccaataatccctgagcttgggacagtaccttctctccgttaagggtgccataagccacggcatcaatcacatccagtggaatgccattcatttgttttaaaagagcctgctttttgtatctaatctgaggacccaacaagaccacatcggcggtctttcctatgttttcaaactcatcaatagaatgggcttcaatcgttatctgttgagatgattctttcgctgctgtcttcattctctccaccaataaactagtactcataccaagcgcacaaaacaagacaattttcatatttccaactcctatactcaattttattgactcattaaatcgatcacaattcgatttgaaaaagaaggggtattgtactgtatatctgactctttcaagtagaattgggctcgaaatgtttggtcttcagttaactcgtaatcgatttttgaaacaagtgggctatctggaatgatgattgattgatcgcctctttcagaaagcggttctcctatctcagaaaaaggaatggtgacaatcattttgtccccagatctctcaatctcatatttcgcattcttatttaaatcaaaaacaatccttgtgtactccttgttaacaccaaatcttatattgttcacttgattcgaagatatctcaaagcttctacttgctttactattttcataacttgccgttattgtaccgactcctgatttctgtgctttgaaaatcccgttatcgatagagcctagctccggattaacggaccattcgatttgggttggatcaacttcaatcctttcaccctttttgttaaatccaatcacctcgacttcttgagattgttggggagcaagctcaagatcatgaggaaggatacctagaatagcagatggtttataaggtttcgcttttttgggatagggtccgtagagtaaatagtgatttcttgtcccttctacccagctttccaattcatcctcccagagctccattatttcttcgactggtttgtcttcaaggagcatagggcgcactcgagcatctccaattaatgagtcgtaagcaggatagaccttgaatttatcaggattctggtctttcatagcgtcgactaaatggagtccgagctcgactaaatcaatcttttccctatacttaatatgaacttgaactccgcctactctttctcctttataagcgccaaacatcggcgtgaaataagcagcacggaacgcaactccttctaaaccacgttggttgagatcatttgccagctgctgtccattaatccagggagcacctaacaattcaaatggttttgtcgtaccaaggcctgtcgatagcgatgtatcatctgctagttctgttccagtatagagaaaagcggtatccactgttggaatgttaggggatgtttgaacgtaaggaagttcggtctcgtcataaaacatcgatcgcttccatcccttcattttcgcaactttaaggttaactcctaaactgtattcgtgattccacattgtcgcgagctcgcctaccgtcatcccatgacgaacaggtaacaggaacctccccataaagctgacagtctctttatctcgtaaaggaccttcaacacgctctccgccagtaggattcggtctatctagcacgatcaattctttatcaaattccgctgctgcctccatcgcaaatccgagtgtataaatgtaggtatagacgttggaacctacatcttgaatatcaaaaacaagtacatcgacatcttcaagcatttcttctgttggtttccaggtcggcccgtataagctgtaaactggcaatcctgttcgttcatccatataagattccacatactcaccagcaggttgatcaccacgaatgccatgttctggaccaaacagtgatgttagatttacatccggatgatcaaacaacaagtcaacactactttcgagatcactgtttataccggtagggtttgtgattagtccaacttttttcccttttacccagtcaaggtggtcttctaaaaaaacttcaatacctggcgtcactttttgttttgatttctcttttttcgcttctgctttaccaggattgccagataaacaacatgcgacgatggttaggaaagcgagagtgagatataaaaatttctttgccatcaaacttatgcacctccagttttattatttttatataaagcaaaaatcatgccaactttttgaaggcatgatttacaaagtaatatgggaacgatgcaagatagtgtgcaacttgttgtatgtcttgttgcacactatcactcttcatttctttcttggaatagcgacaagagaacggatttctcgtattccggtagtgtaaggttcaaagaggattcaagtagcgggagagtatcatgaagagaccttactaaagatgaactaaattctaatgtgactggttgttttgattccattaatttttcattaataatccggtccaccaggcagcaaaagtgaagaagaatacctgcaaagctgccttcacttatcatttcttgcgaattcgcttcgccatcttctacccagtcaagaaatcgttgtatcacttgatccgtgtccgtactgcctagctgttctctaataactggcttcatcttattcagaagggcccatctttttccgtataagtccaaaattgattgcaattcttcttttccttccttatgaaaacattcggaaggcgataaatagattggaactggttttgtaggctgccacaacccaacgactgcaatgattcgttgtttgttttgcataagctctgcagataaaaccgaccagtcatttaaggaaatcgagcgaaaagtaacgccttctggaaagatgatttcttgcaatacaacttcttcgagttgctttgcccctccttttccagttgtacaattaaagacaaccacatagcgatgatcgttcactttctctatcatttttagagacgatggtttttcttgttcaatcgaattcacaatagcttttatgtcttgtcctaaattagctttccttaaagcatctataacgaaaagtgtgcttacattcgcaacggtttctgtatctatacctacttcttctgatagtaattcgccgaaatgaagcggcgaacccatatcagcaagtataagaacgcccttgctggtatcgattgttgaacacaacttttttaagtttaaatagatttgctctggctgttgattaagaggcatatcaattgcccaaccatcctgtgtacctagcaactgttgagctacattcaacatcgaggaagcagtagactcaccatgagagatcacaattacaactgtttttttctcttctaactcctcctccatttcgttgtaagaaaagaacaatgttaagtatcctgcttcattaatcgtgatctccctctccaatgccttctccaacagaggaatggattctaaagcatagacgaaggctccggggtgattttttctcaattgattcagctgatgttcttcgtatttggaatcggacatttttttactcattccatagatgtgcatagccaatgctgtatggactttttctggataatgaacgtttaatcgattctcagcttcacccaagagctcatgcactaagcttgctactttgtgccctaccattttatttactgtattcgttacgttcatgccattagaagaaagttgaagtttaggagaagaagatatctctttatcccttttcaactccgaaggctcttcttctaaatgcaaatttaaaaaaggatgatcttctttatgctgaaactgaagagtccctctttttgcttctggtggtaggtgtgataaaagaatattgatcgtttctcggtcttgttggtcaacataagcttgtgcgcaagctaattgaatgtctcttttaagctgaccaacatttcccgtacagtcatacacaagtaaagcctgaagtgcaagaggctccacccaaaccttcctattaagacgctttttctcttccttaaaaaataaccggataaatgctaacctttcatgccaggaccgctccgacaataatggaatttgaatttccattggaattcttcttctaaatgtattgagcagtaccgagtcaggtgcttctgtggtcgccgctgccagaaatacttgtgccttccgccgtccttttgtttcaccaagactacgaaaatagcctgtgtctaaatacatgaaaagcatttcctgtccttcagctggtaagcggtgaatttcatcgagaaagagaatccctccatccgcctgttcaaggtgaccaattcgatcctgagtagctcctgtaaaggatcctttcagcgttccaaataattgactaagcaaaagctgaggattatgcgcataatcagcacagttgaagtcaataaacggccccgtaaaagaggcattatgtatagcatagtgatgcataagacgagcgagtaagcttttccctacacctgtcgcgccaaacaataacgtatgaagaccatgagggggataaagtagggctgctttcgtttttctaaccacctcttgcagactcccgtcagcgccaatcagcttttccaatgataacgattcatgagtggcattcctgaataatacaggccttccttcttttctttccactaaacctgattctgcaagcctactaagctgtctgcttacattactacgatgaatctttaatcgatcagctacctcctgagcagaaactccccaggcatcagtgttctcgcaaagtttctggagtttaggcagtaaatcagtactcactttgtttcctccccgtttgaagctgtttgttgatttcattgtactgaacattcagacaataaacatccttattttacattctttttttcaacttctacttactcttggggttggattataactcaatcacttgctcaccaagaaagaaaaaacagacgaattacgctacaaaggcacatcccccctcttgccctaggtaagccacaaaaaccttcctagcaaatagccatttaactcactcccaaagattaccttaattatcttaaggttatgttattatataaaagagttattttgtctaataaggtggcgatattgcgatgaaaacgttggaggtagattcttttctctctggtattgaactgactcttaaacaattggactctcaagaaagtgatataaagaaaatagattctgctgtaatggaatttattcagttagaagaggctttaaaaggtaagggtgggcaggccattcgctcattttatcaagattgccatatcccatttctaaagtattatcaatcgactttagatgaatataaaaatgctttacataacatgaagaatgaattacaagctttcgaatcctctaatacggcaacgattcgggaggactttctaaaaaatgatttagaccatggtttgaaaaagataaaaacaatgacagctgatctatcaaatgaagcaaatacaatcattaattcagtaaatgatattattatgattccgacattgcaagatagcagtgtgatgaatcaattaaacagcgcaaatgaagaaattgaccaaacacttgaacaattaaatcagtacgaccgccaacaattaaaaaatttaaacgaggtaggagaccgcgctaacgatgcttctggttacgttgaacaaattagttccatgtttcagagtaaccagatcagtgtggaaggttatcagtctggttccctctttcaaaaattaaatcaagccgtacaatcaccagtaggaggacctactagtgtgcaaggaaatctaatcaatgaaaattctactagtaaacgtgccctagacttattattagcttacgaagaaagtcaaaatatagaatcgatagaaaaaccaaaggacaataactcgttgttgaacgcattgttagatggagcaattggttcgcttgctcccctagcccttatgaccgctgcacataaatctggtatcctccgcattgaatacactaagaaaaagaaccactacgcatttaaatacaatcggaaagtaacgcattttttgaaaggtagaattggacctgaatggtcaaaaagagctatccaaaaattaaatagaacagtaaaaaataaccacataaaggaaaaatatataaaagctcaaaagaaaaatttctcaggtccaaacaaatttgtagataatcgcacaagtttaacaaaagcaaaaagttcgcttataaaactaacaactggaaatcgccctcttcatgaaaatgttaagagtaaactaataaaatactcttcaagagaaatggttatctcaaaaggagcttttaaaaaagtcgttgctaagacatctggatttggtgcagtagtagttggaggttttactgctacttataacgccaaaaaaagatgggatgaaaatagctctctacaaggtaaggaaaaatatgaagtaagaggacgtattgttactgaagaaattaatagtgttataggtagtgcagctggagcatcagctggggcatatgtaggtgctatagttggaggtgcactttcaggtcctttcgctccatttggcgcagcagcaggggctgttataggtagcgcaattggagggtcagttggtgaatgggcttcgaaatacacgaataaatgggctggcgacgccggtgctgcaattggaaaaggaatctataatgttaaagaaaaagcaaaagaaacattagatagcgttaaaaatactatagatgaatcaaaagataaactattcggttggatataatttcaatagaatgtgtttcatcgaaatagcgtaaaggatttgataaatatgatggatatattagccacttgttgtggtgctattggggttttcctaatcattaatttctttttttcattgttatatttgcttagtaagtctgcaggaaaaggattttatcgttgggcttcccacgatgacctagaaatcttagtaatagtaacggctcctttattcggattaacacaatacgttgcaagtagattgtatgaaaaatacaattggtttaaagctagaataatccttgtcctatactccgttttactgttggtactagcaatctcattctttattttgtttgatttattgtagtagcaatttaaaactaataaacgaaaggactacacataaatgtcttatactctatctgctgaagaatacatattatcattacttttattagacggtgtccaagcggcagcttcgataaaagaagaggttttccaagacatttccgatcaagaactagaaacgcgtttagatagtgccacaaatggattgctctccaaagggttattaacaatcgatggaaatgaagagaatgttgatgaagcgtttgaaaagtttcttatgaagttaacgaatacacctcgtgtgattcgatgtcagattgctactgattcagcgatgctgacaacttctttgttctgtaacgacgattacactgttcaacaatctttatatgataaccgcattgttaagttattccctgaaaacaatgaaaaggcgctcagcgaacttatggatctaagcgatgtaaaagtaaatcatgaaccattttctattaaagagcctcttttcgaaaaagtgatcgataaattatttgcaaataaggagcttacaagtgaagagtctgacttgtttcctccagcatttctgcaaatactaaaaaagaaacaaggaaagctaaatgcattatatgattattacttagatgaacaagtcatgattggttctctcttgtatatcacaggtaatgagcaaacatggtcaatcgagagtgaaggtgaaattcttaccatagccccgttttcctttaagtcactgtttgaataaaagcaccttcacctattgttactaaaagccatatcagtaccacatgctgacatagctttttaaaagaaacaaataatcataggacagttttactgatttacgatttctaaaaatataaacaaaggaggctattcaataataagaataccctcctttgtttagctcttattctgaatttgacggtgacgctacaactagaaactagtcttcaaacctaatagttatagatctgctccggcaaattatcataaacccccggatttgcctgatcaatagaacgatctgcaatcgcctcagccgtcgtgctcatagcaagaaaagcctgctttgtgaggtacccattcgatttttgtccgagcacatatggctcataatttccgtctgccatccctctcatttcaaatagaatgactggaatgtcatattggagagccattgcattggaagccacgttcggattttgggttggctcatcatacttgaatacatgagaccatcccttcgactctagtccctggtagagaacagtcgctaattttttcgattgttcttttacttcttgtgtgacctcagaactttgcggggttaaaagtgatcctgatgttggctttccatcatactcttcttgcgtaccctggtgatggaaatcgatcatataatcaatatcgtactttgaaatgacattctcgtgtaaagctttcgtttcaggagctactttatttacatgatcgcgattaagatcgagtctattggcattatacctcgttaaattgcgcccactagctaaataattctcaagttcaaaattcacatcccccattgcgccatccgcattgtacatcgggagtattaaaatattcacattctcaaacagttcttgattagcctgactatttgaaccaagttgacgaatataatctaacgccccttctgtagtgagcgcttcattcccgtgctgctgtgttagaaatagaatcgtaggattttctggattcgttatgtatttgactagatagatatcgcgatccttcgtcgtctttccaataacctcaagatccatgctctcttgtttttgattctctttcactagaaagctagacatttcttcataggtcgtcaacatcgctgtttgaaccgtttcttttccgttaacatcaggaccatttcctcccgcaaatgaaggtacgcccgccatggtagagcttgcaataacggcagagagtgttaatgtgataattttcttcttcaagcttctccaactcctttaagatttggtataacgttcataaagtaatcgattctagagatgtcagttattccctgcagttctatgcgaaaagtggataaaaggcctattacttagaaggtttagattttatattcaccaactaaagcactaagggattcttttatcataaaaaacttattaacatagtagtttgctattttctctcataaagtgctgaagtgattaggggacggttctcatgatgctttcttgaaataatagaaaaaacaattggaatcccaattttctgattcagtcacttacaaaacaaagaaaagcaggtgaactaaacatttgataattagttctcctgcttttttatttagggaaactcatataataattcaatcacgagaaccatccactgccccactgattccatatagtcagctagagttcttacccatggtaatccccagtttttacattaacatgaacaattcgatattctactctagccaactcagcgtatacttctaaaaatccttgattggtgtatatttgaaattcttcatatcttatggtttctatggaatacgcgtagatttaattatgcatgtaagtgaatcatgagacctgctcccgtgatttacgtgagtcttcagatcaccaactcatacactcttgcttcataggacctcaacgttaattgatcaattccctcttcctcatcaacctcataattactaatcaacaaagacttacttctatgctccaactcctccggaagaacaaactcacactcctgatcactaaaattaagaataacaagcaaaatctcaccttcatgccttcttgtgtaggcataaatttggttatggtcttcaagaatgaggtcatactgtccgtagacaagaatcggattttcctttcgaagaccaatcaattccttataataatggtaaacagaatcaggctcatttacagcggctttcgcattgatttctttgtaattcgggtttactttgatccacggatttcctgttgtgaacccagcgtttatagagtcgtcccactgcattggcgttctcgcattgtctcgtccttttttgtaaattgcctgcatgattttgtctgggtcttctttatcttgttccactttttccttgtacatgtttaacgtctcgatgtccttgtactcatcaatggaatcgaaatggacgttcgtcataccaagttcttctccttgatagatataaggtgttccctgaagcgtatgcaggaaggttgcgagcatttttgctgactctacgcgataagtcgtgtcgtccccaaatcgtgagaccattctcggctgatcatggttgtttagatagaggctgttccatcctgctccttctagtcctttttgccatttcgtgaacgtatccttcaaatcttttagcttaagaggctgaacgtcccacttcccatcacctgaatcaagatctacatgttcaaattggaataccatatttagctcattgcggtcatcggcagtgtaattttgcgcttcggctacgtcgacaccaggcatttcaccaactgtcatgacatcataatgagagagaaccttctcattcatctccttcaggtattcatgaatgcgcgggccattcatgaaataatcgcctccatggacatagcgtttcccatttggatttggtgcatctggaaggttaggaactttcgatataaaattaatcacatccatacggaagccatctattcctttatcaagccaccacttcatcatgtcatacacttcttgtcttagctctgggttctcccagttcaagtcaggctgctttgggctgaacaaatgcaggtagtattcatccgacttttcatcatagtcccacactgaaccgctaaaggcagattcccagttattcggttctttaccttctttcccttctctccaaatataatagtctctgtacggattgtcttttgatttacggctttcttcaaaccacttgtgctcatcagaggaatgattgacgacgagatccataataagcttcatgcctcgcgcatgaacttcgtgaagcatttcctcccaatcatccatcgttccaaattcgtccatgatcgcacgatagtcactaatgtcatagccgttatcatcattaggtgattgatagactggagatagccagatgacatcgactccaaggtccttcaagtagtctagtttctctgttattcctttgatatcaccgactccatcaccattgctatcatgaaaacttcgaggataaatttgataaacaacactttctttccaccatgtcttctccatctttcaacactcctatcggtttattctctctatttaatcgcgcctttcgttaccccactaataacccatttttgtgcaaaaatgtagactaaaatcattggggcaagggccatgaggtaagaagcaaaagcaagattgtaatctgtactaaattgggattggaaaatatactgtactaacggtaacgtggctagatcttgatcactcaaaataacgagtgggagcatgaagtcattccatgcccatagcgttgttaaaataccaacagttgcattcatcggggcaagtagtgggaaaatcactttccaaaagacgccccaggtgctcgctccgtccatgatcgcagcttcttctagctcttttggaatcgatttaatatagccaacgtagataaaaacgttaaatgcgagtccgtagacgacatagagcataattaagccaacaagattatcaattccccatgcacttgtttgtttgacgatcgggagcatgataatcggaaaaggaacgaacatcgcactaacgaaatagtagaagagaaacttataaaactttttatgcatattccgtgcaatcgcataagcgaccaacgaatttgttagcagtgtaagaaccacaacaaataacgtaataaaaagactgtttccaagggcgttaaagaaattagtaagttcaatcgcgtcagtgaaattttcaaagcgccattctttcggtaaagcgagaaatgaatcagctagttcctgcggcgttttgagggcgatcgttacagtcaggtacaacggaaacagaatgagtaaggatccgagaatcaataatgacgtaatgaaccaattggctttcttccgcattacatttccacctctcttttctgtaagaccttaatttgaaacaccgaaacggcaacgataatgatgaaataaacaacggcattcgctgactggtaggcgaactctccaccttcaaatccaccacggtaaatcaagagcgaaatcgattctgttgattgtccaggcccgcccccggttaaggcaataatatgatcgaacaccatcaggaagtttttcatcgcaagaaccatgttgatcgtaaagaaggtagcgataagcgggaacgtaatgctccagaactttctccaggcgttagctccatcgatacttgccgcttcatacaaatcttcaggaatcgttaccagacccgctagataaagtatcgtattaaaggcaactgcctgccaaactgcgacaatgacaatcccaacccaggctaggtcctgatcgcccagaatattttgggttaacgcattaataccaagagcctcggcaatctccggaataaagtgggcaaagataaagttaaatatgtagccaacaattaagatacttaaaatatttggcataaagtaaacagcacgaagcgttttttgaaatttgatctttgcgtttaaccccatcgccacaatcagactaatgatgttaacaatgatggttgaaaccactgcaaatttaaatgtaaacagataggcatgaagggcgcgatcgtcctgaaacacattgatgtaattcttcaatccaacaaaatcaaaatccccataccctctccaattcgtaaagctataataaacgccttgaagtgcaggataagtatgaaaagtaaaaaagagcaacagagctgggacagtcatgaaaataaatgcgtttttccgtttatgcatgttcacctctcctttagagtaaatgaaaggggcaagcgtgccccttttcacttatcggttctgaaccttcttccactcttcatccatctttttcagaaattcttccttatttttgttgataaggaaatcctgaattaagttttctgcttgcatacctgcagggtaatagtgatcggggaagcttgtaatcgacccttcctcaaagttctctttgatcccttccataaccgggtcttcctggaacacaccctcaacagcggaaaaggcagattgttcatcaatgtattgctgtgcattttcttcattcaacatgaattcaacaaatttctttgcttcctctgacttctcagtaccttgattaatcgcaaatactacatccacaccagaaacgagtttattctgctcaggattatttgtaactggcatagcaaatacgcctaagttaatatccggattggctttcttaatctctggaattgcccagtttccttggagatacatcacactttcgcctttagcaaaagcagtgttcccatctccataagcaacgcccatgttgtctttatgaccatattctaaaagcgtcaacatcttatccgccacttcgggataatcttcttgaaaactcgcctcgccgctgttcactttcttcgcaaattcttcaggttgaatattcgcagcaagagagttccacgggatcatacctgtccaggcatctttcaaggtgagataaatcggaatctccccctcggcctttgccttttcaagaatggcagtgaattcatcccacgtcttcggaacttcaaatcctagctcttcaaatttatctttattgtagatgacagcgtttgcatttgttgcatatggaatgccatacgttccgtctttttcttctccaactaaacgattgatcatatccatgtaagcaggttgaatgttgtcagtcatttctgtgtctgagaaatccattaaaacgccagcacgcgccatttcaccgtaagttgcgtttccgccaatcgccatgacatcagggagatcatctttcgttaatcgggatttcaaaaccgtctctgcttcaggcggagcatttaacttaacgtcaatatccgggttttcttcttcaaactttttaatgagggtcttataagtttctgtattctcagatttattcgagaacacctcaagcgcatcgtcatctccaccactgcatcctgttaaaagcgctgccccgagtgccattgaaacaaaacctgtaaccactttgctagaaagtttcatcttatttcctccctggttttcatttaatttaatacgttaataaacttaagtaaacgtttaaccaaatccgcaaaaaaaattaatttattttttttacggattctctctcaataatccgatgaggcatgattcgactttcaactgttttaccactggcaatcgacgaaaatagcatttcggctccaacctgacccatctcgtacagaggttgagcgactgttgtaagtggtggaataatcatttgcgcaatcttgatattgtcatagccaataacagacaactgatcaggcacctcaataccaagcttatatgcggcagaaatgacgccgactgctacatcatcactactcgctataataccagtaagatcaggaaatcgtgacaatagaggctccaagttattaaaaccatcttcatatgcaaatccttttgtataaatgatctgctcctcgctcgcacttaatccgaaatgctgtaatgcttctagaaaaccttgtgcccttggataaccggcaatcttatcttctttaggaccgcttatcattccaagcttcttatgaccttgattgatcatgtattgtgtagcactaaatacagcagatcgatcgttaaccttcacatatggtaattgaaactctaacgattcagttgaaatcagaacaacgggtatccccatctttttcataatatcttcatattcttttgtcatcacttcactaacgtaaagaatgccttccactcttttttcatttaaaagctgcaaatatttctttgttcgcttcccgcttgaatccgtatgacagacgatcacactgtgcccaagttcatgggcaatgttctcaattccattcaaaatttctgaagacagcatacttgatacatcaggaaacagaacaccgatcgtttgcgtcttcttattgattaaccctctggcaactgcattcggttgataccctagctcttcaatggcattaagaacttttttcttcgtcttcggagaatacccaggcaaatcatttaaaatcctggatacggtagcaattgaaacatttgcttttctagcgacatctttaatggtagaggccatggcttaccttctttcagtaaacgtttacgtaatatcttaataacatgataacctgtattgaaaaccttttcaattaatttttgaatttttttaaaacataccagataaagtagactcccgaaaaccatcaacatgattttcaggagtctctaaatggctaagactgataagataattccttctccactacactcttcaaataagccatcacttcgccctgaagatcttctctccccaaagcgaaatcaaccgtcgccttaataaacccaaacttatccccaacatcataacggtcgccttcaaattcatgtgcaataacggcttgcgattcattcaataccttaatcgcatccgtcaattgcacctcgccaccagcacctgttggcaacgtttcaagaattccaaagatttcaggagttagcacgtagcgaccaagaatcgcatagttggatggcgcctcttccattgaaggcttttcaacaaacgtttcaacaggaattacgccttcttccaacataccgtcttttggtgcaatgatgccatacttcgaaacttggtcttcagctacttgttgaacgccaacaaccgaactgttgtagcgattgtaaacatccatcaactgaccgatacatggtacttcagagcgaacgatatcgtctcctaatagtaccgcaaaaggctcgtcaccgatgaaactctccgcacaaccaatcgcgtgaccaagtccttttggctctttctgacggatgtaatgaatgtttgctagattcgagatcttttggacttcttctaacagctcgtgtttttgcttcttcgtaagcgtttcttctagttcatatgatttatcaaaatgatcttcaatggcccgttttccacgcccgctgacgataataatgtcttcaatccccgctcgcactgcctcttcaacaatgtattgaattgttggcttgtccacgattgggagcatttctttcggttgagctttcgttgctggtaggaatcttgttccgaggccagcagctgggataatcgcttttcttactttcataaataaccttcctttcttgagtctaaccactcttttagcaatgcctaacagttaatgactacacattctaattccaactagcaaatagaggtgagtattcaccctcttatacttcaagcttaagttacctgttcaattgcaaatcacttctaactaactcattcaatcttctaaaatactccttatagtaaccagattcgtaatgtgaaggattattcccataaggatgagcataatgaccgataaatccatcacttgttaaatcgatcaccttgatattagggagacgattaataaagtagttgtttaacttatcccaaaaaacattatttcttcggatcaatttttgacgactgtctgaataagacttaacatttccctgttcatcataataccttgtcgtaaattgccctttgctaagaatgattctttcttcaggaagaatcattaagagctcctcaataaaacgatcaacagcagatttccaaagctgaaaataatcattgttgttttgatgatcgatcaccttactgttacgctgcaattcggaatacagattggtttgcctcaataacaaactagcactaacataagagtcatcacttatgcgaaaaacatctcttgctgcatccgctaggaagtccaagatcagatattctggttttgattgagataagtccctgataaacgttttattaaagtctctcatgattggcaattgttcgttcttgttcatatgttttagatcatcaagttcaagcgacacaggatttgacattaaactaataatggatgattgaatgtgcgtaaatgtgcattgatagaaccttttgtactcaggattgaaataaggctttgattcaaaggcatttctactaaagcatgacccaagaacggcaagtcgtatgacatcatctgaaaaggttgatttatcgtttttgacatctattgaaatttgatttttgtggttacgagagaaactggttaccaatggctgtgcctttggcttcattctaacgatagaattcaatggtagagaagggtctccagaaacgagtacatctactttctcattttggcccatctttatttctaaaaacagatcccaactctgaagttcttgttgaatagtaggatcaattattttagatagatcgactactccttcaaatccttctgacgttagtctaaggctacttttctcaccttcaaaatacgtgaattcatttccataagtaaaccgttttttaacgacaagtgccatgctttccttccccaaattggaaagatccaactcgtgcgaataaagcttacctttaaggtttaaaacttgatcacttaaagaaagttcaacgacttcagcaacaatgtcctttttccggatcaatagagagaaggtttttttccctgtaatataaggtttcatttttaaggcattattcgaatttaacgtctcgtaatgatacatagctttagcggtattttttgttgcgtaaactggggattccgctgccttttgtccggttatatacaatcttataaaggcatcccaagcctgttcattgttttctagttcaccgttaaacatatggttcacgttaactgtttcactacaccgtgtaccttgatattttaggtgaaacactttctcctcatcatactgaaaaagattcatttgttcccttctcttaaaaactaattgacatgttagtttttcaaagaaattttcacttaaatcatttgattgaagtaagatttcaggagtcaattccccatttttatagtcagcagattccaaatttgcttgaaggttgatcatcgtaataaggaagcccaaaccaccgtcacccgctctatatggtttcgctttaaaaagaggattaactgtaaagggataataaaccgaattcaattggtggtcgatttttaaccgataagaatgaccaccattattgacataaaaataccaaacttgtccttcttccaacagtttcatatttaataatttatcaatctctatttcaaagatgaagttctctttattgacttttaaagaaaaattcctttcatctaaatattcaattgtatgttcgataactcttcgtttaacacaaatggtagcatcttcactcaaatactgatcggtctgtccccataaggaaatgattccattgtgatagtcaactttagagacctttacttccaattctaaaaccctttctctattaaacttaaagaactctttctcatctattaagagttttatttctttcattgttatagtcgaagagggccatgtcgttcaacctacgcaaaaactctttataatagccagattgataatgagaataggagcgtccaaaaggatgatcgatatgtccgatgaatttcgtatccttcatactgatcactttacatcgaggcatgcattcgatgaaataattatttaaacgatcccaaaaataattgtaggcttttatcctattttgatttgaaaatttcttaatcgatccatctttatcaacataggtagaggtgaagccgcctaagtttaaaataacgcgttcctcaggaataacctcacgcaatttcttcgcaaaaagttgcattgatttttcccagatcgaaaagtatacgtcattattttcatgagtgacgacttcatagtccaagaagttcttgaaatatttactttgtctgaacgccaaactagcacttatatattgttcttccgatatcttgattacctctcgtgctgcgtcagcatacaaatcgataatgacatagtcaggattcaactgagtgattttctcgaagaaatctttcttaaaatcagcttcaagaaacttcttgttactttcattcatgtcgtctaattgatttaaatcaattgaaactggattagaaactaaactaatcaatgaagaatgaaattgagtataagcacagttataatacgttttatatttcggattaaagtaagcattcgagttaaaagcatttctactaaagcaagatcccaaaacggccacttttagctgattctcacttgagacattgtctaagaaataaagagacaggttttgctttccattcacaaatggtttaaatttcatccttgggttagagaacatttcttcatatccaattttaagttggtttattttcttagcatttatcggtagatctattgcgtttccagatatagtggcgacacgtagaaagagatcccatacatccttgttatgaataacctcttcttctaaaagttcagaaacatccgctaccaaatcaaaattttgattcgtaataagtaactccattcctttttcgaggttgtatgttaattcttgaccaacagtttgacgtttttttaatacgaaagaagagttaaattcatcaagcttatcgagatcgtaattcgttgcttcaatatgtccagttaccaatagtcgattttcctcaaaataaatttgctcaatagaaggagaaatatcagcatattttataatgaaagcaagtgtatcgtgtccagttttatacggtttgactcgatagagatcatttttttcaaactggtagtaattgaaatgaatgtttttctttttatttactggaaggtcgagtactaaaccatccgtatgttttaattctataaataaatcccagatcacatttttgttgaaaggatagccatcataaagatcatctaacgaaaagtgaaaaagtcgtcttccttcagaaattggttctattgttttggattcataatactcaaagagatgttcttgctctctttttttggcttttaaggttacgatcttatcctttaagtcgttatctgtcatagttccatttacgtcaacttcgatcgaacagcgcccatctttaaacgtaacctcagcgacttctgtaaaaagatcattttgtaacacaagcatagaaaggccattacgcccatttacataaggcttaactttaaataggttatgtgagaaaggacggtagtccacttctttcaagccgggtgctgaggttgtcattttagtctcaaggtattccccatcatgatggataaagaagtcccaaataacaccatcatgaatttttttatgaacaaatatgtcgttaatgctttcttctattgaaaacgtagtaccattcatcaccgtagtaaacctatattcttcaggatattctagcccctgttcaacttcacgccttcttaaacagagagaaacgttatgatcttcaatatgatgatcaacttctccctttacccttaacacgtcatcaaaatagtctactctcgttattaaagcgttcaatttgtcacctcattatttacatcattttcgtttattcaacgataagctcatgaattgtttctttccacttcgttccgatttcatcaatttcatatcgttttacattctcaatgcctttttcactaaacttttcacgtaaatctttgtcttctattaaacgaatcagggaatcggcaaatgcttcaatatttccgttttcaacgagaatcccatcttcattatgcttaatgatttcacctggccctttagggcagtcaaagctaaccaccggcacaccgcactgcatcgcctcaacaataaccattccaaaaccttcaaaacgagaacttaatgcatagatggaagatttcattagttccacatcgatgttaggagtggatcccattaggactacgtgattatataattccttttcttcaataaggtctagaagattttgacgttctcttcctccgccaaagattttcaatttccaatctggatgcttctcattcacaatcttaaaagcttcaataagtaagtcgaagcccttctgaggtaccaatcttcctgcggcaatgatcgttttagattctaatggtgagacaccaccttgaagctttggaatcgaattagtcagtttttttaccttcacacttccagaagaaagcaactctttgtagtcggttgtatcatcatccgttaaagttgcaagataatctaagcttgcataatgcttgacgatcgaacgctttaagcgctctggataaatcgcgtaattcagatgctcctgtccaatgactttcacatctttcttcacatatttactagcaaatatgttgaaacttggtcttgtacttacaagaattccagaatcaatcgatttcatgtagttatacatttttatatctgttaaagctgaaaagaaatggtgtccttcatcatcaggatgaattaacctacttttcattttcaataacttatttgctaccttactctttagatctaattgatttttgttacgattcacaacatcgtgtagaacagttaccttgattctaggatcaatttcaaagaaaggtatatttctatgtctaaatacgctaattacttcaatatcatagccgttctgcgcaagataatttgtaacgttaaggacggttcgaaccgtcccccccattccatatacatcaaatacaagaaaccttatcttcacgaatcattctccaatctcttaatttcaccctaataccttttcaattgttcttcttgcagcctttccatcgtcaaggtgacaaaacttagatgtgaaatctttgtatttcttccgatatgtttgctgaatacggtctatattatcaattgcatggaacaacttctcttcacttatcacaattggacctggtgcttctttttgaaaatcaaaataaaatcccctcacttgagtggcatatcttggcatatcgtaagcaaagaagatcatcggtcgatttaagttagcgtagtcgaacataacagaagagtagtccgttataagaaggttagaaatcagatagagctcttgaatatcatcataacttgaaacattataaacaaaatcttcatagccctctaactgaattcgcatggcatctctatagtggagcctcactaaaagaacatattcattcccaaacttctctctcattctctctaaatcaaatttaaattggtaaggttgaaaattagctccattatggaattcataatctcgccaagttggagcatataacatgacttttttatcatcagaaatgtttagctttttcttaattgcccgaagtttatcttctttatttctttttaaaagaacatcattacgaggatagccaatgtccagggtcgtattgttaaaggcaaaagctctcttcaaaatcttagacgtatagtcatttggaccaattaaataatcccaacgcttatttctctcaagaagtgctggagaagtgttttctgcgtatgattcagaagttggatcgatatcaaaaccaagtttcttcaatggtgtaccatgccaggtttgaagatgtacggctccattacgcttttcataaaaatctggaaaattaccattattcacaaaaaactttccgatcgccatataataataatatttcagagaatgtggtcttactttaataggattaccaggaatttcagtgttcaggttattaatcacccaaacagatttgtaatttttcttagaatcgactagctcctcgtagattgctttaggattgcatgagtagcttttaccgtgaaaactctgaaatacgatcactttattgttaatcggtagtattttattacatgccttatagaagggaagtaaacttttatttattaatgtttttagttttgtacgttgcttcaaacggtcttcaaacgtcatgaccactttagacgcatccacattcatagtaaatggaattaacgcatcatcgaaattaaggtgacaccggatcaggtcaaagtttatatctcggagtaattgcatcttcttgatcttttcttcatggtcaagctttatttttgcgacaaatgcgtgttcaagcgtcgtcttaccagtcttctgtaattcccactccacaggtaaatgatatttcgctccatattgaccttttattaatagtgatccttcaagaactttaggcaattccttatgcggagattgaatattaagttttccagtaatcagtaagtccgatttcacaattcttacgttatcaattgatttcgtttgaatataatcccttactagtatggaaacttcttcatgtatggtataataaggtttaatgaccttaatatgtctgtcgcgattgataaacgtttgctgtggtaagtttacaagtttttgtttagaactaatatcatctaagcgagagactaattttgacttacatatatctgaaataaagtataagtcccaaatgccatcgctaaataagccctgacgataggactcttcaatattgaccgtatagatgaatgttcgatcctctacgctgattccatattcatggcttatgtctgtacctcttttttcaaatcgaatgcatgcatgattcgcataggcacttgcgtctagagaggtcataacttgaccatgcaaagtaatttcgccattttttgcgtatacggcacttatttctgcttgaaaatcttctctggttacaagaaccgaaagcgtattgtctatctgaccaacgttcaacatcactttattaacaataccggacatatgatatgtcgctgagtcattgaatacttttgaagcatctacatttaatggcatagatatgactttatcttgatattccattctcattgcaatttcaaatgattcatcataatgtaagagtagattattctttttaaaatctaattcaatttcatatcctgtccaatcatacgttccatcaggttgaccgtaatgcttcgacaaatcaggtcgattcacatgtttcgctgggagctccagtgttgtaccgttcttacgagtgagcaaaatcgttttcttaacctctttactacctgatacttgccaagaaggtactaagaaatagccactcattttaagaacgccaaatgtatcgagattgaccgtttcagaaacaagtttggcggtacttccatcagatttaaatgataaatttccttttacagttgaatagggaataagtgacttatttattctgttaatatatagcggcgggtattcgagggtatttgttaaactatttttaactctcagaaccttttcttttccttgtaaatttacataaaaataagcatcccaaatacctgatgtcagatcatgtaggttctcagtgatatccaaggtaaactgtatgagatcgctactctgtggatccaactcactgtctactttggttgttatactcttgcgtgtttgtctttccatgagaacaaatttaagtggttgagttgaagcttctgcatctatatctaattttaatgtaacatccaacttctgttgatcgtattctaagccatgtaaataacacttaaactgctcgcttggctgccataataaatttaataatcccatgttacacccctaataaatcattgttatcaaatcgttctataacttttctctacctgactgaagctaattctttttttacttgggtagttgaaattcctggagtcctttccaaataaacgacttcacatttttcttttaaaaagtcaaactccccttcccaatcgttacccatgacaaataaatcgacatcgtacaagtcaatatcactcaacttctgctcccaattttcttccgcaatgacttcatccacataccgaacggcttcaagaatgtatttacgattttcaaaactatgaaaagatttcttgtttttaagtgcattaaattcatcagaagaaatcgccacaatcaaataatctcctaaatccttagctctcttcagcaaattaagatgtccccaatgaagtaagtcaaaagtaccatatgtgattattttcttcatacaaacctcccattaacacgaatatatctatttagattaacacatcacagaactttagacccacaaatatttacaatccctaaacattaccatttccgatccatcactataaaagtgatcgatatgaagattacttctagtacaaatcattcgatcgcatcgtgaattttatgaattccaagcgattatttttgagatgatcagaagcgaaatgcttgatgtgttgcgctatatgagaatcaatgatgaagaaaatggaacggattttcctacaatcgatatttctaatcttgggaatgttgtgttgacaagttatgaaatatgaacaaaatgtttgtaaattagatatgaatggtggtgtgcctaaagacctagtaatcactgggacggttctggtgattcctttgcatacaaaacacaaataaactaggtgagtcaacctgtttccccctattttctatgtagggagggtttttatggtatgtttgaaagttaaagcaatctctggaattacggggacgggtctcgtgatacactttcaaattataataaatttcctctatctcaaaaaacccaggtgaactaatcagtagattagttcacctgggttttccaattggtataagtaagtgaatcaatagaaccgtcccactggttcgaaggttctgggacgtgctgaaacataagatcttatatttatttcttgctctagggcttgttctagctgcttgcggacaatcaaatgggaattctgctaatgaaagtgcttctgatgaagaatcaaaacagaatagcacggaaaaagcggatgaagagaatggagaagaaaaggaagaaaatgctgatttcatttcttcttttaaagaagggaaagctgagcttgagaaagcttccgaaggtaaagacgtagactatcaagctgtgattgatctttataatagcgatttaaaacctcttgttgaacaaagagaaggtgaaatggatcaacagatctcttctgctctagaagctggaaaatctggtgatctagatggagaagttgtgaaacaaatttacgataagctgatgcaaaaggtgttctatttaacggtaaagcatgagtttaatgaagttaaagaaaactggggcaatacggaagaagtgaacaaagaaattgaagaagcgaaggaatactatgaagtgttaaaaggaacagtcgaaaaacgtgacgcggcatacgatacttccatggttgctcaaatcgacgctggtttcagtgaaatgcaaaccgctgttgaaaacgatgataaccttcaatttgtactcggaacccaaatggtcgataagacgctgatgaagacgttctaccttgcaactggcgctcttcctgaagggtatggccacaaaagcggcgaaggaagcaaaagaagatcctgagcacgctcgtgtggaacaagcagaaggatgggcattctatcaatggatctcaaattacattaacaaccacgcggaagaagaagcagcactgatcgagaagaactttagtcttgaaaacgatggatgctaaattgtaattcaaaatcactttttcagaaacctttttgattaagttgatatacttctttagctcctcattcgttttattgaatgtagttctgaaaggatacgttctattagaatgcgtacattggcatctgaaatcatataatatagaggataagttttgtagatcttttatgtctttatcttggttaatctttttaagttcgttttttaagatttcaataatatctctatttgctaaaataaaagcttgatcatggacttctcccttaaaatatctctctagaactagcttcaatttttctctatcgttttttcctttattatatttttctactgtctcgataatctctgtaatatctttatctttatttgatgagaaccaactagagttcattatttgctttacgtcttgtacagtttcatgtaggtacacttcatcaaatatacattctaacacctgatagtaggctaaatatttaaattcactgtctgacatttctagggctctatggtaataatcaattaaatccgaatcatattcctttttaaaatatggtgcttttatttcatttaattcttctgagatatgctcataatcaccctcatcctcatcatcttctggtagctcttcaaatgtgatctccgctgagaatttataggataaatcaaacaatatacattttgcataataaaattgtttttcttcgatatcctcattatcaatggggatatttgatactttattgatattataaatttttaatgttgtaaagttgtcttcaacttcaagatgcctgtaaaactgttcgttttctattactgttgaaaattctttagaaatagggccaatttcataatatattctgtcttgtgagcgatttccatcttcgacagcaaaagaaatatgagacaaaccgtctccccagaccatttgagtgtgattaattaatacctcaaaataatcttctctataacaagccttaacaggaatatatttcaacgtgaaaaaattctttattatttcatacactactgagaaatcatgattttcaagtggtacattatattctttttgccattcttcatggaaaatagttaattcttcattattgaaccatatctctatattttcttcttgtacaatggactcaatcttatataaatcatttatgtattcattaagaagcataatagttttatcttcgtcatcgtcgtcaagaacaaaccgaaagttaactgtccaactttcctttgacaagctaacattattataataattatcataatcaaatgttatagtaatctcactatcaatattacttactaaatgtttaattttttcttccatgttatactcctaacacaaaatgatttaatttatactgtataagtctctcttttactttcacctataataggattactccaaagaaatagaaattattttttcattttgattataagagttatttgtatttataactcttagttcatcttgacctagttttactttagtacctattctaaattcaccagggtagtatcctaaaaacttggctagctttacatcatctcctcgaaatatctcttccccaccttgatttattataagactatataatgttttatagggttgcccagattctgataggccatcattcattaattcctccattattggaagaacaggaaaagctgttaaagccttttctttttttatttttgtaaaacagtttgggcaaaaatacctttcttccccgtccccaaaatgatccccaaaacctacagaatacatctcttctctgcaaaataaagaattacatctattacatactatctcaggataaagatggcctctgctgcaaataaaagtgtacctttccaatccttccatattataatcaaaagcattaaactccactaggaaatgcttgactacatcatttatttcttcattacagtctttacaaaataatgtaccagctttgtaagcaatcttattgttaagttccgaacttaagtaaattccagtgttccacatatgataaaactcttcttcataggacttaactaactcaactgaaccatctatacacgtcatattctcccaatttcgttcttttgctgcatttgtaaaattatatgagccaatccatacacagttatctaaaattacaaatttatgatgcattgtactataataaccctcgtctgaccctaataccttagtaattttatcaaaatgtcccttaaatagtgattcatagttttgaagatttctctttacatgatctaaattcagtataattcttttatctgatactttactttctataatttgagaaattatttcttcgtcatctatatatgccatagaaagatagattttttcatttgcagattttataccttctaataaagcttccctaatctcacatgtatttcctggtcttgaaaagaaaggtttgatttccactaggctaattcttccccttttttgaattattagttacttgccacaaacgacaattcgtttagataattttaccctataagggccttttagtaattattaacttcagacattaatctaagatccaatgttaaattaaacatacatatatattgtttatagtgaacgataaattgattagcaattactccatgctgtaaccttgccccaccttataaacaaagaaagacccaccatagtctcctttagcaaagatgaggtgggttctgttacttacaataaataccagaatccaaaaaccctaaagcttaagcccctgttgttttgaataaaataaactctccatctctagggactctttcgtttcggtttcagaatgtaaaaataatcttccccgctgttctacatattgattactaattacagtatcaaactccatctggatccgtttgtcttcaattccagttaaacagaataactgagtattagttttcctcgctaatatcaccataggcttcacaacgtgatcagcacttgcttcaccaaatggattatcggcaattaggaatttccaggagttctcttgggaaaatcgcttcttgcgaataaaggtatttagggttatgaacattgccattcgtgaagcatgtttttctccattactccaaccagcaacctcatcccaggtgaagtactctttcatctcagcaagttgggcatttcttggtttcaacgcttttaagacgcagcgttcaatatctgcataacagtttaagatattgatctcatttactttgtcttggaagagttggtctagcaattcttgagagtcacctttttcttgacgttcagtcaattctgttaacacttcatctacaaacatacgcaatttatgtttgcaatctagcacgtcatacttcggccaacgaatggtaaagagtaatatatttaaaccctgttcttcaatgtgtgaatactttggtaactcgcaagtatttttatatagcaactcacctcgttcaaacatcatctctatcagttcatttcgaccttcttctgattgcgcacgttggaattcaaggctctccttaaatttatccattgcttttaacacagaataaaagttttcaatcataacctcatgattcccttttgacgactctagcacatttgtgaaatccctactcattgctaataaatgagaattgccagtttgttcaatttctagttgcattgcttgaattttttctcttattatcatatcttgagttcggaggtcttctcttttttcatcgaaagtttttctcactcgatgaacatctttcatgggattatcttttatccactccccttctgccaacagcttattttcttcagatacagtgacaaaaaactctctataattttctagttccgttaaagtgttattatatttaaaggaaagctgttgagcagtcttttcttcctcttgtttattggcttctctctttaagacattgtttttttcttgaatatgtaactcataatcattttgatggtcatgagagaatccgtatggttcttctccgtacacttcatcgatcttttcttcttctgcctcgtagcgttcttgttttttaataaataaatcacgtaacttatcaaatcttgattgaatatctgtaaaccgttcttcttcctcactaagttctacttcaaattgctctaaaagtgcaggttggaagcttaagttcccttttttaaagaaatcaatggaatatgtcaactttttaattaagtcttcggagttttgctttaaccgttcatactcggttttagtattacggaataagtctagttgctgcttttcagcagaatagttaccattaagttctttcaacagatatttctctttttcgtactcatctaaattagtctcaattgattctacattgcgttcaagttcatatactataaaatcacgtttaagatcttgaattttcgattcaatactcctatgaatattattttcttgctcttcctcaccttcatattgttcaatagcattttggtgtttagcctcaatatcttctagctgttctaattcttcaccaagggatagatattcatttttcttcacatgaatatttctgtagcgattaatgaaatcttgaactcgatacaggattttttcagtatcagttatattgtctagtatagctgtacactctttttttactttctcttttttctttttcgtacattccatattatctgttaacttctttatttcttcttgaagattttctagctcttggtcaagagcagcaatttctaaaacatatgtttgtcttgtatcggtggagtatgaggaccagaattgtttaagtttactttcaaacgctattaagtcttgttcttttaccttcaattcatccctttgttcttgataagctgcactctcttcttctaattgaactgcccaattttcccaatcctcttttgagaaacgtacattgaattgatgaaatacatatacattttgttgtaataatataaaattgcctatattcatcccttcctctaaaccctgtttggttaagaagaataggggaacgttcaatgctcctttaaacgatgaaagtaatcgtttcgcttctttaattttgttctcttcaattaatagagagaagggtagtaatgggtttttcttaacaagctcttgtttcttttcttgaggagttgtagcatgtactagccattcaattccagataatacaaagagctcttttgatgctaaaaactgtttaattgattcaatctccggatgtatgtgaaatcctgtctggtcaatactttttttaatttggtcaacctgttcgatttttacagataacctagtaacttctttatttaattcatctttgtttcgatgcaacttattaattattatatcttgttgttcaaatagattttctctagcatagatggacaaaaatctgttaaggtcattcttcaattgatgctcttcattagtgaaattctcaaatgccctctcattatcatcccttatccttttcgtttcagtcatctcatgatttttattttgaatttcaagcttcagtaatgaatgctggttttcaagttcttctacgagtaaatttttctgttgtagtattgctttctgttttgttattttctcctcaacaactttttttgactcttctataatttctttctttaattctcccaagacttgattaacatggctgctctcttgatcgtattgatcaataaactcatgtaatttacctttttttactttagtttctgtaatcacgttttgggtttccttcaatgcttgcttttcatctttaatattttgttttagttgttgcaggtttttagtgactgcccgttccagttctctattttgctccataataaaatgataaccaccagatactcgttcgcgtgtttcatttaattcttgcaacttttctccaacctctaaactggctgcatgaagcttcccatctagttctaaaacttttctatcgtattctttatattcttcataatgtttggccgcattttgttcatttacatttcgttgtaatgttccaattattttttttgagtcttctctttcagaatcaacttcattataacgactagttgcctcattcagttcaagtttggcaagatgcactttatacgattcgatcttccagcttaaatcctttttgagcatctctatatctttaagctctttattcaatttaagaatcaattcttgattttgcttatcttcactttgtacggtttgaaacaacttacttaaatacatctgagtagattcaagctctttttctatttttatataattttcggttgcatcaataatttcatctgcattattcatcacaacttcaaaatcattgagatttttttctaacaaaggcaattcaagtagcctgtctttataaactttaaacgcagtgataatagcgttcttttcctcttcatttgaaaataagttatccaaaaatgctggaattaataatcgctctattagggtttgtgttttatccgctttatcaaaaaatgctgttacaccagcttcagccccattaacttttgaaatatttcgccactcggatgctaaaattccgtattgttcgagtacatcttgatatgtatgattgcttgaaaatacttgagtattaacatcttgctttaagaacgaatgtagtgttgagtatggggtgattttaccatcactaacaaacgggagtgtttccagtgacaatgtttccgttgtatcacgctcaacaatgtaattaaagtaatcatatgttgtattcgactttccttgttttacaccataattatgaaagctaaatccagtaataaacattggttggctatcgttatcaggtatccattccactgcaacattaatggtattgcctttgcctactatacttttcaattttcttccttgaatgtcgtggttagggagaatcacttggtgaaggagctgaataacactcgtctttccgcctccgttttctaataagaaaagagtactcaatccattgggctcccatattttatccccgatgattttcatccctttatctaatttaatattagatacacggaatcgattaactcttggcatttcattctccttcttccttttttgatactaaatcctcgactttatttaatagctcttttatacgattgatccgttcttcgtgatgataataatgagctgaaatattcttcattttttcagtcaacacaatctcttcattgttatgaataattaatagtctttcattctcccaaaagcttagtacttttaataaaaaaccataatcacgctttgttgcacgacgaacatcggtcaagtcctcagtcattgaccttaggccatcccaaacctcaatcattccttctaaatccatatcgtataatgcggatagatctgctagttcttcttcatcgatctctttaaactgctttatatactcttcaacgtttcttagaatttcttctactttgacataagttctagactcgtttgtatattgaaattgatcgccataaaactcacttaaaacatttatccatataaattgagccatatacaattctttattcgtactaagtttcattacatttcgaagctcttcgttagtgtaagttaacacttcattatcaatttcaggaaccatatatatagtctcatctagttgaaaaatccttactttagcatccgtttgtataacattttgaattacttctcttacctttggtgaaaaatacgtccgatataactcattatactttttcttatcgatctctttatatttaatcaatgcctgatataaaacaaacgcttctctgaatactccttcttcatagttcatcctagttaaccttcctttctacgacgtagtccgtaaccacaacacctttatcaaatattagttgtcgttctgtagatatcacattaaacccctctaattcttctaacacttggtattgacgcccaagagaagccatcattcgattttcatctggttcaaagggaagttcttcaggtggaatctgaccgaatgccttataaggacttctatgaacctttacgcttatattaagaaaatgctgtagcaattcttcttccagacgtttatattgttcaggctgatttttctttagttcatttattatgtctgacaaaaaatagcgatttttttcttttaacggcaacaaaataatctctaaagcttccatctcctttttgtaaaccgcttctttttcttgctctaacatctctcgatggatagccagggttaagttatcaagtgtatcttcaacttggtcctcttcatgacgtttcttttttacatattgtggatcatacgctgaaaaaggattgtataacttttttactctgattggcataactggttttaatatatctctcgctttagattggtttattttttttgcgacccaggattcgagtatttcttgttcaaaatgtagttgttttgaaaatgcattctcgattaacagttgtaatgaactagtcaaggtttttagtaattcaaattttcttgtaaacaagatctcatgttttgcgatacatgatgttaattctttttctattttcaacacttgatcatatgcttttctttccttacgactgagttgtccagcaatataattagctttcactccatctacatttaatcgtaaatcactcaactgactcttctcttgttttgtttgctcatatgaatccctatacttcttttctaattcattccttttaaacatcgttaaggcattagaacgaatatcattttcatatttattaattgtatttatttttgtttggatttgaagctttaactcttcaacagctgttaacgcttgcgtgaacatccctttgtctaactgttgtttaaaataaagcattgtaatactaatctgcatttcagcaaacatctcttttgttttaaacaataattctatgccttcatgagtcaacttaaggtacatattcttttctcgcaggtctttatacgaaaagtcatcatatgtaattaaatcaaatgagtaaactttttcttctcctgtcgcaaggtctgtatagtgattgataaattttctaccaccatttctcaatttatcatcaatgatgtagcttctaaactcgttggcttgagaggaattcatttgaacaccataacgttcttttagtaactgttgtaaaaaatgatttatatggtcgggagatattttacttttacctgttaacattttttctaacatcattagtagtaccgcagttcctatttccataaggttgaggtgattgtattttggatctttactttgtgacagttgaaagatgggttgaaagagaattatatttttataacgttctgagaacccctcaaatagcttagaaagctccatctgctaacctccttaactccttcaaattaactccttcttgcggaacacaccctttatcttctaggaatcttcttacactttctgaccaatttaatgagaaataactaaaaaaagtagtataagcatcttcactacaacggtggttttcccatttgcgtatctggttccttctttcccacaacgcttcatacaagaaagtaaaaggttttatatccctggttgctctttttttagtacgataatagatactgattccctctggatctaggtcaccgtaataatagattggaatattgcaattgatatctagttcttctataaattcaatacttttaatgatttttccaccctctccatagattaaaagagatatacttttcccgtcccaaactgtaataccttctagcattaagcgtttcaggctaaaaaaagtatccttattttcaataattaagatattttctatctgtgaattgggttttcgataataaaaaaatggttcgtaagtttgaaatgagcagaggtcttcagaggtaatagcaatgtctttcaatagtttctgcccttcgtttgaggccaaaaacttttcatcgccaaataattcataggagcgctcgtttaaactaatccaatcagtactttcatttttattattaagaaaagaactgatctgttttatgaagggaatatcctcttctaacttattattattcttgaaataaattgtagtgttaatactcggatgaaactctgtaaacaaagtagtaattaactctttatctatttcttcttttctctcaataatctgatatttattaaacaagcttgtattagcattatacttttttgaactctttattttctttattatcccttcggactccaactctagaatagattgaccaaaattccgataaaagaaaacgcctctatcttcacctagtaattgctttatttctttttccaattcaactgtattaaatcttttatttttctttgattttagtatgtctaaaattaactttttcaactcatacaccatccaagattgttttgtaatattattactaattatagcattttttgtatttatatcggattctctttcatatgatagacaaataaaaataaccctccaagtagccgtatgaaaaccaatacgtttacgaggcttacctttcttcctcaaccgccacgccatcttttcatttccacttgcggtcagctgcatgccaaacttcaaatcatagacgttccttcagtccggatgaattactcccttttcaacaattcgactgaaaatatctagaatcaccgggacggttctgttgattcactcgcttatacaaatcgaaataaccaggttactaatcaatagaacgaatggcctcctgatttttctttgacacatattcatgggaaattacttaaaatctgagatgaattacgataaccgtccacgtgattcttattatttattggaacaacatggtcagagggacaggtcccttgtcccaaccaacatcgaataaaacaacactgcatacatattcataaactttctacaattactaaagcattatgcaccgttcctatactaacaccatgctattccccatccttatacatttaggagagacagcacaattcaccttgtcccccctctttcatttcaaccctttcgtcgttacttttattctatgtacattctcctcccctctcttctgtagcttaactgcctcccaaatatggccatcagaaatagaactaacctgttgtaggtcagcaatggttcgagccagcctgataattttaatctgtgctcggttgcttaagtggttctttaaggaaagctggcgaatcatttggtgctggctgtttgatagaatattgctttttgttaattggtcgtatgagactctgccattgcaggtttgttctccatatcggtcgtactgcctttcccttgctgctgttactcgttttcggatttcatttgaactttcgttttcgttttcctgttctgtttgcaaatctactggttttagggctaggtgaatgtcaaatcgatcacgaattggacctgagagtcgattttggtaggcgatgatttgttttggggtacaggtgcaataatgggtgagcgaatgaagaaagccacagggacatggattcatcgcacctatcagaataaattgagcggggtaactgacggttgaatgcgcgcggctgatcgttacctttccgctttcaagaggttgccttaacatgtcgagggtttttttcgcgaattcggctatttcatctaaaaaaaggactcctttatgggcaagtgacacttcacctggcttgggattttgtcctcctccaataatggatacgccggatgcagaatgatgaggatttcgaaagggtggctcgctggatgatgtgggactgcaagtattaagctgatacaagctcattacctcaagtcgagcttcttctgtcaaaggaggaaggatagatggaaatgcttcggcaagcatgctttttccacaccctggaggacctgacatgaatacatgatgctctcccgcagccgcaatttctagtgctcgcttcgcgtacgagtggccgacaatttcagaaaaaattaattctgctcgcgataagacattcttcttgaatctttggttgaataaatgaaagaattgtttgtccggacaagtgctgaattacttcacttactgaagaaatagtactctttaattttttcttttagtatagtacgatcccataggattactttatttgaaaccccaagttcaaaagcagatttagtaaaatagttatttgtaattacaattcctttttgaagattataatgttttatccccgctactacttcttgtatagctgtgtttgtaacactattactatagcacttagtttgtataccaatactaattccattctttttagctactacatcaatgccttggtctccagaacctttcgtcttagtaactgaatatcccattcttttaaataatacagtaataaactcctcaaattcataaccatccatcatgtctacatcatcaatagttatactttctttctgggtattagcagtcaacaatacagcttcaaaatcatctagttctttgttatccaagatatacctcagctcttcactggtttttttagaagcctcgtcaaagatctttctaatattttttgaattgactttattattttttatgagaaagtaaataaataaacttaaattatgctgatcttggtggtctatgatatcaatagaaaaataggttaatacacattctttaaagttcattttatctaaattaacaaagtaacctgaatactgttcatgaaattgttctgagtaatattctattaaaacatatctgaaagcgtgaagtataatcaaataaccttcttttccttttttcatatcatcataatattttttagatattaggacgtgaataaatttatcaaaagctgcttcgattttttctctctcatatgagtgaataaatctatctttcttttttttggtattaaacatttcatgaaataagtcatcttcataaacctctaatatagagatatcctgaaaaaaatcattagtatgatgctttagtaagttataaagcattaggtagacttttggatcttcaatcaaatgctttgatatcatttctatagtattatgatgctcttttactcgcttcatctcttgcgtttttgaagaaacatttttctctctttttttcttattataaatcttctttgattccatcaatttacctttcttttgttttgtaagacctatacatttacctaaatatgggatcttaataaagctttcaccgtattttttccacccctcatgaggacttactattcgtagggatgacatttcgcaactattagactcttttgtattttctaagattataagtttattatcttgaactaccaaataacactctctaggttcaaaatcatcctttgtatccttaaagataactgctttacctattgtcattaatagttgtttagcttgcttttttaatagaacaactctttctgcatatttctcatttatatcttccacaaaaattatccccctagcttttagaacaaagttattagagaattcttttaaagcgcttaaatgtttcctatattcagaataatattaacttgctttacaaactgatacacattctctagtttcatttcaccgatttctccatcaatattagaaatagtagctttggtagcgcacccctgatttttacttcgattcatttttgtagagagctgtttaaccactctaatgaatcacaagagtcgtctcccgtgattcagtgaatatctttctctattgatactcaccatcaacatattctatataacgaacatataatcctgtctttaactatatttaaatttaagttatataaatagttgagggtcatactcctttttctatgttacctgctcttatctaggatgtacaaagctgtcggaatgactgtttttcacgtggttgctttaaattgagacgaaactttttatttaatgttagtggttatatctaatatgttatggttgatgttaatatacttcgtaacaggataaagactccagaaaaccattactataattttctggagtctttagatctagtttactaattttgataagccaattccttctccacaacactcttcaaataatccatcacttcaccctgaagatcgtctctccccaaagcaaaatcaaccgttgctttaataaacccaaacttatccccaacatcataacgatcgccttcaaattcatgtgcaataactgcctgcgattcattcaacactttaatcgcatccgtcaattgcacctcaccaccggcacctgttggcaacgtttcaagaatttcaaaaatctcaggagtaagcacgtagcgaccaagaatcgcatgtttcgatggtgcttcttcaattgaaggcttttcaacaaacgtttcaactggaatcacgccttcttccaacatgctatctttaggtgcgataatgccatatttcgaaacttgttcttcagctacttgttgcacacctactacagaactgttgtagcgattgtaaacctccatcaattgcccaatacatggcttctcagagcgaacgatatcgtctccaagtaatacagcaaatggctcgtcaccgataaagctcttcgcacagccaatggcatgaccaagccctttcggctctttctgacggatgtaatgaatatttgctagattagagatcttttgcacttcttcatacatcttgtgcttttgcttcttcgtaagcgtttcttctaactcatatgatttgtcaaaatgatcctcaatcgcacgctttccacgaccgctgacgataatgatgtcctcaataccagctcgcactgcctcttctacaatatattgtatcgttggcttgtctacgattggtagcatttcttttggttgtgcttttgttgcagggaggaatcttgttcctagacccgcagctgggataattgcctttcttactttcataaatcctctatcctttccacaaattggttatgtactatattaaattcccgaaagtttcttataataaagagcatgcctttaatacaaagtattttagacatactcattaagtttccttatttactatttacaagacttaaatcattaataaagcaccttagtgcttcacgccaatctcgcatttcaggaaattcattgagtcttaaactcatatgatcaaatactgaattagttggtcttttagctggtcgtggaaaatcttctgttcctacaggatttactttcatatcgattccagattcctcaaaaattgctttggcaaactcataccaagtacaatttccagaattagacgaatgatacgttccatatttttcagttactattaatctagatatacattctgctaaatcaactgtataggtaggacaaccacgctggtcatttactacgttaagttcctttttatcctcagctaatttcaacatagttttcacaaagttgttcccatataagccgtatacccaggatgttctaacaatgaaaaactttgaagataaagctctaacaaaatcttccccagctaatttagatttaccatatacacctaatggagaggtaggtgagaattcattatactcttcattactttccccattaaatacataatccgtactgatatatactagctttgcatcgtgttcttctgaaagagatgcaatatttcttgttccaatagcattcactttaaaagctgcatcttgatcggtttctgctttatcgacgttagtataagctgcgcaatgaatgacaattgaaggtttaacttcttcaaaaactttcgaaacgttttcgtggttagtgatatctagtttttctctactatatccatatactttatagtcttttttcgagaaaagaatttcaacatccttacccagttgcccattgcttccagttactaaaacaacttcagacatttactttttctccgtattgttttgtataataattcttatactctccggatttaatatttttccaccaagattgattatcaatgtaccattggattgtctcttggatgccagtatcgaaagtatattctggcttccatcccaactcttttgttaatttcgtagggtctattgcataacgacgatcatgaccaagtcgatcatctacatatttaattagctcaggatcaacatctaatttttctacgataagatggacaatctcattattcgttctttcattgtgtccgccaacattataaatttcacctggagctcccttatgaatgacaagatcaattgctgcacaatggtctttaacatgtaaccaatcacgaacatttttaccatcaccataaatcgggagttctctgccttctaaagcattagatatcattaacggaattagtttctcaggaaaatggaatggaccatagttatttgagcatcgagtaatgttaacattaagaccaaaagtttcatgataggactgtaccaacatgtcagctccagctttacttgctgagtaaggactattaggattcagaggagtgttttcagtgaaataacctgtctctcccaatgacccgtatacttcatcagttgatacttgaacatacttttgaatatcgttatcttttgctacatccaataaagtctgtgtgccaaggacgttcgtttggctaaatactgccgggtcagtaatactacgatctacatgagactcagcagcaaagttcacaatgacatcaatagaatgagcttttacaatatgatcaacaagttctttattaccaatatcacctttaataaatgaataattttcttcactctcaagatctgttaaattttctaggttacccgcatatgtaagtaaatcgtagttcactacattataactaggatatttttcgacaatatatcgtacgaagttgcttccaataaaccccgctccacctgtaacaaataaattcatagctaaactctccctatttaaagtctatttctgcatttgttaaatttggatgtctttcatctttgcctgataaaataggtttacttactggccaagctattccaatctcaggatcattccacataatacctcgatcatgatttggagaataatattcatctaccttgtagagaacatttgtatgcggagttaaagtgcagaatccatgggcaaatcctttaggaaccagcaattgtcttttattatgttcactcaaaattacccctacccactgaccaaaagttgaagactcttttcggatatctacagcaacatcataaattgccccagttccagctcgcacaagcttcgtttgtgctttgggttgtaactggtaatgcagacctcgtaatactccaggctctacagatagggaatgattatcttgaataaactcgaaatttattcctaactcactaaattttttcctgttatagctttccataaaaaaacccctatgatcgccgaatgattgaggttctattatcagtacaccttctaatttagtttttaggatattcattaattaaaacctaccatttcataagctggatttactctattagcaacatcaacgagatattttccgtactcatttttccttagcggtttagctaactctagtaattgatttttattaatataaccttttctataggcaatttcttctatacatgcaacttttaaactttgtcttttctcaatagtttcaataaaagtagaagcttctaataaggattcatgggttccagtgtctaaccaagcaaaccctctacctaataattcaacgtttagatcacccaattctaaataagcctcatttatcgaagtgatttctaattcaccacgataagaaggttctatactcttagctatatcaactactctattatcataaaaatataatccagttacagcataattggattttggttcttgaggtttctcttcgatcgaagtaactttaccagaatcatcaaaacctactactccaaatctatgaggatcttttacgttataaccaaaaaccgtcgccccttcttttctagtcgctactttttcaagaagatttgtaaatccatgtccataaaatatgttatcacctaatacaagagcaacattatctgatccaataaattcttctccaataataaatgcctgtgctagcccatctggagatggctgtgttttatagcttaagcttatacctaattcagaaccatcccctaataattgttcaaagcggggagtatcatcaggggtagaaataattaaaatctctttgataccagctaacatcaaaacagaaatcggataataaatcataggtttatcataaattggcaaaagctgtttagagaccgctttagtcaatggatacagtcttgttccactaccaccagcgagtatgattcctttcattttttctcctcctcttaattatttttttcttctaaaaacaaattttcatattcattaataattttgtcccaagaatattcttctttaattcgtttttttgctttaatttctaattcatttatattattgatagaatactggtctgcataatttattaaagtacttaaatcaccaggttttttcgaataatacaaagctccatcatttcccacttctttattaaaaacaacatctaacaataaatttatttttgtagttgctaacgcctctagtaaagatggattagtacctccaacttcatggccatggatatagccataagcctgctctcttattgctcttaacaattcttgatcataaacagttcctacgaatttaattcttgaatctttcttgaaatctgtgcgtgttaataattcttgatgaaatttattcatctctacgttggtaattatcactaaatccttattcgatttactatccataaattccttaatcattaattcataattattttcagagacaaacctacctacgattaaataatattcattagcagtaacatttttctctaaaaaccacttacttagtttaggtgaattttgtttgagattagaaggggaaacatcagcaccatacgcaataaaagtagttctaggattgtaagaactgtattcattatgaatatatttttctattccaatagaatcacaaattaacaaatcagcatttttcaccattaatttttcggataacttccaatacttttttataactccattccatttacttcttttccactcatgaccatcaggattaacataaacgcgaactcccatattttctaatttatttttgtaaaaagagaaaaagggaccgattctacatgccaaaatataaataatacagttttctaaattgttttctttaatatatctaatactttcttttaaacttattagatcataaagcactgctttagcactaccaacttgaggcacctttacgttgaagcatcttgtattattataaataaattcaccattagtttctgccatgcaagaaacgtgataattcaatttattattcgttttttttgctgttaagaattccacgaaggtttcaaaaccaccatattttgcgggtattccttttgatccaataatgaatatattcttcatgataacaccctcatctcaaaattattcgagaaatacatttttaatccccacatcaatatatttgcgattaaaagcccagttgctgcaccatatagcccgaaagtagggatcaataatatatttaaagtaattgatactacactcgaaactaggatgctaataaataatagcttatctttcctctgaacatataaaatgtaatgggggacttgggataagctaactactatagaatttccaactaatattaaaaataataaaaagtacccttgatagctatcatctaaaaattgaacaataaagctgattgatacaagcaataatagagaaacaactaacgaagtaactataataccaaagtacatttttttaactttttgctgaaattccatattgtttccttcttcatatgcttttaacaagctaggaaaaataatgcttacaacaccagtaattacaaatactgaaattacatttgcaatactaaaaaaaaatgaataaacacctacatatgaattgttataataaaatttcagaaagtatctatcactaaattcaacaatttttaaaaaaatggtggaaacaagaaatggtgcagcaatataaatcccggattttatccaactgaaattcaccttatctttttggaagatatttatgttggctttatataagtagtataatcctaggagtacactaacgaatgctccaccaaaccacccaaacaaaatttccccaatactccactcattcccgattattaagttagcaggaataactatcagaatccataatccgcttctgataaaaaaaactatatttgcttgaattgatttacttatcgctatcaatatcctataaatttcttgggataagtgatccgttattaatattaaataaaatagaacaaccatattccaaggaataatattaaaatagaaaaacaataaaaataaaggtccagttattatatataagaaaaaatggagtataaattgatccctaactattaaccctttattttccacaagaactatttgcctagtgctaaaagaataaaaatccattcctacaacaaaaagacataaagttattgtcacagtgaaaagattaaataatcctaaatctgctgtagaataataactcgccaaataaaacgttattccgaatttgcccaataaggaccctgatcttattatgatattcactaaacttttcaaggtcacccacctatttcatacgttttcttggagaaagaaaaaagttatttattataaaatatagaccaccaaaagggattaatatattttttattgcggtaaatatcccacttgaaaccatggctccaaaagttaatgaaaatataatcaataaccctaagttaaacaaattaacattacttttgctttctattatcataaaatacattaattgtgctaatagaccaatgatgactgaaaatataatcactcctacgaaaccaaagttactaaacatctcacctactaaagtagttgtgaaaccacctgcaaaaaacaaacccatttgatcttttaaccaaattgcataactcggttgataaccaggtaataaagtagcaatatccagaaacaatgatttcccataaattaatgagttttgattactccaatcatatatcatctgtatgttactaatctgaacaaaaaacctccactctaatgtcatccatataagattaaaatctaggatattttccccgttacttcttaagaatccagtgaggcccattaaaaaaattattgaaaccccaaaaataagtatgcttattaactttatctttccatactttatatatgaatagataatataccaaacaagtattaattggagcgctggagccctatatcctaatccaataaataacaaaaaccctaatattattaaaagtatgctagataaatattttcgcttaataatttcattcatagaatatattattattcctataaagtaaaaaccataagagagcaaataaagccaactcttcccctcttttacttctactctaaaatagtcagcattactggaaagtaaaggaatgcctccagcaagtgtgtaataaataatagccagtaaaatacctatacacacacacactagagaaataaatttagcattttgatcattccaatttgaataaacatttaatttcgattttaagtttatatgttttttattgaacaactttgctagtattccaccaataataaatgaaatcgcactaactaatatcatcacaaaaacttcttgatctattcttattcgactagaatatttgccagcaaaaaaacctccaaatgcaacgaaaatgtaaaaatataataaataatatgaaaagggatttattatgtggaataagttgaatttgaaatgggaataaacaatgataagaataaaagaagatatatatatcaacgaagttgaagtgtatgtagatacgtatgtggtaataacgccaattgcgattgctaaggcagtcactatcgttatctttttgagtaccatgagaatttattctccttaattatttagctaagcatcttttttaattcattattaattcttgtaattggatttgcttctgaatcaattgccgaactgcctaaatagtgctctaaaaaaatacttttattattcattttattcttaaatttattatcttcataaaaaatagaattaattgcatccttaaactgatctacatttcttgttagatagcaacaatcatattcttcataaggaattcccttgattattctcttggactcaatttcaattaaaggtttgtttaacattaatgcttctattcctatagttgattgcgaagatatcactgctgttaccctttgtaaaacctcgtttacttggtaactactatcgatggtcgcattaacatttttatattcattaataaattcataataaaattctttgttcttttcagaagggtgtagccttataatcaacttaaaatcgggccaatcctttattgcattaaatacgatgtttaatatgtcccatgtggtttgtttgtcgtatggtgataatgctagtagtagttcattttttttataaggtatagtatcgttaccactctttaaaaaatcctcatacctcggattacctgttaacactatttgcttttcattaactccccattgaattaacttcttttttgaaatttctccccaagcagcaatttttgttgcatataaaggagcaaaaccatatatcccgttagttgcaccatgttgaattactaatgtttttacacctctatgtttcgcaactatcgccatatgccttgacaatcggtggcaatctgtccccataataataatgcttggctgaacttcatcaagtaccttattcaataaaatattatcagctatagtagtctttaaaaatgttgttgaatacttttcaatttgcatttgcactaattctaaagctgtttcagagatcattgaatgcttaattttaaaatttaacgatttctgctctttattataagttgatttactaaaacgctttttcatccaataggttaaaactctgaaatctatcatgttcccgagggcaaaaccgctattattaaagaaaaatttagatatgcgggattccgatgtaaaaaggcttataccttcgtctgttgaactaaatattttttttaaactatcgtttgtaggcttgttattgacatccgcaaatattaacaaattcgtttttttaacttttgcttttctgagcttgagactcattatatattttaaataattttcaagagaatgttttttcactttagacaatgtacttttataaaatgattttttttgtttagaatgacttttcacttttactatttctatatttctttcaaacattttgttaagagtaataaggttttcagctaaattcatatcatcatatataaagtgcatatccttatttatttctttagcattatttagtattttttcacaaatcagaacatccctggtgatattataaatcatgagttgagctgtggaagaaatatcgataccatctaacttgaaataattttcttttccattcgcccaatttaacgatatatcgtaagaatattcctctaaatttataaaatccatttccgtcaataaactattaatattatgaatcaagcccccgcttaaagattccgataattcctgatgaagatagagtttcattatttctcaaatcccctctagattaaatctttgaaatttagtggagttccagcgatatatgatttctttgcatattttccttttaatagctcataatattttggaggtaatccatatcccggtctaactattttaatgttttcttcattgaacttttcccctgatttaatatctttactaatataaatagatcttctgaatttcttagacttttcttcagctttagtagcaccatatgaaatttgaccaattgattgccaagctctcttagattcaaccactagattttccatttctctaggctccatggaaaaagcagaatctactccaccgtcagctctagatagagtaaaatgtttttctactacagttgcgcctaatgccacactcgcaaccgcaacaccaacacccatagtatgatcagacagacctacctggcaattgaacaaatctctcatatgtggaatcgtagaaatattagtgttttcaggagtagcaggatatgtacttgtacatttaagtaaaattaaatcattacacccgttttctctagctgttcttacggtttcatctagttctgccactgaagccattccagtagaaataatcataggtttacccgtagcagctacctttttaataagaggtagatcgttattttcaaatgatgctattttataaagtggaacattaagttcttcaaggaaatcaactgcagtatcatcaaatggtgtgctgaaaggtatcattcctaattccctagcacggttaaaaataggctcatgccattcccaaggagtgtatgcttgttgataaagtttgtaaaggttatttccttcccaaagactttctttatcctgaatgttaaaatcgctattatctacatttaatgtcattgtatcagcagtatatgtttgtatttttaatgcatccgcaccagttttagcagcttgttcgacaatctctaaagctctctctaatgattgattatgattccctgacatttctgctataataaatggtttgtgatttttcccaattgtaacgttttctatttgtatatctttcacattttccaccctttcagattaaaatttgaatagttattgaaaagtccaatcattcttaaacaatgccatcaataaaatatttatataattattgtttttgattacatgtttctcaagtaaaccttctttttgaaaacctagcttattatgaaagttaacacttttcttattcgagctgattatttctgcacaaatctttctcatattcaattcattgaatgcgtacgtaagtgctgtctttcctaaaagtgtccctgtacctttaggtgcttcgatttcacctacataaaagccccagtcgcatttaccattttcattgtcgatgttagtgaagttcactattccaactggtcggctatttaaattaaaaaccttaaacttacaattttcattctgtttcattttttcaaaccatttcagatgattttctaatgtaataatttcgtctgagtacataacacttctaatatggtcttgatttctccactgtagtactaattctaagtatttctcttctaaatcgacaagttcagttgtatacgtaagtctcaccccgcttctataatggtttccactacaggatgttgttttattaaagctacatcgacaagactataagacctttggaccatttctttaactctatcaatagactgtgatagagttttcacttctcttttaattgtttctattgaaacagaactactttgtccaaggttgacagtcgctccatactcgctaaccgcctttgtaatctcaatttgattatccgctacaattatagttattgagggtaatcctaagcaacaacgctcccaagttgtagttccccctgcaccaatagctaaatccgcttttgccattaggaatgccatgttagtgacttgaaaatggaagttgaaatttttattttcatgacataagttcataattacatttttatttttatttgctgctcccactactacatcgacctcatatctatcaccaaattgcaccagagccttaatcgttttatgagtttcattagttggatctgatcctccaaaaaaaaccagtatgttatttatatgtccagattcacggttccccatattttttatcgatagaaactcatctcttaaaagcacatactgaggtcctaataattttttacagtgtttcggtactagattttcatatctttcagtaaagttaagataaaaattttgatccagaataatttcgcaattatgctttctatttgctaggtcatccaaaaccataacattcttcacataaccttttattaaagattcccatttttcatccaaaccgtaatgatccactataagtaaatctctaccaagttgattatcttctatctttttaattgtctcctgtaaatcttttttccaatttaatttataccaatttacatatcccttttcaaaagtctcatcgggttcgggtaataaatgaatatcaaaaccactctctactatcaatttagataattctccttctaaatttctacatatgaaggttgttgaatattccttttccctaagttgtttcgctaacgtaatacacctcattacgtgtccggtacctatagtcacagaagcatctactcttattaaagcacgcatatgtatcttaaaccttcttttgttcaatatgactattaattgataaccagtcagagttgttttttaaaatatttattatttcattcaaattaggttttacttttttagagttaccttcaaatgcatattctataattgttttaactaacgtaaagtcttcaattgtatcaactgttagcctatagttgctataatcttcggatgattttactgttcctaaattaaaagtacttggattttcataaatagcttttgttacatgctctctagacgatttttcttttacagattgatgaatttttttcaaacattctaaggagaaaacctctacatccatccctcttggaaatgttctttctaatgtatttgaaacataatcgtaattcggatattcatcaatgaatttactgattacattatcaacaacatccggatcaattagtgggcaatctgaagtaagtctaactacaatatccgctgaagtctcaatagctgcttcatagtatcgtgacaacacatcttcttcagaacctctatacacagaaatagacaaccgattacataaatctataatcggttgttcatgttcttgagtcgttgttgcaataatcactttatccaaatactttgagcggttaacactatccagttggtattctaaaagagacttcccgttgacttcctttaatatttttccaggtaaccgagtggaccccattcttgcttgaataatagcaactattttcataactactccttaatttgtttatattgaatagaaatctattactttcttaactgctagtatgacatcatttacatcttcttcactcattgctggaaaaagtggaagagttataatctcattgtatagagtttcagcattgtgacagcttccttgttcatatccaagttgttgataatatggctgtagatgaacaggaatatagtgaacattgacaccaatgttttctttttgtagtgccctgaatatttctttgcgattcgctttaagtgtatttaaatttaatctaataatgtataagtgccaagatgaggttgcctcttcaatttgatatggtaactctagctgtggcataacattgaaagcttcatcatacatagatacatattttttccttaatgcaataaagtcatctaatcgctcaagttgacttgagccaagaaccgcttgaatgtcagtcattctatagttatatcccaggaactgcatttcataataccaagggccatgatcttcacctaagtctctttcatctctagttataccatgagacctgaattgcaataacttcttataatattcttcattattcgttgtgattactccgccctcacccgttgttacatgcttaactgggtgaaaactaaacatagtcatatcactaattgcaccaattttacttcccttatattctgcaccaattgcgtgagcggcatcttctattacaactaaattgtatttagatgctaacttatgaattgcatctaaatctaccggttgtccagtaaaatctacagggataattgcctttgttttttcagttataagttcttcaactttaacagggtcaatgttgtaagtacgattgtttatatctgcaaacacagggacccctccctgatataacacacagttggctgaagcagcaaaggtcattggagtagtaattacttcatcgcctttcgttattcctgctgcgaaacatgccccatgtaaagcagcagttccatttgagaatgttactgcatattttgacccaacatatgttgctatcttttgttcaaaatcagctactgaaggacctgtcgttaagtaatctccttttaggacattaataactgattcaatatccttttctgaaatccactgtcgtccgtaaggtaaataagtatctcttactgggctgttgggtttgtacgaatctttggtaatcatttgtttttcaccctttactaatagtggtacttatttagttactaggcccttttcatctatcaattgtctaagatcttctacagaaagccactctgtattaatctcactcgaatatctaaattcatcatccaatggctttccaccatttgaatattcttctttccaccaaggaaactccggttgtatcacataataactaggatactccaacgttctacgagcatcgtcttcagttatcattgcttcgtgtaatttttcgccagctcttatacccactacttcaatttcacagtcaggggcaatagcttcagctaaatctaatacgttcatactagggatcttaggaacaaatatttctccacctttcattcgttccaaattatctagtacaaattgtaccccttgatcaagtgtgatccaaaatcttgtcattcttgtatcagtaattggcaatttaccagtatgtttgatgttttggaaaaatggtactacactccctctgctgccaacaacatttccgtaacgcactacagcaaatcgggtttctttgtcacctgcataagaattggctgcaacaaacaatttatctgaagctagtttagtagcaccatataaatttattgggctacaagctttgtcagtacttaacgcaataacgcgttgaactcctctatcaatagctgcttcgatgatattttgtgctccatgaatattggttttcacagcctcaaatggattatattcacaagcgcctacatgctttaatgcagcagcatgaatcacgatatcaacaccatcaaaagctctataaagacggtctttatctcttacatcaccaatgaaaaatctcattcgcgaatctgtataatcctttgccatttcatattgttttagttcgtcacgactgaaaacaatcacctttttaacatcctcttgcaggactttattaataaatttcttaccgaatgatcctgtaccaccagttaccaaaattgttttaccactaaaattcatagtttttctctccttattagtaagcatgttttgatgaaaacacttcttttatagttttaaaaattataataaaatcgaaaattatagttcgattttctatgtatttcaaatccaagttaaccatgtcttcaaaatcaagattatttcttccactgacttgccacaaacctgtacatccaggtgtcacaattaacctttttttatcccgatttgagtactcttttacttctctaggcagaggtggtctcggacctactaaactcatttccccctttaaaacgttaagcaattgaggaagttcatcaatactagtctttctgataaatcttcctatctttgttattcttggatcatctttcattttaaacatagcaccctgaacctcgttattatctagtatatcttttaagagttcttctgcattagaaaccattgacctgtatttatacattttaaactctttcccatctttacctactcttatttggttaaaaaacacttttcctttagggtcttcaaatttaattaatatactgattaaaagcaaaaatggcgctaacaaaagtaaaccaaacaaagcacccatgatgtcaattgttcgtttcagaatgtaatagttcatagtttttgaagcaaattcttcatcaccatatttttcaagttctggatcacctaaaccaacaccttttgactggcttaaactcattttctcccctccttaaatcaataaaaacacgaattaatatgtcttttattgtgcataataatagtagtaactaccatctttcattttcttcttatttagcactacacctaacaacttactgtttacactccctaaacgctctttcgccttaacagcagcttccttatcagtagtcccactactcacaaccagcacagtcccctgcactttattcgccacaatctgtgaatcggccaccgcaagaatcggagggcaatcgaatagtatgacgtcataatggcggagcgcttcttcaataaggttatccatccccttagaacctagtagttctgatggattaggtggtacaggtccacttgtgagaacattaagattcggcacttctgtttcctgtgtcacctctaccaactcagcctgacgggtgaggatattggtgatccctcttgtgttcattgttctgaacgtataatgaacagtaggcttacgtaagtcagcgtccacaattaaaacgctttttccctgttgtgcaagaaccacaccaaggttagcgattgttgtagactttccttccatcggtccagaagaagtcaccataatcgtacgaacctctttttctactgaagcaaactgaatatttgttctgattgttcgatattgctcagcaatgggtgatttcggattttgatgtgttaagagacttctttctttatcaacgtgtacagattttcgatttttacgactcaacggtttcacccctcactgacttttttgattggttcttcgatgaacctacttctttgtcttcaatgactgcaatcgttcctagtacaggcaatccaagcagcttttcaatgtcattttcatctttaatcgtgttatcaaggtattcaagtaaaaaggcaagaccgactccaaccattaaaccaacaacaagtgcgatcgccatatttaacacaggttttggattaactgggcttggcgttccttcaaagtttgcttctgaaagcacgcttacgttatcaacattcataatgttactaatctcgttttcaaatacttctgctgttgtatttgcaatttttacagctagtgctggatccgcatctttcacttcaatagaaacgacttgagagttttgcgcattacttaccgcgattttttcgtttaactcactcgttgatagatcaaggtttagatcttttccaacttcatcaagtattttcggacttttaataatgacgctgtatgtattaatgagttcaacatttgtttttacctggttatagtcaaacgcattttcagaatctgttttttggtttacgagaatttgggttgaagtttggtaaattggggtaagtaggaaatatgagacaactccacttgttgctgtagcgagaagcgtaataagtagaataagagcgagacgtttttttagtacggcgaaaatttcctttaagctaattgtttcttccataaaagcctccaacgcgatcataattatttttaatacgtaactaatttcaatacagatttcactataacacagaaaatcagttaaatttagccttttttttcactaatacccacatgaattccgtgatggtacgaatatactattgttccatgtcgaaatttgtagaagaaagggttttcatcggcgttttttataaatattatgacgaaaacttttctgttaaaagattgtaaagaggtccctatgtgaaaaaagggcctctttctcatggaattagaacaaacctagtattttcttcttacgaacctgctgaggcacttctttcgctaccattcttccagcgaccatatcttcggcattttcctgcagcatgtatcgtgtcgaaatgccgaattccttttcaacagttccaaaagcttctcctaggtcaaagggtctggtttttgcattatgggcatccgatgcgatgaaatgcgttaagttgctctgaattaaatcaaacgaaaacttttgaattttcttccccattttgccggctacacttgtgccggtcagctgacttaacgccccttcttgtacgagtttatacagacgctctggattttccatgatttctcgatttctctctgggtgaacaataatcggcacaatcccctgcacttgaagatcaaacaagagcttattcgcatagcgtggtaaatgactggacgggaattcaattaacatataaacgccgttctcattcaccgtcagcaagtcgccttgtgtaagctcctctactaagtcaccataaatgcggttttcttgaccagggagaatttcaaggtcaatgccttcttgttgtagtgctttatttagaacttgtacatcttttaaaatcgctgattttgcattatcaaacgtgccatttttattgtgaggtgacgcgacaactttcgtaattccttgatcgaatgcctgacgggccatggcaaaactatcttctatgcttttcgctccatcatcgattccaggtagaatatgtgaatggatatcaatcatacctcattcccctttctctcattcttttctttgattcttctagattagcatactcttctctctttattgtaacttctttcaagattgaatcgtctagtatacgtgaatccgtaatcctcatttatggttacctctggaaggtatttactttactgaatagttcgacttataataaaggttagggttttatatgaagaaacggaacactattattctacggaaagatggaatgagtgaaatgaaaaagttcttaattattttaggcataattgctggtgtggttattctagccggtgggggatatgcgtattatctctatgattctgtgaaagacacagccagtgacatgcacgaacctattagtagagatacgtcagataagcgtacggaaaaagtgaacatggatgaaaaggaccctgtatcgattctattaatgggcgtagacgaacgggatggtgatcaagggcgatccgacacaatgattatgatcacactaaatcctcaaaatgattcgatgtatatgtttaatatccctcgagacacacgtactgaaattatcgggcgtggaacggttgaaaagatgaatcatgcgtatgcctatggcggcattgaaatgacgatggatacggtggaaaatttccttgatgtgccgattgattattattttaaagtgaacatggaggcattcgaagacgtggtctctgcgctaaatggcgtcactgttgataatccatttgcgtttgattatcaaggatattcatttccagcaggtgaaattgatttaaatgcagaggaagcgctagccttctcaagaatgcgctatgaagatcctaaaggcgacctcggacgaaatgaccgtcagcgcgaaatcattaagtccattattgatgaaggcgcgagtgttggaagctttaataagattgatgatttattaaaagccgttggtagtaacgtaaagacgaacatgacatttgaagaaatgaatgatattttcaaaaactaccgaggtgctcgtaacaatatgacgacatttgaaattcaaggtagtggcgaaatgattgacgggctctggtactatattgtttcagatcaagagaaacaaagcatcacacagaagctgaaagaacatcttgagattagttaataacaatgaacaggcactcccttcttgggaatgcctatttttatttgaatatgcctaatcgctttttcttttgaatacgttgaggcctctctttatctatcattttaccgttaaccattaactcggcattttcttgtaatcgatatcgaacggacataccctatttaccttctactatatcaaatgctcttcttatatcgaatggtcgagatgtcgtgttatgtgcatcagaagcaataaggtgcgtaagatgatgggaaattagttcatgagtaaactttttcatttttttacccttttctcctaaaacagccgaagctgttatctgacttaacgcgccttcctttataagctgatagagtattttggggttatcaatcatttcttgattgcgttccggatggacaataatcggcactaatcccttgatttgaagatcaaacaaaagtttattggtatacgcaggaacgtgatcctgtgggaattctacaaagaggtaggtaccctcatcgttaacagataacaactgacttcgttcaaagtcctctaccatatccccatagactcttatttccttaccagggagcacttcgagattgattccctctcttgagagttctttatttaagatcattacttcctgcaaaatggcagttcgctcgatatcaaagtgaccattatgatgatgtggtgttgcaatcacttttgtaatcccctcactcacagcctgtcttgccatttcaatactttgctcaatcgtcgactgcccatcatcaattcccggaaggatgtggcaatgaatatcgatcatacttcaatttccctttccgtgaagaatttctctacttctatcacatacataaaaagagattatcttattgttctatttagagaacaatcatatgttttatattaccatattttttaaattacttgcatattaacattaatcgtaaacgagtcatttactacttcaggcaatataaaaaagagttttagcggaaccgtccactaaaactctactattattctactatttgtgtatgatgttttaataaaatagttttgatttgctcaatatattcctttgctggtccagattcgcctttgttctcttcaacactctttacaaactgctcaatctctccccacattttcacgttcgtacgatccatctaaacgaccttcctttatatgtatttcagataatattacccgatcattatgaagttgtaaccacttttgtgtaattttttcgttaatttaccagcccctctgacggtcatagtagaatgaacacacacgattaatttaattagtaataaaaaacgttcaatatgggtaaactagagttaagttacaaatatgtatgaaaactagcgaaaatatttttcaggaaacgacaccgtttgatagcgctatcatttataatagaaggaagtcaacctgctttaaccggatgaactttcttttgaaggggatgaggttatgcattaccaggaagaaggcaattttgctaaaggaatggtgtggggcgtctcattaagtattcctctctggatcgcagtgtttgggtgggctaagattatgttgagtgcagtaagttaatatatatgacaaagaaggacagtgcgcacgcactgtccttctttgtgtttttgtattaatggaccaggcacttagtatcgcttcggaagctctgtttgaacatcggatgactttcagctggggttagaatgtgaaatcctattgcggatcgatcagctgaaccaccggcatttaatcttagcatcaaatcggctttgtgttgttttgcgatttccgctctttcttgatgcaatgatccttccattaagcgcccttaacaagtcgcttggcaatttccttcaaccagtatatgggactattggtagggatagcacttgagagtgagatgggttctgtctgcgtggggtggatttggtaggggttttgtctttgaagggggtcaggctcgagcctgacccccttcaaagacaaaagataaaaacaaaagacaaaagacgaaaataaaaataaaaagacggtcagcgagtgctgaccatctacttctttattcaaacatctcccaaatctcatcctctacgtcttcactgaccgcattcggtccaccgaagattgtgaagaagaacgtttctttgtcgataaagagatcttttacttcctctggtagctcatttttcttcgttaagagaaccggctcgtagaagtttgcggctagaactgagccggaaagagcatcggcgtagttttcaccggttgctagattcacgaattcacctggcatatcaagctgtcttgcgacttgaactgacgtgtcatagcggttgtctcctgcgatccgctttggatgcggtaatttgttgaagacggtgttgctcacgactgctgttccaccaataacgtacgtgtcattgtagttttttaacgcttttgctgttacagctggaagctcttttgttttcgttaaaagaattggacttccctgtgaagcagcgaccgatgcgacagatagtgcatccgggaagtttcctccgtacgtgacgaatgccgtgtcactaaagtacggatcgatttcctttgcgatcttggctgctgtttcgtagcggtcttttccttcaatgcgatcgtaatcgatgcccatttttgtgagagatttttcgatatttttagagatcgctgttgccccaccaagaatcgtcacgtgctcggttccaaaataggcgagcgcttcttttacagaagccggtaactcttttgttggtgaaagaaggattggcgcacccagttgaagtgcaagaggcgctccagcaagagcgtcagggaagttttgtcctgttgcaagtacaacttctggtgtatagccttcctcaaatcccgttttcgctatttcgaccgctgtttcgtagcgatcttcccctgcaattctcgtgacaactggatcatctgaatacgtgaatgccgaaaaatagtaatctacgttattgtttttattcgccgtatccgtcactcgaaaatagtaggtacctggctcaagctcttcgattgcgccgtagtaaccgtattcgccatcttcaaagtccggtgttagtttgttttgattttcatcataaaggtcaacccaaagttccatcgtcggctcttcttcgtccgttcccgctccgaaagacagagaaactggttcgtctgcttcgacttcaagtttatagaaatcctcgtcttgatcagttagtttccccgtcgccacgtcatcgcttataaggacgtttgcttctttgaaactattatttggttctacttcagaattatattcccactcatcataatcatcgttcatggaaattttctgcgccttcttcataagcgcatcatgggtggaagcagaggcaacaggcccaccgatgaggcttcctgctaggatggcggttgataatagtccaagtgcttttttcattcgtttcttttcccctatcattctcattttttaagcaaaacgagcatgtcccctgctccttcatcacccttccgtttctaaaacgctaagaagattatatatagaaaccgccattatagctatagcgttttttgtcgaatgaaagagttaatttaacaaagaccggatcagtgtctgggccctattctatttaatcctaggatttttttacaattaaaaaggatgttcgctgaccatgacgaaaggagtatccagtcacttccaaaaaaggagcggtacattgaagcttgtgctaagtcgaaaaggattcgatgcaggaagcggcgggagactatcaccgtacgatgagacgacgggtcgatacgtttggttgccgatacctgagcgaaaagcggtatttcagtcgaggattaggtatgatgagattcctgtgaagagtgggtatttaggggttggcattgggacgaatgtgagtgatgtttatcaggagatctctcgaacttctaagatcaaggtaggcgatgataagcgagagatcgacgacccggatatttatgcgcattttgatccgatgcttggaaggccgccatgggttccagaaacgagtcagcttcagatcgggaaaggatttggtcaggcaaacgcagcaccccatttgcggagaatgaatgtggcggatggcgatttgtttcttttcttcgggggttttaaggcgattggtaaagctcggaaaggacattttttgtatggatggatgaaggtgaaaaagcggattgaaacgtatgcagatgcgcaagcggcttcagataagtatgggctcgagcgtcatcctcacgtaacgaaggatgccttttcgaaattaaattatgtgtacgtgccggatgaatggttgtttgaagatcttgggatacctgggtgtggttattttacgacattaagtgaaggattgcgtttgtctgatcggcttgatgggcgtcatggcacgtggcggttaccttcgtttctttatcagaatattagtcaggttcaccatcgtacgtggcaagaggatggtgacgggtgtacggtttcgaccgggattgggcaggagtttgtttgtgcgaatccaggtgctgatggggaagcttggatcagggagctgtttgtacgtaatgaggggaatttttttcgtgcaggggttaggagcgtgtaggattgctctctattaagtacatgtacctaaatgaaagttagaatttggataaaactagactttcgatgggattttctgttatggaagaaaggtactctgttccatatcttccctccatttcctgtattataatggggaataacttatttgagaggagcttgctaatgaaatttctacacgttcttggatctcttgtccttgcttcatgtttttatttattcgtttttgaagacaatgcttctgcaatgatggatacagggtcgagaggatcagaggttgagcacatgcaaagggtattggagaagctcgattacttccacacgacaccaacgggctactatggttcggttacggaagaagcagtgcgcgatttccaagcggatttcggacttagcgcggatggcgttgcggggacgaatacgctgaacatgctgagtaatcttgaaatgatcgctcacgttgttcatggcgagtcacgtggtgagatttataaaggaaaggttgctgtggcgtctgttattctgaatcgcgtgcaatcttccgaatttccaggaagtacatacggggtaatttatcagcagaacgcatttactgcgctaaatgatgggcagtattggctcacacctgatgcttcttcttaccgagctgcgaaggatgcttactttggttgggatccgtctgaaggagcgacgtattactacaatccgagcggcgtttccgatgagtggatttattcacgtgaagtgattaagacgattgggcagcatgtgtatgcgaggtagaggatgaaagagttaatgccataaagtccgcctgaggcggactttatggcatttttgtttgtgaggggggtcaggctcgagcctgacccctttcactcacccctttcactattaaaagcagcggtagttccccttatgataagagagggtttgaagagcactcgttctcgtgtcaccacacgtttatgtatttcctcgatcaacacgtcgacaatctttcgccccatttcctcaataggttgagaaatcgttgtgagcgcaggtacggtagtggttgctagaatggtgttgtcaaaacctacaatggataaatctgaaggcacctgaattcccaattctcttgcaccctggatcgcacctatggcgatgagatcattgcatgcaaagattgcagtaggcggatgctcacgctggagcaactcttttacgcactttgctccattatcgagagaagccgttgttcttaacatattctcttctactaaggtttctccaaaggcttcaaacgcatctcgatacccaaacgttctcattcgactactgtgaacgtcttctcctataatagcgatattccggtgaccaagtgataatagatgtgaggctgcatcatatccgcctttgtagtcatcaacagatactgtggttacatcaagagaagggtcgtcgaacgaaagcatagccagcggcatcttattttgctttagttcatctaataaacttttgtctcgaaagcctgaggcgataatcaatccatctacctgctttcgctgtaaaagctcaatgtatttcttttctttctctgcctgatcgtctgtgctacacataatgacactcattcctcgatcatgagcgcgatcctcgatggttcttgccatttctgaaaaaaatggatttgaaatgtctggaactaagagtcctagtgtttccgttcgctttcccgttaaagcagaagcaactacgctcggatgatagtttagctgcttcatcgtttcgagtacttttatgcgtgtcgcttcacttattttaccggtatggttaataacctttgaaacggtggcaattgaaacaccagctgctttcgctacatcatagattgtggctttcaattattctcctcctttctttccaaacttctctgttcttctatttttcatcataccatttatgtagcatacttggcttcttggacgagctatgcgaaaagcaggctgagcgctcagcctgcttaaacgataaccgtatggggcttattgtgaacaagtttacgcttctcaaaggattccttacaagcatagccaagcctggtcgattccacgccgtcttgaactgtcacggccggctgtcgaccttcgagaatacaagtaataaattcttctacctcactacgataggcctgctcgaaacgctcgagaaagccatcaacgcattcttgtaccgctcccaactcgttaaagagaaccacttgatttcgttcgggaacggttcctattcgaaggctccccttggtcccaatgatttcggtttcgatatgataaccatgagcacagttccgtccagcgagaaaaacaccaatcgcattgttatcaaagcgaaccatggcagctcccgtctcagcatcttgaagggcatcaaattcttttcgttcataccctccaccaatcgcccaaacttctttcccttctgatccaagataccagcgcgcaaggtcaagatcatgaatcgccatatccagaaagagacctccactataatttgcttcagcaaatttaagaaaactatctattttagcagcaggatcaagaccgtagcagcgaacaaaaatcgggtcaccaatttcaccgcgatcaatcttttctttggcagccaaatacgatttatcataacgacgcataaatccaagcatgaaaacctgatctgggtgtgcttttacagctctttctacgtcgatcgcttcttctaaatataatcctaatggcttttcactgaagacgtgaaaaccagcttcaagcgctagctggatctgattacaatgaaagccagaaggagaagcaataaagatcgcatctagttctttgttcttgagcatttcttcataggtcgtgtagccatatggaattttccatttagactgaacttcccacacttcttcttcaacaacactacaaacagccgttagctcacaatgaggaatgcggaaagctaaattttcggcatgctgtctgccaagtcgtccaagaccgacgattccaacttttactttttccatatgatcccccctacactcctgcagtttcttttaaatactgacgtgccatgagagcgtattcaaatggattggcaattgcaggatcttgttctgcttcaacgaggagccatcctgtatagtctgattccccgattgttttgagaataggagcaaaatcaatatctccgttacctgggacggtaaacacgccttctctaactccttttagaaaactgagtttttcttctttcactccattagcgatcggattgcgcacatcttttagatgaatatgttgaatacgatgctgaaatttcctcaatatctcaagaggatcttcaccagaaaaatacaaatgtcctgtatcataaagaagatggactttctctggatctgtcatctccatcagtcgattaatttctgctgatgtctgaataccagtccccatatgatgatggaaaacaagcttcatgcctttttcgtgggcgcgttctccaagccgttcgagaccagaagcaagtcgttcccattcttcatctgaaaatgtaggcttttgctcaaacagtggaatatcctgcccttgaatgctttttccttgttctgatacgacaataaccttcgctcccatttcataaagaaaatcacgatgttcaatgaaggattcttccgttgtctcaaatggttttgttgtaaggtaagaactgaaccatgcgcttacaatttcaatgttacggatcgataaagcccgctttaaaacaagcggatctctgggatatttattgccaatctccgttccggaaaatcccgctaatgccatttcactcacacattgttcaaatgtaatttctttcccaagctccggcatatcatcatttgtccatccaattggcgcaatgcctagctttacactgttttcacgaaacataacttcctccttaatagcgacgtgctatttctagttgcttttctttctctttatacgcatgttggatcgcttctttcttcgacgtttcagctacgccaacgtgccaccatgagccatagccatccgtcatcgttttaggtaaaactttaatgtcaatcagcgttgatacgttctgatgtttcgcatcttctaatgcgtttttcagttcatctattgttcgaacagaataggttttcaccccatacccgctcgcacttttcgcaaaatcaattggcattagttcaccggttaactgatgattgtctcgtttccgaaactccgtcccaaagctccccatgccgttccccatctgcaagttattaatacagccgaacccagcgttatcaaaaagaatgacgttgattttaaggccttcttgtatgcttgtaactagttcggagtggagcatcatataacttccgtctccaaccatggcgtatacttcctgatctggagctgccatttttgctccaagtgctcctgcaatctcatatcccatacaagaatagccgtattccatatgatacgtgttcggggaatgacttacccacatgcgctggagatctcccggtaaactacctgcagcaccaacgacaatcgcattttcagcaagagaacggttaatttccccaagaaccgctgtctgtgtaagggaagtttgaagaacttgctgatactcggataaatcaagttgtccatctatttcaggttgatagttttcgtcttcatagttcgtagtgtataggcgttcaagttcatctttccattccgctttcgcttgctcaatctgatttccataagcggtggaataagttccaagatgatcatctaatgcttcaagggccgttttggcatccgccactagcgttgtcgcatcgaatttatttgcatgatagtctgagagattaatatttaaaaaagagacctcgctatgttggaaaagctgcttggatgacgttgtaaaatctgagaatcgtgtacctacacctatgactagatctgcttctctcgccaaatcatttgcagctttgtttcctgttacacctactccaccaaggttgtaagcgtgagtgctttctacagcgcttttacctgcctgtgtttcagcaaaaggaatatgatatttttctgcgaatgcctttaatgtctcgcccgcttcagaatagcgggcacccccgccgcaaataatgagcggattctttttagaagtaatcagttgaacggcttccatcagctctgtttcactaggctgtcttcgatttaaacgatgcacccttttcttaaagaaactttccggataatcatacgcttcaccctgaacatcttgaggaagggcaatcgtaacagcacctgtgtctgctggattggttaaaacacgcatggcatttaacatggctgtcatcaactgttctggtctcataattctgtcccaatatttactcaccggacgataggcatcattcgtcgtgatgcttgcatcatgggcttgttcaacctgctgtaataccggatctggctgacgcgaagcaaaggtatcacctggtagaagaagcaaagggacattatttgcagtagcggtagcggcagctgttatcatattcgctgcaccagggccgaccgaggatgtgcatgcgattagttgcttttgatgattctgcttcccaaatgctgtcgcagcatgcgccatcccctgttcgttacggccttgataaacttctagatcaccagaatcttcttcgagagcctgaccgagtccaagaacatttccatgtccaaagatggtgaaaatccctttaaaaagcttctgttcctctccatctctatccatatactgttgattcaaaaattttataagtgcttgagccattgtcattctcaagtgaccacctccataaaaataaagaaagaatttgctcgaaaattgataaccctcaatcagggaagaaagccggacggtctgcccctatccggccgttctttttttatacccagcgcgttgtgacgacttttttgcgcgtgtagaattctactccatccgaaccatttgcatgaagatcgccatagaaggaatccttccagccagagaatgggaagaaagccattggggccggtacaccaatattaattccgagcattcctgcatcgattgtttctcggaaggtacgtactttaccgccgtggtttgtgaacaggcaagctccattagcaaagcgagattgatttgttagctctacggcttcttctagattttttacacgagaaatggaaagcaccggagcaaaaatttcgtcctgccagattttcatttcgctcgtcacattatcaaaaatggtcggtccaacgaaataaccttctcgttgaatgtcctgatcctttcgaccatcgcggatcagttttgcaccttctttttcacctgtttcaatgtattgaagcgtccgttctttgtgctgatcacgaataactggtccaaggaaaacatcgtcctcgaggccattcccaattttaatctgattcgacttctgaacgagcgtttcgataaactggtctgctacactttcttctactgccacaaccgaacaagccatgcaacgctcaccagccgaaccgaaagcggcatttaacacctgcgttgctgcattttctaaattagcatcttcaagaataatcgaatggtttttagcacctgctagcgcttgaacacgcttgagattctctgttccttttttgtacacgtattctgccactggttgagatccgacgaacgaaatggcttttacttgtttatgttcaagaagaccgttcacgacgtcatgggcgccatgaacaatattaaatacacctttcggaagcccggcttcttcaagaagctctgcaagacgattagcaaggaggggcgtgcgttctgatggcttcataataaacgtgttacctgttgcgattgccatagggaacatccagcacgggaccatcattgggaaattaaacggtgtaatgccaccaacaaccccaattggataacggtagacacctgactctaatcctgttgcaattgacggaagctgtgaccccattgttaatgtcggagcacccgcagcaaattcaacacactcaatcccacgttgtacttctccctttgcttccttcacattttttccgttttcaatcgtaatcaactcagcgagctgatcccagttatcgacgaggagctgctggtacttaaaaagaattcgtgcacgacgaggaacagggacttcactccatgttttaaatgcttcctttgctttcactactgcatggtcaaggtcttcttttgtagaaatcgggacttccgcaatcacttctcctgttgctggattgtataccggctgatattccttagtttttgaatcaatccattctccacctacaaagttttgaattgtttttaccgctgtttttgtcatattatttcctcctaaatttagactggttgaaattctgttgtacgaattttttcatcaacttcttctctcgttggcattgcttctgaacagctgtgttttgagatcacaatacttgctgaagcgcttccatatttcatcgcttcagataaatcccattgatttaataatccatatataaatgcagaagcataagaatcaccagcaccgaaggtttttagaactttcgttttgaatatccccccgcgatgtgcactaccgtctttcgagtaagcgatcgaaccttccccaccatgcttgattacgacgaattccgcatgatgatcaaaccatttttgagcggtacgttgatcacttttatcctctttctcaaattgttccatcatattaaactcttctcttgttccaataatcacatcacacttttctgcagcgagattataatagatggctgtctctttggctgaatcccagctgtaaggacgataatcaaggtcaaagatcacgatgacgtcatgtttacgtgcgtattcaagagcaagaaaaacagcttctcttgaaggactttgagaaagggcagttcctgaaattagaagtgattttgacttccgaatatagtcttctgaaatatctgtcgtttcaagttttaaatcggctacgttatctcggtacatgaggatgctacattcctcaggacttttaatttcagtaaaggcaaggcccgttactgcccctgtctgatccttcacgacacttgacgtgtcgattttgtttttttcaagataatcaacaatgtagttccccatttgatcacttgagaccttgccaataaatccgctttttaagccaagtcgcgccgctccaatagcaatatttgctggtgaacctccgacgtatttcgtaaaagaagaagtttcctccatcggtcgattgatctcatttgcgttcaaatcaatgcatagtcttccaagtccgattaaatcaatagggcgatcttttttgaactcaaggtgatacatttagttccctccttctcgttaggttaagcgcttacccttttggcgttatttcattacgttttcaaatagccattcatgatccggatcgttatggaatttccatgttctttttggaccagccattacattcaaataataggactcatatcctggaacagatgaaacgggatggtacccttctggaactagaacaacatttccattctcaacgctaagtgtttcatttaagctccgactgtcgttatatactcgttgaaacacgaacccttgaggtggattaagttcatggtaataggtttcctccagataggattcacgtggtaaatcatcacgatcatgcttatgaggtggatagcttgatgtgttgccatcaggtgtatatacctctaccacaagtagactgtccgcctctttttgctctggtaagatattgtgaattttccgagacatctttccatgaccacgatcttctaccccaacatcttctggagcgattagtcttgcttgataagaactcttaccaggtgccgagcagacagcgagtttcatatcacttagtgctcttacttcatagtaatcatcgtttggtatataaaccgaatacggtggaattttctcgaaaacactcatccgttttccaatgttcttaaaactttcttcctttgtttgaacatcagctttcccgcttaacaagacaagacaaacttcttgattgttcgttttcttctttagcgtactcccagcttctaacgagtaaacttcaaagccaacatagtcccaccccgctgattcaggagtaaccctaagaaggttgccttcttcagcttctttgttaggtttaataagcaattgagacatcatcaacttcctcctccataagatttaaggtaagcgcttaccttatctatagtcgagtctacatcatgaagttcaaaaattcaatctatttctactggactaaactcagtaagcgaaacagttcgaccttctttccaggacaagcgggctgcgagcgcaagattttcagcctgcaaaccatcatacccactgcacgttaacggcttgttgtccaaaatcgataaagcaaaatctcttacttcttctacataggcgtctttataccgatcaaggaaaaaatgcttagggtgcgcacttgaaattgcttcttttgtacaaatttgtacagtcgtgttttgttcattctccgcggaaacaacccctttattaccaaaaacttcgatcctttgatcatatccatacgctgcctgacgactattatcgatcacgccaagactaccatcttcaaaagtaagcgtgataatagctgtatcgacatcatcgtggcgcgtgaatttctcatcaattagattggccgctttcactgtgacatcgacaacctctttaccagataaatatcggatcatatcaaaatcatggattgtcatatccataaacataccgcctgaacgctgaatgtattcttcaggaggtgcttcaggatctcgtgaggttactttaatcacatgcggcagtcctattgtgcctgcacgaacggtttcatagacttttcgaaagtgtttatcgtagcgacgattgaaaccaacttggaacttcactcccgcatcatttactacttgaagggcttcacgtgtttcttgaagtagaaaactaacaggtttttcacaaaacacgtgctttcctgctcgagcagctctcttaataaaatcggcgtgtgtatcagtggatgaacaaataaaaatcgcatcaatgtccggatccataaagaggtcatcaggattattcgtgatcattgcctcctgttcatagtgcgttccctttagatgagaaagatgaatatctgaaatgcttttcaatttatagtacggtgataaaattaagttatcggcgtgtaattgaccaattcgacctgctccgataatacctacagttacttttgacatggtagatcccctttctttataacgaagattgcttaagtgattgattgaattctgattgatcttcttgctttctttgtttcctattcgtatttctccagaaccagaatacaccgcctattaagataagcgttccaagcatgaagataagcgacattggagaatactctgcacttgcttccgctactccaattggtgagaagaatgcatataccccaatcattaataacaatataaatacggaaaaaacctttgcgtgcttccagggtgtaagatccacttttttagaatcatacaactcgtaggcagttgatcttggacgtagctttccaacgagcaccatgacaaaaacgttaagtgggaatagtattgaaagtacataaagaaagttcacattcccaaggaaaaactttgatagcgcatacacaacaatgtgaactacgatcgttatttttggagcacttgaaggaacgtgcttactgaagaagcctactactaccatcgctatgattggaatgttgtaaaaaccgaacatttcctgaagatagtaatacaatccagaaggtgcaaaaataatgaatggcgcaacgattactgcaacagccgcaagacctcctgcaaaaatcctcccaactttgactaactcccgttcttttgcgtctggtttaaacattggacgatatatatctagcgtaaaaagagtgatcgagctgtttaaagctccattaaaggaacttaaaatcgctccaaatagaacggccgctagaaatcctgataacgcgagcggaagaacatctgtcacaagcgctggataagccatatcagcgtttttaagtcctccttctccatagagcaaaaaggctattatgcctggtagaacaaggaagaaagctccaaatattttaaagaaacctgcgtaaagtacgcctttctgtccctctgcaaggttcttggctcctaatgttcgttgaatgattgcctgatttgtacaccagtaaaaaaggttattaaaaagtaggcccgttagtagcaccgtccatgggacagaagattcatgattgccaattgcattcagcttcgctggatttgcatgaagtagtttatctactccatcaaccaagtttcctccaccaagagcgactaatgcaagaaaaggaatcataaaaccgccaataattaagccaacaccgttaattgtatcgctaatggcacaagctcggagaccaccaaaaatgacataacagcagccaataatcccaattgctaatgcaacaatcataacagttgtgaattgacttgttccgctaatgctagataatgagaaaatgctatctaatactagtgcacctgagtaaaggacggtgggtaaataggctactgcgtaacctagaagaaaaagaatcgaaacaatttgtctcgttctaagatcatacctctgttctaaaaagtctggaattgttgaaatccctgcttttaaataccttggaaggaaaataaaagccataaagataagagcaataggagaagttacttcccaggccattacgaccattgattctccaaatccttgaccattcaaccctaccatttgttctgtagagagatttgttaaaatgagtgaacctgcaataacaattccggttaaacttcgaccagcaagaaaatacccatccgaactagttaagtctgtctgtctcgtcttataccatgaaaaccaggcaacaaaaatcgtataaacaagaaaactactaacaatgatccacatcataggcgacgtcctccgtttcattaataatgtttgatacattactcacacagaaactattcagaatcctcaactcacattaacttttgctactaagtaaggaaagcgcttaccttaatgttgaaataaaaaagcgaaataccgtcgcttttctcttctatctttattaaaagatacgtcgttaatccagcacgtatttctaataaaatagtacttatagctaataatcacacctctctctatcaaaagaaagcgcttaccttaatttagtataaaacacgttttttattaacgcaatacattttgtgatttttctgaaaataaataatggtatctaattaccagtataagcgattaagtaatgggttttttaatacgatggtttaaccagaaaagtccgcgtgaggtggacttttctggttttttgtttgttgagggggtcaggctcgcgcctgaccccctcctttcccacattctttgttaatttcttcacaatttcttaacacacacaagagctaaaacacgttatgctagaggcaaatgggatagtaaaggaaggaggttgtgttcatgggagtccaactccgtaaaggcatgattgatcgtcgaacctacctaattcgtaagctactaaattcacctgataatcggaaagatcttagtaagttacacgagctcacgttaaccgagcttgagaaaatgtatgcggatgatagtcggaataaacaagtattgtagttgttaatgaagttcaatagataaaaaggagcttaatgtccgccagtggcggacattaagctccttttgtttgtgagaggggtcaggctcgagcctgacccctctcactacatttttagcaagtaaactcttgattcaaacggctgaagatgaatgttttcgatgtcttcactttgatttccacaatagttgctgatgagaagttcttttgattcataagaaatagactgaggtaacgtgaagtcaaactcctcaccgtagaaattatttaggacgagcagctgctgttttcctagtgtccttgtatatacgaaaagggatgggtgatctttcagaattaaatcatacgttccatgaacaatcacatcatactctttccttaattgaatgagttgcttgtagtaatgaaaaatggaattgggatcgtctagcgattgagccacgttaatgtctttgtagttcggatttacgtcgagccacggtgagccatctgtaaatcctgcatgtttggaatgatcccattgcatgggcgtgcgagcgttgtcgcgacttttcgcgtgaatagaagtcatcacgccattttggccgtaatctccttcaaggactctttccttatacatgtttatcgtttcaatatcctgatattgatgaatcgtctcgaagttcacatttgtcataccgatttcctctccctgataaatgtaaggcgttcctttcatcatgtgcagaagggtggctagcatttttgctgattgttctcggtaatctgtatcatttccgaatcgtgagacaatccgaggttggtcatggttgttccagtacaaactgttccatccttggtcagccaatttatattgccacttcgatagattttctttaagatcatgtaactccaatggtttcagatcccacttttttttgccctttattttatcaaggctcatatgctcaaattgaaaaaccatgttaagttcttttcgttcgctcgctgtatagaggagcgcttcatctggggacacttttgggcactcgccaactgtcatcgtatcgtagtgtgagaatacttcgcgattcatctcctggagaaacgtatggacgcgtgccccgttgtgttcgaaggctttgttcacttgcaccccttgttcaaaatcctcataaggcgctagaaattcctttttggaaatcatattaatgacatccatacggaaaccatctacacctttatcaagccagaacttcatcatcgaataaatttcctgacgaagcgctgggttctcccaattgagatccggctgctttggtgagaacatatgcaggtaatgttctcccgtttgttgatcaaagtcccaggtcgaaccaccaaaagaggcttcccaatccgttggtggctccttctcctcacctggtctccaaatataataatcacggtaagggttatcttttgatttgagcgactctacaaagaaaggatgctcatcagaagtatgattcaccacaaggtccatcacaagcttaatccctctttggtgcatctcctcaagtaattcttcccagtctgccatcgtcccgaattcaggcataatcttctcataatcactaatatcatagccattatcatcatttggcgattgatagactggtgataaccagacaacatcaacccctaattcttttaaataatcaagcttagagatgattcccctgatatcaccaataccatctccattactatccttgaaacttcttggatagatttgatacacaacactttctttccaccacatgctgcacactcaccttccattatgtaaagctttacatttccaagaaacagacagggacttgccccgtcatgactgatgctattttcgttctgcctctgccacactttctctcatgcagatttcgtatgggataatgcacttctcataatcaaattgagcattttcgatcatcttcatcatgataccggcgcccttttgacctaacgcggtataggaatagtgcacaccagatagtttcaatcttgatgccttagcgagtacggtatcatccaatgccagcactgatacctcgtcagggacaacaacattctgatcttgtaaataattcagagcgccgatcgccattccatcgtttgctgcgaccaccgctgttaactgattattttccgcatagattaattccattttgtgatacccgtcttcgatatggtaatttccgttaacaatgatatcagaatgacattggattccagcttccttatgggcatcaaggtatcctttaaatcgttcttcaccgttaatggaatgttttggtcctccaatgaacccgatggtcgtatgtccgagttcaatcaagcgctttgtcccctcgaaagcaaaattatagttatcaaaggcaacatacgggatcgcatcttgttcggtattctgaagaagggaaacgaccggaatcggtagctttttgataatctcaatatgctcaggctgaaacacccgcgttgcaaacataattccttccaccctctttgagcgaaaaatttcaaactgcttgagttcgttctctagacttccgttcgtgcaagcaattaagagattatatccttttgccccaaggacttcatttacgccattgattacccgtggaatcccttcaccagttaaatcatgcacgatgatgccaatcaagtgggtcttttgctctgcgagttccctggctagaatattaggagaatagcctgtttcttcaataatctgttggatcttcttcctcgtgctttcctttacaggcccttgattattgaacactcgtgaaacagtcgcaatcgatacaccagcttttttggcgacctctgtaatattgatttctttcttcactacggcttcccccttctgccagctcacagcttacactcttgtctttaatagtcccattttacggctttaagtctactttttccattcttagcgaaaaattggacaccatcgctattttgatttgggaaaatgcgcgacgtcatcgctcgttccccatcgttgatgaacacttcaacagaagaacgatcaacgaaaaggtggaatttcactgcttcagctaaaaaatcacattgtctgattgaaccatatttctccgcaaatggttggcctgaatgagagcggtcaaatactattttcttattcacgacatcatatttaatgatcgtctcttcaccctcaccacaccttaatgccacgccaacttcacttgcaaatagatcatgaaactcacaaatcaattcatatgttgtgccattaaaatcggcatagtcttgccgtccattttctatgatatcatgaatctctcgcttcgctttacgcttgtttatcatttccttcactggtttttgaagaagttttccattcttaatcgataattctcgtggaatcgttaagcagtgagcccatccattttgatctgtcggataatcgatctcaggtagtcccatccacccaatcatgattcgtctccctgaagggtcttccatactctgtggcgcatagaaatcgaacccatgatcgagctcatgaaattcgccatgctgatagtttagtgacggtaatcctaacgaatcgccaatgatatagccagattgataaatgttttgaaaggcttcgcctgaaggttctaatccttgtggagaaaacatgagaacaccgttgccctcgagctcgaaataatcagggcattcccacatatagccaaagttctctaattgtgtgtctagttcacctaggaaagaccaatgatttaagtctttcgattgatagacgaccacagtgcctgtcagatttttacgctgtgccccaatgatcatgtagaaggaatcgtgatccttccaaacctttggatcgcgaaaatgatctgtgtatccttctggtacatggtcaataatcggctcactcgccttactaatttcaccattttgatccatccaagccatgcactgataaggattgcgttcccaatccttgttcctcgtatttccggtataaaataagtagagttgttcgttatgctcgataccacttcctgaatatgcaccatggctatcaaagaactgatccggacgaatgccgatcccaacgttctcccagttcgttaaatcctttgatttcgtatgataccaatatttcaatccgtgaacaggaccaagtggaaaccactgatagaataaatgatattccccattgtagaatgaaaagccatttggatcatttagtaatcccgtttctggttgaatgtgaaacgattgcctccatggacattggtcaactattttttttagattgtgaagctcgtgttcactcacttcgtctacttttcgatatcgctgttctctcgtccactccatctttatccctctttcaaaagaatgaggagaaccataggattctcctttcaatgatgactatgctacttctctttcttgctcttgttgaactgtattcgattttctttttgatagaatgattgtcgtagcaaatgccaccacaaaggtaatgatcattcccaccacataaaacaagattgtatctgctttaatcgaaatgattcctggtaatcctgctgcaccgagtgcaatcgctttggtcttaaagaaggtgacaaaagctccacctacgcatgatccaaccattgcgcctataaacggatagcgtaattttaagttcaccccgaacatcgctggttcagtaattccaagaagagctgaaattcccgcagctgatgcgacacctttcatcttcttattcttcacaatcagtaatacagctaacgtagctgcaccctgtgcaacgttcgacatggctgcaagtgggaaaaggaatgaaccaccggttttcccgatgtctgctaacaattgggtttcgacagcgatgaaactatgatgcatccctgtaataacgattggagcatataagagaccaaggatcgctccgccaataaagcccgttgtatcgtacatccagatcataccgtccgttacaagattacccgctgttcgtgtaagtggtccaactaatgtaaaagttaaaataccagtgataaatagtgttaatagtggcgttaataaattatcaagagctgttggaataatttttcggaaaaattgctccacttttgccaatatatatgaggccactaacactggtaaaacggttccttgataaccaaccttctcgatttcatagccaaagatattccaaactggtatttcaccggttacaagtgccccgccgtatccccaaccatttaatagatctgggtgaaccatgatcataccaagcgttgctcctaagaaagcattcccaccaaatcgttgagtagcggaaaacccaattagaatcggcaaaaagacaaaggcagcgtttgcaaaggtgttaattaaagcggctaaatctgctacgttcggaaaagcctgaacgagtgactgcccttcaaaaaaaaggtccggtgccgttaagagattgttaattcccattaagagtccaccagccacgatggctgggatgatcggaacgaagatatcagacagcatttttacaaattgctgtagtggattaagcttcttcgtacttgcctttttcacatcactcgttgacatctcaccgagtccagtttgcttcgcaaattcagcataaaccttattgacagtacctgcgccaataatgacttgatattgaccaccagtagaaaaggttcctttcactacgtccatttgatctaatttctcttgatcaacgatcgactcatcgtttagcacaagccttaatcttgtggcacaatgggacgcagctgaaacattatccttaccacctaacgcctccagtatttcttgagaaacttctttgtaatccatgattaccccccatttcattatgtaaaaaccggaatgtaaagctttacattttactattaaaaaaatgaagttaaatatgtaaaggtttacatttaacttgttttgatcttatcctatctgttcagcttagtcaacaggaaaaatattttatagataaaaaacctcgcattgtccgcctagggggggcaggggggacaggctcgagcctgaccccccctctccctctttctatcttggttgacttaacaccaatatgagttagaataggatactcggttcaactatagccggaaatttcgacattctctgcacatatatcttaagctgtgctgtaaaaaaagagagccgagaatcaaatgtgattgaaatggaaggaggttgtgttcatgggcgtacaattccgtaaaggcataatcgatcgtcgaacctacctaattcgtaaactactcaactcaccagacaacagagaagacttaacctggctacatgagctcacgttgactgagcttgagaagctttatttgaatgaaaaacgtaaacaagtacagtaaatatataaaggctcgcagtccgcccacggcggactgcgagccttttttgtctttgtagggggccaggcacgagcctgacccctactttgacccctactttatctccactctattaaaataccgccccgctcgctctaacagttgctcttccacccttccatcataagccactataaaacaagtcgacggccctgaagatttgtgaagatcaagatcagtctgaaccagtctctcctcaacttccacgccatccacaagctcattcaactcatagagaatccctttcgatccaactggaagcactgcctgaacgccttcctgctcactcatccagcgaaagagttctagtggagcgatggctgtctcttcgttcacaacttcttcgccaacgaggggtttaccaatcactgcgaatctcgtagtgtcatctaaacgcacttccggtaactcgtgcttctgcttcccgattaccacaacccctagcgccgactgaagcaggggcatattcgtttccgagctccctgtaatcgtgatctcgtggtcaaatccaagctctcgtttcccacgctccacaccgctcaccagtgcttcccactcccaaccaccgcaaaaattatgcatcacaacggaaatgggaacgccgcggagggcgatgttttccatcaccgcgacgcgaaacgcgtagtaggcgacaacatcatatggaacggaaacttggtcttgctctttctgcccaatcgcgccgctattgtcgcttgtgataacgagggtttcgtcgccaagtccaatgactgtcccgtctctcataagctggccagtccccttttctcaaaaagtggcacgaggcgagggatcaaaattaacgcaagagcaagattcaggacagaggcaatcaccaggctcggaacgattgccacgtaaaatcctgtgcccatcaggaataagaaaggaagcggcgcgacaagtccgtttccgatcgcaaacgtagcggaagcccacttcgtttttttcgcttcatacagttttccaaacagccagacgagcgccgccatttcggctgcgataaagacgtgcattggaccaagtggaaaaccgacgataagcgctgataaaagatgaccgaagcttgcgattaacgccccacttcgactaccgatcaatacagccgcaattagcgctgggaaggcatcaagcgcaatactgccaacagctgacggcatttttaaaatcgcgccaacgacggaaagcgcaatgaacatcgcaagaaggcttgctcgttttcccatgcgttactctcctttacgcttcccgccccggaacacctttgcgcttcttgcgtactcaatgtcttttacatttaagcggaagttgatgactctggcaagtgcaaaaaagtagtcggatagtcggtttaagtatttcattggaactgttggtacgttttcagcttctttcattaacgtaaccacatgacgctcggcgcgacgtgtgatcgtccttgcgatatgaatcgtcgcggacggtttgctgccgcctgggaggatgaacttttcaagagctggtgcttcttcaataaattcatcaatacgcccttccagatatgtgatcgattcttccataagttttaattcacgctttggcgaaacgttcgctaggtcgccaccgcagtcaaagagctcgtgctgaattttttctagatcgtctactaagtcgtttagcgactcgtttccaatctcgcttaattcgacgatcgcctgtccgacgaaaccgttcacttcatcgaccgttccgtaagcgtcgacgcgcacgtcatctttatcgactctgccaccgataatgctcgtttttccttcgtcacctgttcgcgtataaattctcatccctttttccccctttgattatttaagctgctgattcagaccgtaccagatcacgtcaacgcggtcagctactgccgcgagatcctggtacgcccatccggtgagatcccgccagtcgcggtcttctttttccatcggtacaatgccttttgtaatatccgtgccaatgatcacgacggttcgttcatgacgctcgctttcccacgtccgccagatcccaagaagcgactgccagatcgcccggcattcttcaagtcctgattcgaccgttagccccttgagccactgttctacgccttcaagaacgaccacatctccgtaaaagcgactcacattaagcggaattttcgtttggtcataagcggatttccagcaatgatcttcggttagtccgtagaaattcttcacccattttgttttgccgttataggcaccacccgtaacgaagtgcatcgtgcgtccctccttagatcttctcgtttccattcaagttctactgcagaaccgtgcggaactttccattcccagaacgaccgcttctcaggggcatatttcattaataaatagcgaatcaccccaccgtgcgtcgtaagaatcacctttttatgcaactgcaaattcatttgttcaacgagtgcttgaaatccctgatcaattcgctccgtaaactgcgtgaagctttccccgccaggcggcgcgtccgcgatcgggtcggacacccagcttcgatattgcttatcatgttcaaggtcggcatatgttttcccttcccattgaccaaagaggatttcgcgaaaaagcggcatcgaaatcgcttttcggtgcggaaaaagtcgttttgtcgtttgcatgcaccggtccaggtcactcgtaaaaatcaaatcataatcatccgtcacgtccgcaaattcagcgtcttcactaatcgacggattcgtccaaccaatatacgccctgcgcttattatcttcggttacgccatgacgaaataatgtaataaccacacgctcatccataaaagcacctccattccttcaacgcttgcgccaagcacatcgcccgtgatgccgttaaaccatcttagactttttcgtttcattccgagtgccaccacgatcgtgacagcacttaggagtagcgtcatccaaaacgcctcgactgaaatgagtaaggaggccccggcgatcaaaatccaataaatcggatagatccataagcatgaccgctcgatccctttttgaaaaaaggcagcgagccctttctcttttgccggctgtatcaaaacgagaaacgcacccatcacagttttactaaaaaaggaaatcaggataatcaggaaatacgagacgtcctgcgccatttgtgcgatttcatagagaaacagaaacttagccgcaagtaggacgatcaccgatagaacgccaaacgcccctgtgcgcggatcgttcatgatctcgagacgtttcttcagatcgcgatacgagaaaaacgcatcactcgcatccatccagccgtcaaggtgaagcccacctgtcagtcccatcataaaaatccagacgaaaaacgttgccgcaagtgttgaaaatggcgtccactgaagtaaggcgtacaaaagacctgacgccagcatcccctggagtagtccaagtaatgggaacgtttgaaccgaacgcgtgagctgcttcggccccaacgggatttcacgccgaatcggaatgacggtaaaaaactgaagattaatcagcattccctgccataagttcatcggtgccccccctgaaacatgaggtctttaatcagctcccatttcagatgaggcttaagctcattcgcgagatcatcgtacgttttttcttttagctgcttgcgattgatttgtttctgctctggcagcccctttttcgctcgaagcccattcaaccacactgtgcgccactcatcattatgaaaaagatgatgcaaatacgtgccgatgacgcgaccattttctccgtagtacccttctggccgatcgtcaattttgagaaaaggcgttgccggctgatcgaaaagcgtttcgccaagatgaatttcgtatccctcgattggtgaccccgtttctgcgtgtaccccactcactcgaatcgtcgttttcacttcatgaaacgtcgttttcgcaggaattagtccgagaccgttgagctccgcccctgctttcccagtatccgaaccatgttcgtcaattaacttatcggtcagcatttgatagcctccgcagatgccaacaacatttccaccagttgcggcatagctttttaacgcatcttcaaatccttgatccttcatccattgtaaatcgctaatcgtgcttttcgttcccggaagaatgatcgcatctggcgcgcccagttcactcggatcctgcacccagcgaaccgtcacgtcttcttcgttaaacggctcgatgtcgctatagtttgaaagaaacggaagctggatgaccgcgatttcaagcgtgccttttttatgtaaaaagcgatcggtcagcgaaagcgaatcttctccttcgacgcggtggttcacatacgggagcaccccgacaatcgggatgcccgtacgcttttcaagccacgtgatgccgtcttcgaaaaggtctggatctccgcgaaatttattaatgatgatccctttgacccgctcccgctcttctttctcaaggagctcaagcgtaccgacaatactggcaaacacgccgccgcgatcaatgtctgcgacaagaagaacaggaacatccgccatctccgccactttcatgtttacaagctcacgatcttttaagttcacttcaactggactgcctgcgccttccatgacgagaacgtcatacgttttctccaggtgatcaagcgcgagcgcaatgctttcaagtcccatttcgtaatatgactgccggtagtcttttccggaaagcgtccggtaagacgtaccaaattgaatcacttccgcatgctgatcagaccgaggcttcagcaggatcggattcatccacacgctcgcttccgttcgtgcggcttccgcctgagcgccctgagcccggccgatttctttgccttcaatcgtcacgtacgagttattggacatgttttgcgatttaaacggcgccaccgcgtagccctcattggcgagaaggcgacagaacgccgtcacgatcaagcttttcccaacgtcggatgctgtcccttgaatcatgatcccattcatacgccgtctcctttcatcagttgcggtatgccattttcaactacatacgcttcgtctgcttttgagacgatccattgatgaagctcgccaagttgccttgcataaacgtcgacgagaccgcttaacggctcataaccaagttcattgctaacgatgatcagcgcttctgagcgttcattaagtttttcgatgtcattctgaattttttgtttcgtttgttgttgaaacgcttcgtctctccagtcttcattttgaaaaagttcattggatagaagggttgtgacgcaatcgaggagcaccacatcattttcgtttaaggatggcgcgacgcttccaatatccgttgcgcattccactgtttcccatggaacattggcagatgagcgatcgtgctggtgacgtgcgatgcgacttttcatttcgtgatcggaggtctggccacaggcaaggtaatgaagggaaccgcttgttgggcggagcgaagctgctcgcttttccgcaaaacgactttttccgcttctaacgccgccggttatgaagattagctgcgccatgaggtgagcacctcccttaaccgctcgttttcctcaggtgtacggatcgcgaatcggagccacctgccgtcgagtcctgggaagttctccgtatgtcttggaacgatgctttttttcataagaaagcttagaagttccgattgatcctctactttcggatctcgtaggaggtaaaagttaacgctcgagttggagtatgtaaagttgttttcctcgaaaaaatgaaagcacttctctcgttcctgttcgatcatttgatgtgtttgggctacaaaatcagtttcttggaggcacagttcgccagcgtgtagcgccagggcgtttacgctccagtgcggctgaagctttttgattgcttcaatcacttctggatgagccatcatgtagccgagacgcagtcctggaatggcgtacattttcgtaagtgagcgaagaatcatcaggttggaaaaaggggcgagcagtgatgaaaacgatgattcatcccctaaaaagtccgcaaaagcttcatcaatgataatgacgcaatcatgctttttcgcggcttcgactaaagcgagaacggcagcgggatcatacgtgacgccggttgggttgtttggggtgcaaagaaaaaccgcatcaacgtacggcaatttttcaatcaggtgtgaaactagcgcccattccccttcttcgagggtatgataggttacttcacattccgcacgaaggcaagccgtttcatattcagagaaagtcggttggacgatgcaaacgcgctttcctgctaaataacgcccgacaagcgtaatcagctcagcgccaccgtttccgataagtagctgattttcctccacgtcatgaatgtttgagagcttttccattaagctggcggcgtgcggatcaggataggttgtgattagatcgaaagcgtctccccatgtttctttaagagacggtggaggtccgagcgggttcagatttgcgctgaaatcaatcgtttgctcgggctgttcgagttgaagtgcttcgtatacataatgggtgttagcgccatgagatggtagcgtcaatgaggagccctccgatccagagaataagtaaaaatagaatgcttgagcgattcatgatcatgatcgcttttggaatatgtatcgcgcttagcttcataatgggatctcccatacgcgcgcggtttgaaacgatgccgccgtatgtgttcacgccaccaagctgtacgccgagaattgccgcggttgccgcttcgccccagccgctgttcggacttgggtgctgtttggcatcgcggaataggatgtgccaggcgtgagagatggtcgagtacggccgtttgacgagcagcatacacatgcctgtgagccgcgcaggaacccagttaactacatcatcaagctttgcggaagcgtagccgaattcagcgtacttttcgtttcgatagccgaccatggaatcgcacgtgttgatggcgcggtatgccatcgcgccaacacttccgccaattaacgcccagaataatggcgctgtgatgccatcgctcgtgttttctgcgaccgtttcaacggtaccgcgcaccacttcgctttcgtcgaggtgcgcggtgtcacgaccgacgatccaggagagtttttcgcgcgcttctgtcatattaccgtcttgtagcggttcgtaaacatcaagcgccgcattccgcaggcttttttgtgcgattgttgtggcgatcaggatcgcttcataaaaaataccaacgagcgggtgaagcgagtaggcgattgtcacagtaagaccggtgatgctgataacgattaagagcacggttagcgtcatgagcgcacctttttgcttgcgattgttacctttgttccagcgtttttcaaggaagctaatgagcttgccaaatccctttaccgggtgcggccagttaggcggatcgccgatcagacgatccaggaaaaacgctaaggtaatggcaagcaggtgattcaagatcatttggacagcctcatgcgatacttttcaagggcttcagtcgtacacccataaacgccttcgctaatcagtttgccaagcgttgtaatcgttccggcatacgcctggtgctctccgcgctgagtggcggcaatcaggatgctgtcggttgaagtcccggtcgccgtggtgcctgtcaccgcgtctattacttgctggtcgtgcatcacttttactttcgcttccgttgccgtcatgatgctttgaatgaacgcttcgtctgtgagcgtgccgttcacgaaaatccacgtattgatcgttcccggaagcggttcgtagacgtgttcacggcttttcgaagcatcaacggcattgccgacgccagccgtaacaacgacgaaaacagaaacgccatcatcttcaatgagacgataagcgacgtcatcgagtcgaacggccgtcatcatgccaaccgtttcagtcggatcaatgccgtgcgattcaagaaaactggtcatttcccctttatggtcggtgcagttatacgttttatctacgtgacggttcacgaacgtgtgataccagcctgttcctgagccaacaacgccggaagacattgttcggagagggaacggtgctttgagcgtgatcatgtctttatgatgagcgagacatttttccgtaatgtggagatcacttaaatcctccgcctgcttttctggtagcagcagcatttgcggttttggcacggttgggtgcggatgcttctcgattttcgttcggtaaaccgcctgaatgcgctcttcgtttaacacgtcattcggcttgttgtgcaggttgattttcccatcttccaggagaaggagacgatcgcagtaaaggcccgccaaattcaggtcatgaaaaatagaaatcaccgtaagcccctgttcccgcgtccacctttttaacaaatcgagcagttctttttgataggaaagatccaggtgattcgtaggttcatctaataaaagaatttcaggttcctgtgcaagtgcctgggcgagaaagacgcgctgacgctcgcctccagagagctcgttcacgtagtgatcttcaaaacttgcgatgccggtttgggccatcgttcgctggacgaccgcttcatcatgctcgctccacgattggaaccagccagattgatgggcgtagcggccgagcgaaacggtttctttgaccgtatagggaaaagcctgctccgcgtgctgtggcaggaccgcgagcacgcgcgccagctgtttcgctgagtagcttgcgatcggcttttcttttagcaaaatcgagcctgactttgctttcagaatgccgctaaccattttaaaaatcgttgttttcccgcttccgttcggaccaacgattccgagcagctcgccactctccacatcaaacgagatgtcgtcgagcacgtcgtgaccggggtatcctcctgtaacagattgtacgctaagcatgcttatcctctactttctttacgtcttctaattaatataatcgcaaacaccggcgcgccgatgagcgatgtgatcacgccgatcggaagctctgttggtgagatgatcgtgcgcgagatcaggtcggcgacgattagaaaagcggcaccgagtaaaatcgagagcggcagtaaatggcggtgatccggtccccataagaggcgcgttaaatgcgggatgacgagaccaacaaagccaatcgttccagacacagcgacggccgcgcctgttaaaatggagccgccaatcagaatccagagctttcgtttcgcgacgtttacaccgatatgctgggcgcgttcttcgccaaatgacatggcgttcagctctttcgtactaaaaaggagaatacctgcgccgatgatgaaaaagggcagaataatcccgatatattcccagccgcgcatggaaacacttccgaggagccagccgatgatctgcctaagttcctctccggttagcgcgatcatgagcgatagaagcgagccaagaaaagagctaaagacgattcctgttaagataatcgtctccacgcgcatcgatcgctcgatttgccgtgcaaaaaaaagcacgagaaaaatcgtcaggatcgaagcggcaatgctcattacaggaagtgtgaacatcccaacaaacggaatggataagttgaaaaatagcacgagcacggctccaaccgatgcgccggatgatacgccgagcacgtatgggtcggctaatggattacgtagtaaaccttgaaaagcggcccctgctatcgcaagagacgccccaacaagacctgccaaaatgacgcgcggcaggcgaatatccatcacaatcgttgtaaacatcggatccgtttttcctaaggaaggaaggtgaagcacttcggttccaattaattttaaaatggtgagtatcgggacggaaacggtaccgatggaaatgccgagcagcattgcggcgattaagagcgctgtggcaatcgggtaggcaatgaaccgtttattcagcaaaaacatccgggtaaaccgcttttgcaagttcctctactccttcaacgagacgagggcctgagcgcgtcacgaggtcagagtgcacatcgacaacctgctcttcttttaccgccgttacgtcctgccagccgtcgcggcttaacacttgctcgattgggttctcagtatagtagccgtacgtcgtgatgatcacgtcagggttcgcttgaatgatcgcttcctggtcgatctgattccagccttcctgatcgtgcgtaacgttcttcgcgtgaatcatcgacagcatgtcatccatgaacgtgttttttcctggagagaaaatctctggcgcaggtgcgacttcgacgaagacatttttctgatcgtcttcgctgatgctttctgctttcgcttgaatgtcttcaagctgctttttcatatcgtcgatcgttgtttctgcttgttcggtttcacctgttgcttgtccgatcatctcgatggaatcgtacacttcttcaaagctctttgcatcgttcacaacgagtacggcgataccagcatcgcgaagctgttgaagacccgcttcagagttatgagcgcttgagccgtgtgcgagcacaagatccggtttcagcgaaatgattttttctacgttaaattccatgccgccgattttctcaatatcagccgtttcttctgggtagttcgcgaaatctgaaacgccgacaacttcttctccagcgccaagatcaaaaagaatttcagtgttacttggaatgagggagacgattttctcaggatcgttctcgatcgtaacttccttatcgagggcatcggtgatggttactgggaaagcgctatcttttgttgattcagcttgttcagttgatgcatttccttcgttcgctgcactgttttcctcgtttgcaccgcatcctgcaatgattcctgtcacgagaaaaagtaaaatgagtagtgaataaagctttttcatgtgtgtttctcctcctgtacaatgatgtctctaaaaacaaaaaatccccacgccggagggcatgaagatggtcgaatggaagtaatggtttagccaaaggctacacctgaatccgttcgcacatccctatcctcgtaggctgttcgcgcttgattcaggcaggtctcctggctcatggttatcgcgtgctactccttcccattcgttgtgcgaacagtggattctgcagcaagcgaccatttacagtggcgggaccgcgctggaattgcaccagcttcccttttaagtcttcattgaaaagacacctgaatcgatcactatgaaatttcgtaacaggtttattatacatgattgcgggagtggggggaactgttgtctttttgtggggtcaggctcctctctgaccctttcgctttcattcacacaaatccccattattcgttaaggcttcgaagaaattctcagacttacaaaagcaaaaaaagcgtccctcactgaaggacacttttgctgcttttgtcttttggtggggtcaggcacgagcctgaccccaccccctcaccgctcatcctcacacattctcttgcttcagtgtatcaacgatattattcttctctaatttcttaatggagtagaacattgcggaacctacgatgatgaagatggcaataatcacaaagagaagactcatccacggtaatgtgaacccatagacgaacgtacttctaaaagacaaatacatcaggaacatgatggcaatgctgattggaatcccatagaggattgctttcatgccatagaagatgctttcgtagttcatcattttgttaaatcctttcggtgtcatcccaacggacttaagcatagcgaattctcgcttgcgaagagagatacttgtcgagatggtattgaaaatatttgcgatggagataagtgaaattaacgatataaatccgtacgtgaagaccgacataaagagaatcatctgcttgtcgcgctgtctattttggacaacattatagacattcagattggttcctttctccccttcaatcgcttcttgcgtcgccataggatctgagctgttcatatacagataggtttgcacgtcttcttgaacgtctttatcgattaactgattcatggtttccttagaaacaatgacatcaactccaccaataccagctgtattcactcccattggcacctcatccgttaacgcaccgaccttgaccttactcatgaccttttcttcttctgtttcataattcattgtatgaaggtcaatgctttcccccgcttcggtgttaagggcatttgtttccttaaattgacctgtctctggatccatataagagatggtctcaatgacgatcccagttgggttctccgaatctttgaattcctctccatcaatacctactttttttgcataggcctgaaaactttgctcatccaatccatgtaaaaccatgtaataggggtatttgccatctttaagaatgctctcatcctgcttaacattttcttccaaggattccgggatagcgtcacgatccacatatgtgtttacgttcagctctttaatcatactagacttcgttacattcttaagccttgtataaggttcaagatccccttcatccgcaccgcttccccatacttgaatatcaaaattaatgttttgctgagagagctcaacggatttttctaaattcgacgtaaagtacgaaacagatagaaacaagataatgctgatcacaagtgaaaaaacagtcacctgataccttcttttattccgctttaaattcttcaagccaatctccgcttcgatcccaaataattttcgaatcagtttggaggtcttcactgttttgccagatagcttgatatcctgcgtttgtctgatggcatcaattgctgagatctttgatgctttccgtgctggcatataagatgaaataaaaatcgtgatgattgaaattccgcaggcaacgagaatactgagaggcgttacgacaacctggagcttttctgtacccccaagcgccccttcaataaaggaattaatgaacatgaaagtagccgctattccagcaaatccagcaagaatgccgatcggaatactgatcaggccaataatcgcaccttcaaaaaagaccgatgtttgcttctgtcgtttcgtcgctccaacgctcgccagcattcctaaatgtctagaacgttccgaaacgctgatcgcaaatgcattgtaaatcaacgcaactgaaccgataatgatgacgctcataataattccggttaacagtagcattgttgttaacaggttatcgttatcggtcacgccatagaagcgaagcagttcatcgttgaacgtaacgttttcaatattgtgttgtttcgccagcgtttctgcatgctcatacagagatcgtttcactttgtccaacacgacgatggcatcaacggtgtccttgctattcataaggctttgatcgacatagctaatcgccgtataaccgggcgcccacgcgggttcccatgtgggacgtttgattgttcctacaatcgtatacgttctcgtgttctgattttctaatgactcactagcgccctccacatctttttgcaaaggatcgttttgagaaaaaggacgttcaacaccttccatcatgcgttcgccaacgttcagtgtgatctgatcgcctatcccgtgtttcacctttgcattccctgcaacttcttcagacaacacaatctcattgtcttcctgcggcaagcgtccctcgcttatttcgattgggaagtttttgaatccctggtcattgtattctttaataaacaagtaaggcttgctttcattttgaggttcatctaatttggcataacctacatcgtttgcgagaaccagagtcttggttgattcgtcgctttcgatcgcatcgatttgatcggaatcgacattctcatattgaacatgccactctccatccgtcgcgatcgattgtcgttgcaagagatccatgaacgagacaccaagcgtagcgacagccatgaccatcgctacggaaataatgacaccaatgatggtaaccagcgtccgtcttttattctccttcaaatgcctcacagtcagtttatttacgatgttcatggacgaatcacctcgtctttggcaatcctcccgtcttcaatcgaaatgacgcgatccgcttgtaaagcgatgcgttcatcatgcgtaatgacaatcagtgtttggttgtaatttttattaaacattttcagcagctccataatctcactgctattttgactatctagatttccggtcggttcatcggccagcataatggaaggattactaataagtgccctcccaattgatacacgctgttgctggccacctgataattggttcggcaaatgcccaagccgattttgtaaccctaacgtgccgacaatattttcaagctgcttttgatcgaccttatgttcatccagtagcatcggaagagtgatattctcttccacagttaagatgggaatcaaattatagaactgataaatcaacccgatctgccttcttcgaaaaatcgcaagctgcgtttcatcgagttgatagatgtttgtattatctacgagaacgtttccgctcgtcggtcgatccacgccaccgagtaggtgaagcaaggttgacttccctgaaccagacgggccgataatgacgacaaattctccttttttaactgaaaacgagacgtcatcgagtgccttcacggccgtttcccctttaccgtacactttagacagattctctatttgtaaaatatccattgcagattcccccataaatttaatgtaccttcagtttatctgcctaaaatgacgttaaagtgactcttaggtgacagtttagtcacctggcgtttctaaacaacttgcttataaaatttaatgttaaattccgtccccgtaccctgttcactcgatacttcaatatccccattctggctggtgataatgctgtacgccatcgcaagaccgattccaacactatcgtctcccgcatttttccccctataaaatcgtttaaagatataaggcagatcttctttcggaatgccatttccattgtctgaaatgatgatttcggtatacaacggattgtcggaatacgagagtgaaatcgttccaccttcatcggtatgctctacgcagttttttaatatgtttaaaagcgcctccgaagtccagttgaaatctccgacaaatgtggcagtgtcatcacccgatatgcttatgttttgttgtttaatatcgactggaatgagaatggattctactgctttttggatcacctgccgaggggaaatgctctcttttttaaaggcaatcgttccagcatctattttcgataatttcaataaagaagagactagccattcgatcctttctaattgaatgcgaatgtttgtcgtgaattcaacgcgtttctcttcatctaaattcggatcactcactaaatccaccatcaccagcatcgaagttaacggggttttgagctggtgggaaatatctgaaatcgcgttggttaatttcactttgtcttcttgtaaaagggaacggtgctctgaaagcatcatcgtaactttataaatatcattctttaaaatactgagctcaccctcatagttatttctcacatctaacgtataatccccactactaatctgtcttaaataaccagaaagccgctcgatttcacggtaccgccaccttgtaaaaaacacaaaacaacttacgagcacgatggatgtgatcagtgttaagagtgccgcttgataagaaagcacgaacacagcgagccccgttgaaacaagaatgattcccccaataacgagaaaaagaaggtgtatttcacgattacgcaacaacctattcacccaccttataaccgaacccgcgcacggttttgatgattttcgggctttgtgcgttgtcctctagcttttctcttagacgtttgatgtacaccgttaacgtattatcgttgacgaaatcaccagccacatcccagattcgctccaatagctgatttctcgttaaaacctgtccaacatgattagcaaaaatcagaaagagcctatactcgagtgccgttagaagcacttcctccccctttttataaaccttgccttctagcgtattgattcggatatcttcaatcttgatgatgctagtggattgtggctgcggttgtttattgtaacgacgcaaaaccgatttaattcttgaaagtaattcacgaatgcgaaacggctttgtgatgtaatcatccgctcccatatcaagacccattactacatttacttcatcatcaaatgccgtgagaaaaataactggtttatcactctgtttcttcacaaattcacaaagatcatacccactaccatctggtaaggataaatcaaataaacataaatcgatctcatgtaactgtttcataagtacttccctggccgattcagcattatagcagacaatggtctcatatccatcgttttgcaaggaatattcaagccccattgcaatcgtcttatcatcttccaccattaatagtttcatttggagaaccctcattttgtgttttttggggggtctggttcgagcctgaccccctccttcctctattccccctcaaaccctttaatgataaggctttgaaggagctacttacattaatttaaatatcaaaagtgtccctagaggaggaacacttttcactgttttgtcttttggtggggtcaggctcgagcctgacccctctcaactatttcctctttttcaagtgtacaatatttacatactatcatatagatcatgccccaaagattgtaaagttggcctatgtacttattgctataatgccttgcacggctgatatcattcagtaaaagaaacttgtccgctttttcacatgtggtgagggcagagaggaatcacatcccttaaccccgccaatttcttactaccttctcttcgttaacatatacaaaaaccataccgcatggttctgctcatccgctgctgctcttttgaacgtttcttttatatacgggtcctgcgtttgttcagcgatatcaagatagaagtcgactgtgttttgctcatcgttaaaggctagatcgagacctattctataatcagtggcacattcttcaacgagctcgggctcatgctgtcggcccgttagctgcgtataaatttgttgaaaagctctgaaatgcttcttctcatcctgtcgaatttctttaatacggttcttttccgtttcatttggtgctagtctcgctaacttcttatagcattgaatggcgctatactgaccgttaatcgcagtggcaatatcatccgcaagtgttcggtagagataagacatgagctcgctcctttttttggggtgtatgggtgtttggatacgatagtgtatttgaggggggtcaggcacgtgcctgacccccctcaaatacaaaaaccgtggttcgtccgtcacagacggacaatccacggtttttttaattgctctcattccttcttttattccgtcttcgctttctccaccatttccttcaaatcttcaatcgtttgaccttcaaatggttcaccgttcacgaagagtgcaggggtgccggttacgttcaggtttcgtgcgcgctcgaggtcgtagtccaaggcctcttcgccagcaccatcctggaaagctgtgagcacttgctccgctttctcctcatcagtgatttcttttaacgtatcgaagagataatcctcagtataaatatcttgctgttccgttccttcggtttgtttttcatacattaacctgtgaaactcccagaaaacgtcgttgccgagctcttgatacacgacttctgcaaactctgctgaacgattggagtcgacattaatgaatggatagttcatgaacgtaaatttcacatcgcctgtttggactagctcctgatcgatttgtgggaagaaggattgctcaaatgctttgcagtaaggacacttgtaatcaccaaattcgattacttcaacctgggcattttcgtctccgagaaacggctgattcatagcttcttcatttgatccacccgagtttgatccagttgtcatgaggatgacaacgacgataacaacagccaccgcagccgctaatccatacatccaccctttcggcttctgctgctgttttgacttcgtcaccgaattcttctttttacttttagaatttgccattatccttgaaccccttcagcttgttttgaaaaaagtttgttgtcgacagaaatcgttccaccgccgcttatgagtagcgcgagtgacataccgagaagtgcaagatcaagctcgtaacctccaataaatcccgttccgctttttacagtaaagatcgctccgagcatcacgatgataaaaagcgcagcgacaatgcgtgttccgagaccaatgatcataagaaggccgcctacaagttcgattgtggcaacaacataggctaatccaccactgataccaatgctttcaaaaaagccaacggtattttcaattcctcctgcaaacttatcaaatccatgaacggtaaaaataagtccaagagcgagacgaaggacgactatggctgcgtttggtgataatttcatgtaacattctcctttgttttgcactacgtagtgtagtgttcattttcgaaaaagaattagggtgtcgccacggtaaacatgacggttaaccctaagacgatagagatcgaataaagtatggttcccacaggcagcgtagcatgtacttctttttcgggtgaaagaatgtgctgaatgcggtcattcacagacgtatctgcgaacgaaacagcaaatgcgtgtcgctgtctgtgctcgtttttcaataatttcaataatgcgctactaaggtcgagcatattgtttgtttgctgtatcgcaaatttgtccgcctcgatttcccttaacgtttgatagtgtttcgatacccattttaggatcggaacataccagagcgcggtcactagaagcgtgatgagaaacttttttaacgggtcgcgatgctgttgatgaaattgttcatgacacatgacggcacgaagctcttcttcagtaagcatgttcacaagcgcagtcgaaagaacgatcttcggttttagcccatatgtaagcgcgatcggttcttcgctaatgataacggtgatttggtgcagattatactgaacgatcactttcttggtaaccagttcgtcctgtagaagcgacaatcgttttgaaaaagtgatgtaccgtgcgatctgcttcacgagtacgatcacgacaagcgctaacgttgagagaatcagcacttctaaaaaaatattcattgatgatattccgattgcgcgaaacaagttatgacaagcttcaagaacggtaaacatcagattccagtttgagaaaagatgcagactgtacatcgccatttgcacgatcacagctgcgacgagaaaaatagacagcgtgaaaacaagccctgtctgtttgattttcatcttacttctcctttagctgcttgattttttgctcaagcttttcgataagaataggatctgcttcatcaagcgcatcaagcatatgattaaccgctagcggaccgaattcatccatcaaatcctgcgttaactctttcgactgcgtttgtaaaaactcttcttttgagaaaatcggtttgaacatcgacgttcgcttctcagttctcttcgcaagtacgcctttatcgacgagacgattcatcaccgtcatcaccgtgttaaagttcgtactcttttcctgatcaagcttttgcttcacatctttaatcgtcatctccggactattccagagaatgtccataatcttcgcttcaagcgaaccaaagaagcgattcaatcccgtctcatttgtcttgaactgctgaattttcatcgcgtccacctcacactacacagtgtagtttaaatgaatggaagggtcaagaggaattgaggatgttctttgtgggaggacagttgtatgaagagggggggtcaggctcgagcctgacccccccctcttcatacaatcttttttcccattcgccctctcttctcctcctcttctttcataagctagtagcatcgataatacatgaacgagcaagaaaggagattatttatgatcgaaccacatggcggtcacctggtgaaccgcattccgtgtgaagaagatcgcctggtgctgcttgagaaagccgcaatatttccagcgattacgttaacaccatggaatttatctgatttgtatctgatcgcaaccggagccttcagtccgttaacgggctttatgaaccgaactgattaccagcacgtcctaacgaaaatgcggctcgcaaatgggacaatctggagcttgcccattacactttccgtttctgatgaaatgcgagaacaaatatcttttagccctactgtttgtttaaaggggaatgacggcgaaatctacggacttatggaagtagaagatatctatgaaaccaacaaacctgaagaagcgctatcggtttatggaacgaacgatccagctcatcctggtgtacaaaaaacgtacgagcagccggcttttaaccttggaggaccgatcaccctccttcaacatccaaaggcacttcgggaactttttcacactccagctgaactgagggaattatttcaacaacgtggctggcaaacgattgtaggttttcaaacgcgcaatccgattcatcgcgctcatgagtatcttcaaaagacggcacttgaaacagttgatggccttctgatccatccgctcgttggtgaaacaaaaaaagatgacatttcagcggacattcgcatgaaaagctatcgtactcttttagaaaactactatccggccgaccgcgttattctctccgtctttccagccgccatgaggtatgccggcccgcgtgaagccgtttttcatagtcttgttcggaaaaactttggctgtacccatttcatcgttggaagagaccatgcaggcgttggtgacttttacgatacgttcgcagctcagacaatttttaaccaatttgcaaaagatgaaatcggtattgagatcatggccttcgaacatgctttttattgtgaaaaatgtggaagtatggcaacttccaaaacgtgtccacacgacagtgaatgtcacgttcacctgagcggtacaaaagttcgagagatgttgaccaatgggcagcgtccaccaaaggaattttctcgacctgaagtgatcgacattttgattaacgaggtgcaatagcatgaccccgaagaaacctaatggcggcatcctactctcactatgactgccttctattttgttatcatcaccatgatcgcaatgctaatcggtcttttctttgaactgggacggcctgaggttatcctcacttccgttctcgtcttatttcttttcacaggcattattacgccggaggaagcgacggtcggattctctaatgaaggaatgctcaccatcgcccttcttttcattattgctggtagtattcagaaaagcggaattgtcgaccgcacgtttctgcgtctcctaaaagggtcgtattcaccaaagaaacgattagccaaattgctctttcctatttcgatgatttccgcattcgtgaacaatacgccgatcgtcatcgcttccacgccaatggtgaaaaaatggtgtatggaaaacggtgtttcgccttctaaatttctcattccgctttcttacgctaccattctcggcggcacgattacgctaatcgggacatcaaccaatttggttgttcacggtcttcttgttgaaaacggctatgctggcttttctttttttcagcttagcgctattggcattccaatcacattactcggactcttgtatttggttctatttagtcatcatctgcttccagggcgccgtatttctaatctctctgagccagtgcttaaggaatacaccggtgaagcactcataactgtccaattccattatttaaatcttacggtgaaggaagcgcagttaaggagcttgaaaggattatttctcgtcagtattttacgaaacgaacatgcgatagcgcccgtgtcaggcaacacgattttaaaggaaggtgaccgcctggtgtttagcggtgatatttcaacaatcaccgatattcagcggatgaaagggctggaacttcaggaaagcacaggttcctcttttccagatcatcatcggctggtagaaggaatcgtcacccatcattcttcccacctttttaaaaaggtgaaagacaccaattttagaagcctccatcaagccgcggtgattgctgttcatcgacacaaccagcgtttgcaaacgaaaatcggtgatattgtgttaaagcctggtgacgtgctgttaatggtgactggagaacagtttgataagagaaacgatttctacgccattacaccaatcgatcataagcttgtgtccaatcgacaaattcgaatgggctggctgtcgatcggatggctcggaatgatgattgccctcgtcacgttcaacgttctctcaatgcttaccgcgatggctgtgaccacactgctactctttttaacaaagcttgtgacacctggcgaagcgcgggacctcattcaatggaacgttctcttgatgatcgcttgttctttcgggattggaactgcgctattaaattcaggcgtggctacatcaatagctgatttcttaattacgatcacctacccttttggtctttttgccacgctcctcatgctctatttagtaacgaatgtctttaccgaaatgatgacaaatagcgccgcagccgtctttatgtttccggttgtgatggaagtggcacggacgcttgaagttgaactcatgccactcgctatcactgttgcgatcgctgcctccgcaagcttcatgacgccaattggctaccaaacaaatttaattgtttatggcgcaggtggttatcggttccacgactttttaaaagttggattccctttaaccatcattgtgatggtgaccacattagtccttgttcgattttatttaatggcttaaggaaaggagaacgatttgatgaaagaaaaacatattacctggcacgaaggaagtgtgacgaagcaggatcgcgaaaaaatgaaggagcataaaggcgccgttctctggtttacagggttatccggttccggtaaatcaacgatagcggttgagcttgagaacgttttacacgtatcaggtgtccatacgtatcggcttgatggcgataatgtgcggcatgggttaaaccgggatcttagcttcagtgatgatgaccgggtcgagaacatccggagaattggtgaagtgtctcggctatttgttgatgctggactgatgaccctaacagccttcatttctccttttcagaaagaccgcgacatggttcgttctctattcgatgatggggaattcattgaaatttttgtaaaggcaagtcttgaagcatgtgaaaagcgagatccaaagggtttatatacaaaggtccgccgaggagagattcatcagtttaccggcatcgactctccatatgaacctccaactactgctcatatcgttcttgatacagaaaaacttacagtagatgaagctgtccagtcgattgtggcgtatttgcagaagcatgagtatttgaaaggttaaaacaatcaggctcttttttaaacgtaaggttgacaataaaattgaaaactggacgtatgatggtgaaaagttccctcatattctaatagatttaaggaggttttaaggtttgagtcagattgaaattccacgctttttcttaaattcaatccctaaaagcggtacacatctcttaaaacagctgcttcttggaattcctggcatccaatacaattctcaaattgggttatacggacattaccattatcagactgatgaaaaactaaatccaattaaaaatcttacaccacattcttttgcaaatgggcaccttcattactcagtggaatgggagacattcttcaaagaactcaatatgaaacaggtctttgtattgcgcgatccgcgagatatattgatttcttatgctcacttcattcctaaaacgcaaatagaccacctttatcctacttttacacaagaagggttcacacatcgtgatcgtatcaagtttctgatagaaggagggccacttttagaggatggaaagccagatcacccaggcattcgagagtggtatcaaagcttttcaggttggttaaaccgtccaaacgtgcacgccattcgcttcgaagatatgattgcttctgcacaaatgaagtggaataccactggagaattgcttgatttcctatctgatggagtcgacaatccacttcatcgaggagactggattaccgcaatgatttcgaacatccgaccagaagcctccgttacattccgcaaaggaaaaagcggtggatggaaagatgagatggatgatgaactcaaagcactgtttcaagcgcgagctggagatttacttgaagaattagggtatgagtagagatttactctgtgcttcttcttgcgggcctctttgtcaccacattatcttttctattaaaaacaatttagtgctattcaaagagtccttctatgagggactttttgcttgttttgttttcaaagggggtcaggctcgagcctgaccccctttcgcaccccaccccaccatttaccacctctttttcttctcttcaacccccaccgcaatgccttttgtactactttttaatgagataaatttcgttaatgaaaacgcacaaaaaatgtaatcattttgtaataattgtatttaaatccttcctgtttttcagaaaacccttacacatcaaggaaactttcattacaaaagttttgttaattaggaaaagatgtctttaaaatggctctttactgtttattaggaaatagtggtagtttcaagctattcagaccgaggtatattccgattaatcaacgttcaactctactacaaaaatccagttcaaaagtcacgtatcgactattcgtgtttaaaggagtgaaatcatgagtattcaaaaaagcgccgatagctcgagtcttgcggaagtgattgaccgtattctcgataaagggattgtgattgatgcatttgcgagagtttctcttgttgggattgaaattctaacgattgaagctcgcgtcgtgattgcaagtgtggatacatggcttcgttacgcagaagccgtcggattacttcgagatgaggtacaagaagaaagtctggcgaagcaaagtaacgatcgcgcaccacagtttagtgtttagtgaatccattttaatagagatgagggaaaaacatgagtgaaaacgatgtgaatcatacaagcggaaaaatcttatcgcagccggaaaacggtgagaacgcgaaacaagaatcgagtgaacgcccatcaatgaactacgccatcattggtggtgttgttggcgccggggttggcttactctcaaatcctggaacaggcaaaaaagtcgttgaaagcctcggcaaatccgaagcggtaagaaatgccggtaaggaactaagaagatcggcacaagaattcataacagaacaagcgatgattacgttgaggcaaacggcgactggctacatgagtaaatatgaagggcgtctcctttcaccaacgaaaaagggtggtggagaacagcaacaagcgaatgaggaagtagccgcttcatcctctaatgaagaaatcgatgaaattaaagaagaaaacaagcagttaaacgatcggttagaccgaatcgaaaacatgctttctagcttagtagattcaaaataacagacgtcccttaagggggaattcgatgagtgtcggcaagaaaattgcaaagaaggtcgtagagcatacgccagagccggttaaagaaaaggtcatggataaagcgaaggaaaaattcgctaatgatatgcaggattacgtgcagaacggcgtacagtcaaaagtaaaagaagcttccgagaaattagagaaaaccaaagaggaaaacgctgaaaacgttcattctaaagctgaagatgcgaaagaaaaagtacaagatgtgcttttatctgttcgtgaaaagctaggaaatgcaaaagaagctggcgaagaatttcaggaaaaaatgtccgattctgatcagaagaagacaaaggtaaaaggccccggaagtcttaaaggtgtcagtgatatcaaaagttcactcgacattaaaagctccactgaaatcaaaagctcggaaaacattaaatcgtcgaaagacattaaacggataacatcttaaagaatgaaaggagaatgatgatggctattcaaaaaagtgccgatagttcaagtcttgctgaggtaatcgaccgtattcttgataaggggattgtcattgacgcttttgctcgtgtctctgttgtaggaattgagattcttacgattgaagctcgcgtcgtgattgcaagtgttgatacatggttgcgttatgcagaagcggttggtttgcttcgtgatgacgtgcaagaagaaggtcttgcgaaccagcagaatgagcgtaacgcacagtttagtatttaactgaaatcaattgtgaggcggttcgccgcctcccctattacgataggaggacactatggaaatcaaggaaattatgaatcaagtagccgatttttttaaccagcatgtagctcctctccataaaattacttccgtcgaaatgaatgaacaagaaggctggaaagtgattgcagaggtcattgaagaaaaagaatatatgaaaaagtacgcaaaagatgaaatgctcggaacgtatgaagtgcttttaaacaatgaaaaagaagtggtctctttctcgagacgtgatgtgcgctatcgaagtgcgatcggacaagaaatgtaggcaacgagcaggaggtatgtgacgtgaccgttttaacaaatcacaagaaaaaagatcgacgagcgcttatacaggatgacgaaacaaaggaactgctctcacgttcacttcagtacctgaaatccggctatcctgtccactatatcggcccatctggtgctggaaaaacatctcttgccctagctttagcaaaaaagcgaaatcgtccggtaatgcttatccacggaaatcatgaattaaacaacaaagatttaatcggtgattttactggttatacaagtaaaaaagtcgtcgatcaatatgttcgatcggtttataagaaagacgaaagtgtaacggaaacgtggcgagatggacgcttattggaagctgtgaaaaatggctatacgctcgtctatgatgaatttacgcgttcacagccaacgacaaataaccttttcctatcgattcttgaagaaggtattctcccattatacggttccaagttaacggaaccttttatccgcgttcatcctgcattctcggttattttcacaagcaatcccgccgaatatgccggtgtttatcgaacgcaggatgccttattagatcgcctaattacgatcaatgtcgattacaaggatcctgaacgcgaggcgctaatcgtatctgagaaggcgaacctggtaatcagtgaagcacgcgcggtcacttccatgatctcagagttacggagccattgttcaaatggttatggacctagtttgcgcgcttctatgatgatcgccaccctcgcgattgaatctgatattcccatagatggacaaaatgctgattttcaacgtctatgtcttgatataacaactcacacgatgagcgaatgcttagaagaagaccaagaatccgtagaaaaagtgatacgagatgcttgtgaaaacatgaaagttgctgaggaataaaggagtgtcaacgatgagtgaagcagaaacaacaggcatatacattttttgtgccattcaaacgaaccaggatgatgattttggaacgattgagcttgaaaacgaaatgcgtgacatttttacgattcgctataaagatgccgcaatggtggccgcagaagtgccgatgaaaatctatcatccaaagaaagataatctcttaacgcaccagaacgcggtctcgcaagtgatgagtcagaaggatacggtcattccgatcagcttcggaaacgtatttaaatcaaaagacgatgtgaaggttctccttgaaaacctctatccacagttcgtgaaccttttcccgaatattaaaggcaaaatcgaagtcgggttaaaagtgattggtaaaaaagaatggcttgaagccgctgtgaacgacaaccctgaggtagagaaaatggcagcagctgtcaaaggaaaatcagaagccgctgggtattacgaacgcattcagcttgggggaatggcgcaaaagttctttgccaaccttcaaaaagaaattgaacaggagatcttcgttccattagaagaaacagctgagtcggcgaaagcaaatgacccacttggtgaaaaaatgctcttaaatgcttcttttctcattgaccgtgatcgtgaggaggaatttgatcagaaagtaaatgaagctcatgaaaagtggaaagacaaagttgattttaactacaccgggccatggccggcttacaattttgtcaacattcacttaaaggtagaagaagcctaatgattcaaaaactggttaccgcgccctttgatcttgtcattaaagtcggtgagaaaattaaagaagaagctgataaagaattatacgatcttcctaccattcaaaagaagttaattcagcttcaaatgatgtatgagcttggcgaactgccagaagatgcttatacggaaaaagaagaagaattgctgttgcgctatgaaattgcgaagcgccgagaaatggaacaatgggaagaattaacgaaaaaagatggaaggtgacgatatgggggacctcctctacttatacggtcttatcccaacaaatgaagcgactcaccccctcccttctgtaaaagggtttgatggtgagcatgagatctttatgcttcctaatgaagacgtgacagcgatcgtttgtcacctggatcatgcagcctattcagaagaaacgattagcgacaaaatcaacaatgatatggaatggctacaagaaaaagcttttcaccatcatgaaacggttcaacagctcgcgaagcagtatacaatcgtgccgttaaaattctgtacgctttataaaaatgaagaaagcttacgagaaacggttgataaaaataagacgaagctgagtgaaacattcgcccttcttgatggcaatgaagaatggaaccttaaaatttattgtgatgacgagcagattaagcaacaagttagtgaaagtaaccctgtcattaaggcaaaaagagatgagattagtgcgttacctcgtggcaggcaatttttcgagaaaaagaaaatggatgagctgattaatcaagagctggaagctgaaaaaaaccgtttttgtgaaaacattcatgaaaagctgagtagcgtttccctcttcggaagtattaagaaaacctggggtaaggatgtgacgggccgcaaggaaaagatggcgtggaacagcgtcttcctcctcccgaaggcaaacgttgaacagtttttaaacaacgtcgagcaatacgagggagattttgaagaagccggatggaaatttgaagtatctggaccatggccaccctaccatttttctagcttttcttaatgaagacagtgaggatgaattgcaatgacggtacgagaaaccattgaaaataaagacattgcccttattgatattttagacgtcattcttgataaaggggtggcgattaaaggagacttaatcatttccattgccggggttgacctcgtctacctcgacttacgcgtactgatctcatctgtagagacgctcgtgcagcacaagcagggcactcgaaaaacaataaactcagaacaattcgatcgagaaagggaggctttggatcatgcagcagcagaacccgacgagtggtcgcatcaacgttgaccctgataacgccgagcaagggctcgcccagcttgtgcttacggtcgtcgaacttctacggcaaattgtcgagcgacatgcgatgagacgcgttgaaggtggcaccttaaccgatgaacaggtcgagaatcttggcgtagcgttaatgaatttagaagaaaaaatggaggaattaaaggatgtatttggccttgatgcagaagatttgaatattgatcttggtccacttggcaacttgctttaattcgtttcaggtaaaggaggcatttggatggctattgagcatcagatgcagtcaaatacgattgtcgatgtgttagaaaaagtactcgataaaggtgtcgtaattgccggtgacattacggtaggcatcgctgatgtcgaacttcttacgattaagattcgcttaatcgtcgcttccgttgataaagcgaaagaaattggcatggattggtgggaaaatgacccctatcttagctcgaaagcagccgataacaaaacggcagcactggaacaagaaaacaagcaattacaagaacgattggaagcactcgaaaaatcgttaagccaaaatcgtcttagcattgaaaaataatttattggagggatttatcatgacagaacaaaacacgaaagttgaaaaccaaacgcaggatcagcagcagaatggaacggataagaaaaaggcaggtatgaatggaccacttacaagaaccgtaaccggaagtattcttggtgctacagttgggtacctcgccactccagagaacgggaaaaaattaattggcaagattgatcaagaaaagcttaaaaacaaaggaaaagattttggacgagtgactaaagaaaagtcaaaacaagcagcaggttcgattcgaaactcaaccgctaacctttttaaacgggacaagcaggaagaatctccagaaaacgaggaatcgaatgaaacgaatgaaacgactctcgcttcgaatgaagcagcaccaacgattgaagctgaagagcaggttgagacacagtctgatcagcagcaggattctaataacgaggactacaactcgttgaaagaagaaaatgactctctacaaaatcgccttagccaaatcgaagaaaagcttgatcgtttaacgagagcacttggagaagatgttgaaggcgaggacgaggatgaaagcgaggacgaagaagatgaagaaagcaagccttcttcaaaaaagcagaaacagaaaacttctcgtaaaccagagaataagaaagacgatcaggacgatgaagatgtagaaagtgaagatgaggaagaagaaagcaagccttcttcaaaaaaccagaaaaagaagacttctcgtgaactagagaataagaaagacgatcaggacgatgagaatgaagaaagtgaagatgaggatgaagaccaaactgaagctcccggaaataagcagttaaaagcggatgctgaaaatagtgaagatgaagatgaggacgaggaagatgatgaagaatcggaagaaccgaagtcctcgtcaaacaaaaagaaacgaagcacttctcggaaatcgaacagttcgaaaaaaacgagtgataaaaatgatgagaaaaatcgtgaaaaagagaaggtaacaacactttctagtaatgacgacacgtcttcttaataacctgcaccgaaaggagaagtgaatatgggaattgaatcaagcaaagatagtattcttgaattttttactcacgcatcgaacaaacatgattttgcgctagatattacgttaaatgtaaatggtgcgctcattacaggcacgacgatttcggcaaaagagtattttgatacgttgagcgattccattggaaacggcaatgaggtcgctcagaaattaagcgaaaaactcgcggacgctggccagtctatcgaagatgccgccgatgcacaaaccaattttattcatttaaagaatacaaaggtttaccttggtgacagcaagccaacgccttcacagggaaagatcgtgtggcgaggaaaattaagtgaagtagacggattttttctcgggaaaatttcagattcaaaataagtttaattagggacagagaaggcatatcgccattctctgtcccttttttcataggatttcttcaatcagggtagcatacgaatacctagacctatgaaggaggaaactggtcatgactatgaaaatcgttacaattgtcgcttacttctatttgatcgcctcatcatttattttttcaggagatatgtctggcgggaacgatgtgctcatcgccccttccggcttcacgttttcaatctggttgttgatttatttgcttcttctcatctcactcgttcgccaatttacggcaagtgagtgtgatcaggcactgtatgtgaaaatttcctatctttttgccagcagcatgcttttatctggaaccgccgttctcgtaagtgattcagtagcgctcatctttatcgccggttccttaattaccctctccatcctttacgccattatcaccaaaaatgctgagcgctcttcctttttcagcgtaccgttctcgttctacctcgcctggacatcgatcgccacaattgtggatgtattcgttgtagcagaagaaaataacgtatcgttgatttttgggatgaatgagctaacctggaccattattatgctcattatcggtgcaggactcgccgtctactttagcctctacaacgacgatttgatctatccgatcgtgtttttgtggagttactttggcatctttgtgaaagaagataaaccgctgcaactgacgtacacgcttagtattctgatgatcgggcttgtggtgtttgtgatatggaaggtcgtgcgtgaggtgcgtgggcggaggatgagagcggaggcggtttgaaagtgtgttgtcttttataaggggggtcaggctcgtgtctgaccccctctccctctcattgtgctcaacttcttactgtgtaagggattggcagctggaatgcttcacaattaatgtgaaaaagtgtcctttcgtgaaggacacttttggtggttttgtctttatgaggggtcaggctcgagcctgacccctttccatcagtctacataaaccgaaacggatccaccatttactgagaactccccccagccgtcgctattgattgtaacggacgttgttgagttaccagtgatgtcattccatgtttcacctgcattttgcacaccgacatacatccactttgatccacccgggccgtctgtgatcaatgtggctagtcctgaatttgcacgcgatgcatccccttcacgcgtccatccaattacatcctgatgattcaaataatcatgctgtgttccgtatgcataggattttcttgcttcaagtaagggatcaagctttgctttttgtgctggaatctcataagaggagcttccttgcgtgccataataatcaccgtaaaataagctcggatatccctggcctcttgtcagaataaacgcatatgctagaggtttaaaccacgattgaacggttgattcaagggcttgtcctggttgtgaatcatgattgtcgacgatcgttaccgctttccctgggttcgaggccattaccgtaccatttagtaagttcctcatgtcataagaaccaccgcttgtagatgccgcctggaaattgtaatgtagcgggacatcaaatacagattgggtgtaatttgttttttgaagatagtcgttgatggcaccaagatcatttttccaatactccgcaacagtgaacatctcttttccggtatcatttcggacggaagtaatccagtcactgaggtacgaatgcttaatatgcttgaccgcatcaagacggaagccatcaagtttaagttcattcgcataccaggtgccccattttttcatttcactcgccacttcggggtgatcaaaatcgagatccgcatacatcaagtagtcatagttcccattttcagaggagaccgtccaatcccaagcttttcccgtgcctttgaactgataaatacgttttaacccacgagattgatcccagtccgtgccatcaaaatgataccatttccaatcaaaacttgagtatgcatctcctctacctggaaaattaaagcccgtccacgcctcgatttgatactctccggagacaacctgattgcggttactgctattcacttcaaccgctgtcacctgctcagtgtaatccgctccacctttatggttcatcaccacatcgccataaacctggatattgttttggtggagtgagctaatcgcagattgtagctgagccttcgttccatatttcgtccggaccgtccctttttgattaaactggcctagatcatacaagtcgtaagctccatatcccacatcgttttgctgcgttcctttgtatgcaggtggaatccaaacagacgtaaccccgatatcttctagatgctgagcatcattgttcaatcgattccaatgagctccgtcgttcggcaaataccactcgaagtattgcatcattgtcccattggtagaagcagcactgacagacattcccggaccaaacatagcaaagattacgacacatgcaacaagtaccgataacagtcttcttccctttttcaaaaaaatcctccctctgttcccttaatgtgaaagcgtttgcatttataagtctacgtgtgcattttgtgcatctcaatcgactattttcacatataggggcgagtcttttggttcataattccggaatatatcgtctactgtgctatctgtatcggtactaaagtcatgcgaaacacgggtagagggtcaggctcgtgcctgaccccctaccactttcattttgctaaaaatcttactgtataagggattagctttggaatttgccataatcaatttgaaaaagtgtcctctcgttaaggacacttttgttggttttgtctttatggggggtcaggttcgcgcctgacccctttccaaaatcgtttgaacgagctgttcatcgctaccttccactctcgtaactccgcttgtgtagtaaaagctgctcgcttctttagcgttctgaaatcctttttgattgaaaaggtaaactggaatatcacgaccaagcgcaatgccaagttcaatatgggttccctttcctcctggaagcagaacaataagaatatcagcttttttaactgcctctaattctgcttctccaattgaagcaagttcatcaaacgtcgcggctttttcgtttttcgtccaatcgtatgtatgcttgaagccatgacgttttagttcagcagctagtgtctgtacatgttgtttgttttgaaaacttgatgcgatgtaaaagttcatgtttcttttcctccgttctcaatccgtggcgaagcactagacacttcatttattctctcaatcagtcgcagccagctgtttttgaagcacttttttcaatttccgttctttccgctcttcatacatcggtgatcgtttcatctttttcattctcattttcccaatcacataccgtacagatgtattttcttgaactaacttgttgtattgaggtttctcaacaatctccacaaaccagctgtacgccatcagtgccacaatattggcttcaattcgctgctcatctggtggatcgccccaccaaaataaatcacccgctaatgctaaaatctccataaacacttccaactcctcgcccccctctactaagtcaattttacaataatgaccaatctatctatagatacgaaattggagttgaaattgtttcaaaagatcgatcaatggagtgtccacaatacgtggattatttcgctattattgggcgatttgtctttgaagggggtcaggctcgagcctgacccccaccctatcacttatcacttttccttccactcttctccccactcctcatccggcacgaggctaccgcctgttgcccacaccagatgtgtgccgcgagaactctttccttctattgcttgcggaccgctcattcctgcaagagcagaaggctcaagcttaatgccttctgtttcatagatccatcggagcatttccttcattcgctcatctgtcaccgtgtagacaccttcaagcattggttccatcacacggccaacaaaaccagatggtcgccctacagctaagccatctgccgctgtcttattatcgattccaaagtcttgaacagatacttgatcatgcaatcctgtcatcaagccaatcaacatagaaggagagtgcgtcggttcagcgaagtaacagtgaacgtgctcaccgaacacttgatgaagaccaaacgcaatcccaccgggtcctccacctactccgcatggcagataaacatgtaggggatgttcagcattcacttttatcccccgctcatcgaactgctttttcaagcgaagcgctgctacggcatatccgagaaaaagatctttagaattttcatcatcaatgaaataacacgttagcttcttctcacactgctttcgcccttcttctacagccgcgccgtagtctgcctgatgctccacaacttgaactcccttttcacgcaagaggtcttttttccactgtttcgcatcactcgacatgtgcacggtgacgttaaatccgagttttgccgacatgatgccaatacttaacccgaggttccctgttgaaccgacggaaattgaaaaagccgagaagaattcggtgaattttttatcagctagaatagaataatcgtcgtccttcgttaaaatcgcatgaccgagcgctagtttctcagcatgtttgatgacttcataaatcccgccacgtgccttaatactgccagcaatcgggaggatatcatctcgttttaaaagaagatctccttgaattttgatctgttcttcctcctccagcttcgctttcatgttgctgatttcagaaatgggcgattcgatgatgccgttcgtttctggaaacactttgcgaaaataaggcgcaaaacgtttcatccgagcttcagcgtccagaatatctgccatcgaaagatccgttgtttgagggattattcctttttgcggatttctccaataaacttccttgaactgaagtaggtcgtctaacagtagatgttccactttccactgtttaagtgattttccagctatgggcatgaattcttcactcctttactgtaataggggacagagaggggtctgaccccttcccctatttaaaaaccctctgaccgaaatcagaggacagttatcattattttaccgcaagaccagcaagctcggaatccacattgatagcggctggtccgcctattagaacaaagcgactgagttgttgatcaacaatcgttttttccatcgctgttgaaagctcagttttctttgagagtattaatggtgcatcatttttagccgcaaggactgcacctgttagagcgtcagcaaatcccataccattggcgacatagcctgtattcgatccattgccaaagtaatccatgatttcctttgctgttccgaaacggtcattcccagcaagacggacgcggtcatctgataattgttgataaacacggtcgtttacaacagcagaaccgcctacaacgatggtccttttaacacctgaaagtccgtcctttgttgaatcaggtagtgaatctttttttgtcaacaaaatgggcatgccttctttcgcagcatatggtgctactgcaagagcatctggaaaatccatacctaatgctactacagctttgttattagtagaatgaagttcagctgctatgagctcagcagtttcaaatcggtcatcgccaccgattcggttaattttcattcccatattagaaagctcattttcaatggcttgactaacagcattttcacttccgagaataactgctgtctttggattgagacgttttatttcgtttctaagttcatctgttaacttattatccggtgtcagtagaattggcgcatcttcctgataagctagtggagcaccagctaaagcatccggaaagtttccaccgcggctaattactactgtctctgcaccgtcctgccagccatcttttgaaatttcaattgaggtattgtatcgattgctacctgaaagacgttcggttaatggaattaagctactagaagccatataacctgttcttccatctgcgagtttcacatggtagcgaacccaatgttccgtagggttaaggctgtttttggtttcatcgatgtaaaattggctatccaatacagtcgctgtttcagatttgttgatctttatctctttcgtactgcttggagaatctttcattactttaccttctactgttgaaactttatcgccttcttttaataacgttctcgaacgagtcaattcttcatcaacagtataatgcattttgttaaatacaatggaggcatctttctcggaatcataagtaaaatcatcgcgttgaaacacaagcgcttctgtattcagatccaaataattgtgtttttcaacgagagcaagaaccttatcctgataagtatctacatttcttgttccgtcattagaatcacgaaagtatggactattaactgggacagtgccattgtaagccataatcgcaaagtaccagtgttctagaatgtctcgatcatttgtgttaattgttggaataatcccatcaacaccgtagctccatttttcatttaaaatatctaaacctgcatcgatgttgtatcgtacatcacttccgagtctttcaggatcatagcaattttttgtttcgtcaccttcacatacatgactggtcacttgcattaaaccaattccaccatctttcgagttaacgtatggctctgtttgcgcgtcatccgcccattgcctccacgcactctctttaagggccaccgccttcgcaatttctggtggaatattatgttctaacgcactctctgttaacatctgattgatgtcattataagtaaccttttctttctcagctgctgccatcgatggcataaccagtgctaaggttaggcatgttactagtaaactctttaattttttccccatcatttccccctcatagacttcttaattgaacacttctttcattctagcattactagaaatagattccaatttttaacacgaatttgataatcactccccaggcttcgtggatggcgatgctaattcgttttctcatgaggttataagattgataacagtcgtttcaaggattataccgttctttatatagaaaaagtgtccacctgtggtggacacttttgggtgttttgtcttttagaggggtctgaccccccattaatgcgcgcgcttcgctcctaaataccttggagcccagtagcttgatgtcatatcgctaatggtgacgcctgttgatgagccggcgtggatgaatttattgttaccgatgtaaatcccaccgtgcgaagcacctggtttgtaggtggtgaaatacacgatatcgcctactgatggtgagcttactgacgttgtaacgttccacatttgcgccattgttcttggtaatgaaacgccttgcttgttaaatacatagacgaggaaaccgctacagtcgaagccttgtgttggggtgtttccgccccaaacgtaaggaacacctatgtataacgatgcgtctgcgatcaggtccattacactgaagtttgaattcgagcttccgctgtcgctgttaccgtcactgctacttccttcataaccagtagattgctttagcttctcccatgtagctggtcctacaattccgtcaacggtcaacttgtttcgtgattggaagttacgaaccgcttgctcagtaccatttccgaaatcaccatcaagagaaccgctgtataagccaatcgcttttaatttggattgtaactctttcacaagtgatcctgttgacccttttttcaataagtcaccgtagtcttctccagtagaaggtgatgaaacgactttttctgttaagccgtcaagcgcatccagtgtttcctttgttgcagtgcctgtaacctgcagtttctttgctttctgaaagtccttgaccgctttctcagtgacaggaccaaagtaccctgtcgcctgcgcatggaatgtgccggctttttttaacttgttttgaagatctgtaaccttgctcccagttgaaccaactttcaaaacggtcgttgtctcctgcgagcttcgcgatttcaatgcatccactgttttatcatcggctacacctgttacggataaacctacgatactttgaaactctttcactgctttttgcgtaatactaccaaagatcccgtctatgttatacgaataatagccacgatctttcaataactgctgaagattggttactgcacttccgcgagatccaatagtaagtccgctcgtcacaggtttcgccgcatcgccgctctctgatagcgctgataatgttttactatccactatacccgtttgtgagagacctttttctttttgaaaatgttggaccgctgtcttcgtgatctgaccaaaaataccatctacatgatatgtataatagccttttgctttcagttttgtctgaagatccgttaccgcacttccgcgcatcccaactgaaagatctgaagaagaacttgatgattgtgagcttgtagaacctagattggcaactgcactgatcgtagcggaatctgcctttcctgttaccgcaagtccttttgctttttgaaaatcctgcacggctttttgcgtgatctgaccgtaaatgccatccacattgtacgaatagtagccggcttcttttagtttggactgaagattgattacgtcttgaccgcgagatccgacttgtaaaacggatgaagatttggaagctgaagatttgctaactgttccagctccgagcttttgaagcgtatcagttgttgcgaccccggtgacctttaacccgacagccttttggaactggctaacggcatcttctgtaattggaccgtagtaccctgtagacgtgtggtaggtaaaataccctttcgccttcaatacatcctgtagctctttcacgtcctgattgttcattcctagcttaagctctcgatctccaaacgctgcttctgcaccatcaggctgaacaaacatgacgcccgcgacaatcgcagaaccagttattgctttcttgaccaatgaaggttgcatccagatcctcctcattccaattaagttgctgcccaaatatcgacactctgcctatactatcggctataattcaacaaagtttaagcaatatcctgttattttttcctaaaaataagagatacaggtcaaattccctgtatctcttaatgatttactgcatctcttgtcgcattatttctgatataagcgctgttcgactttctcatttattgctgaggggccacctaacaagttaaagtccgtcacattttttatcgcttctaccgtttctggaggaagctcatctgacttcactaacaaaagtggtgcaccttcttttgccgcgagaacagatcctgccagggcatcggcaaagccaaaaccagtggccaaataagcggtttttgcgcctggataaaaagcggttttcactttagcagccgttgcaaaacgattatctcccgcgatccgatttggtgatggtagattactataaaccttctgcgtaatgacactttcgccaccaatcacaatcgtctcttcaatgtttttcaatgcgagctttgttgctgacggaattgtatctttgtttactaataaaatcggaaagccttgttgcgcggcataaggagcgattgcaagggcatctggaaaattaagaccatacgcaataatcgctttttcaggatctcctcccatgctcttcgcaattttcgcggaagtgtcatagcgattttctccactaatccgctcgacttctaagccaagtgccttaattgccttttctgtggtaggtgaaatcgcattttctccgccaagaataattgcttttttcgctttaagtcgcgcaatttcttttttggtctcggttggaagctcattcgttttcgaaagcagaatcggtgcttttaactgatacgcaagcggtgcgccagaaagtgcgtctggaaaatcgagacctcttgcgatgacaaccgtttccgcttgatcatatgttcttgcacttacattcgctgctgtttcaaagcgattcagcccttcaattcgttccacggtgttcgatgacgtactaacatttaatttcggtccattagacgttgcgtagccttttttgtcaacggcttctactttaaaatcgtacgccttatcggtcgcaagcccctgaactgttagctttctcgttgaaccatcgacttcttttagtacgctaccatttttataaaccacataggaagcaatcccggaatcatcgatggcttccgaccagtttaacgtgaggcgatcatttttaatcatggtcgctgtcagttctgcattcttagaccacaacggcggctgttgatcttcgccctgtggtactttaacagagaccgtcattgcatcacttgacggatcaagaacggtaactgaaacacctgagcttgctcctgaatacactttactcgttggagctgttgagctattaaagcgatcatagccgtttccgctaaaataatggtcgtaatacagtcgaaaaacttgctgctgatcgagttctggataaccaagcctgctttcgttggcctcttcgatatcgaccgctttatgtgcttcattattgttattttgacgattcttaaactgctgttcatcaatatgccagatggcaacccctggcgctgctacttcatcggctaacccgatatcaaaaccagtaaactgacgattttcaattaaaaagtactctgatggatcagtcgtcttcaatttcagcacagacggctgttctgctttaaaactcgttacctcgtatgacccattattttgcacgtctatagggtgaacaaagccaagcaccatttttgaccacggatcaagatgcgttggataagttccttgatcctcaccgttatgggtcgtccaagagccgctcgccattaaactatgaatgcccacgccctgtgacgagccatccgtatcatataaatctgataaaccgaggtcatgtcccatttcatgtgcaatgatacccaccgtggccatatgtccaccatgtttctccccaaacatcgtatagctgccacctgtttgatatgagccaattttcactccatcaagcagcggtgcttcgctttcatacaagctagacatatgaccccaaactacttttcccgtatctccatagctcgcttcgccaccagcaacgatcgtgacaatatgtaattcttctgaagaaagggagccgtctttgttttgatcaaattgcgcataattcacttttgcatttgatgcctttaacgcttctttcacgatttgtgaataggtactatcagaattattcgccgtctcagggcgaggatgtgcttttggaagcgtcacttttacaatgccatcattagagccactcgcttctgttgctcctttgaatcctaacttgccttttgaaacttcctcatagtaatgattcaacgtacttccttccatcccaaagaaacgattgcgccactctgcatctgaataggtaattttcgcatcggtatattccactaataaaacaagcgtattttcctgcttccctgcactcaataaatctacttgttcttctggattcggaatctctttttgcttcataccttctttcggttgaagtaatcgtacttcttcaagctctgccgcatcagatggtttatcatctatcccatatttagcattggttacttgtaaactctgacctactatttgagcgtaataccaatagtgatccgctcccatttttatcacagctccatcacctgtggtccaccagctaaggttttcactaccgcttagtgaagcttgaaaggcttccccagatggctgaacaagctcctgcttttcttctagcgcaggcatagcgttcgcctcattcaccccaaaaatcataaatagactacatagaagtaatccaatcccatagatgcttcttttcattatcttccccctaaacttgtcgagcgaacttcactaccacttatactctacaagtctatcactagcgagttaaaatttgccataattctgtatgttttttcatgtaaaagggaccagctttgaagctgccccctttttaactattcaactccgattagctgtctctcaattaatgggctcacggctttcggccctcctagaatggtaaaatgatagattcctagcttctctttagcttcaactaccgaatcctgcatcttagttggatctacgagaagaaagctactgtctctcttagccgccaaaacgcttccagttagggcgtccgcaaattcaagacccgtggatactaacgctttatgagatggattcagttccattgcaatgattgacgcggtttcataacgatctgctccgccgtatcgctttgcttttgggagcttgttaaagagatcttcagatagaacagccgtaccaccaacagcaatgctttctggatagcgttctaacattgtcgccgtatcatctgggagctcgtcttgttttgcgagcagaatcggatacgtattttccgccgcataagaagcgatagccagggcatcaggaaatttcattccgttcgcaataacagctttatttgagtgtgggagggtcccggcaatcatcgcagccgtttcatagcgatctgccccagcaatccgttcgacaggaatacccatctcttctaatgcatcttcaacatctttggaaagagccttctctcctccaagtagaattgcaaattctggatcaagacgctcaacctcatccttcacgatttgatcaagtgcgttcgtgtgcgttaataaaatcggtgagtccaagtcataagcaagtggcgcaccagctaaggcgtctggaaaatcatcgcctcgtgcgataacgactccctgcgcatgttccgcccagcctgcctgagagatttccactgctgtttcataccgattggcaccagcaatccgcgtcacgtttgtcggtaaatttagtttaacttgtttccaaaattcatctgcaatcgccatatagcctgctggtgacggatgaacatttttaggatttggcaaataagtcagtgaatcagtcgaaatggtatcataggtcggaacatagtaactgtttgaatcggttgcaatttgtttgatgatgctatttactgttttcataatctctacaagaggacgctgctgagcttcagggaaagcgtaaaaaccgttgtaataccccattaaataaatttcagccgaaggattaacacttcggataatcgacataatggagacataattttccgagagctcagtgatgatcttctttacttcttcaggatcttgtaatcgctcgggttccttactgagcacttgaagaaaatcattggctccgatcgtaattgtgatcatatccttcgaggcgattttgatttgcatatcacgatccatcagagcattaagcatatcctgagatctcgcacctggtattgcataaggtttttcatagcttcctaacagatcgacacgttggagatcttgagctatgtagtcagtataacttaatccgatcgtattatctgataacacaccagcagccaatgaatcgcctaacgcagcataatgcaccgcatttttttcttcatcgacgcttgcaatagcgaacgcttgagacggcatgagcatcgtgattacgagaatgaccagcaacagtggacttagcttaccgaatctcttcaatcagaaccctccctaaaatacattcgttataacgaatgattacttaaagtatacatttagctttccatgttccaatccctgcctatacaaaaaataaatataaaaaagcgcaagggagcgtatcagtgcccctgcgctttcattgtggttgattattttttaagttcgtctacgatttctttgctaactgcattctcgccaccaagaacattaaaatcatatgattccatatccttgattgcttctgctgtttctttaggaagcatatctggttttacaagaagcatcgctgcattttgcttcgctgcaagaacagagcctgaaagagcatccgcaaagttcatgcctgttgaaacgtaaacgcgtgcggaaggatttaagtttgttgcgatatcagcagcagtaccgaaacggttgtctccagcatagcggtcttccgcatgtaacttcgtatctagcttaccgttaacagccgtttcgccaccaacgataatcgatccatcaatgcctttgagtgcgttgcttgttgctgatggaacttcgtccgcttctgttaaaagaattggataacccttctgtgctgcgtatggcgcaatcgcaagagcatcagggaagttcatgccgtttgccacaattgccttgtctggtgagccaccaagacgtgcagcaatgtttgcagctgtatcgaaacggttgtcacctgcaatacgctcaacgtcgatgcccaatccttcaagttggaacttcacatagttgctaactgcacttgtcccaccaagaataatgacatcttttgccccaagacgtgcaatttcttctttcgccatcttgttcagtgatccactttctgttaaaagaattggcgcatcatatttataagcaagtggtgctcctgctagtgcatccgggaaagaatcaccgcgtgcgagaacaacggtatcagcagactcccaaccttgttgtgaaatctttactgaggtttcgtagcgtgtttcaccttcgatacgctctgcgtcagcttcaacgatacgtgcttcgtctttcgctttcaccgttccaatttcatccagatattctgtaaatacttcaaagtctacgaagaaaagttcttccatacgaccgtcagctgcagcttcacccattgcatcatagccatcgccaccttgtgcaatatatgcgtttgttgcaacagtgtacatcgcttctggatcaatgtcttcgtaaccattttcagttttcacatttacatcgagaattcgctctccagaaggaagatctttgtcaaaagaatattgaagtcctgatacttgagcgaagcgcccctgttccgattcaaccgcactgacaccgtgttctaaagaagcgataatttcagcacctgtcatatcaagtgtgacgagattattaccaaatggcattgttgttaacacttcacctaatgtgattggtccttcgtcgattgattcacggattcctccgccgttcgtgatggcgatcgttgcatctgtgtattgttgggctttaaatagcatgccgtccgtaattaagtttcctagatttgtttcgcctgttctaactgatccacgtttaccgttaagataaacttctgagtttccgacaacttctttttcgatttcttcaagtggttttttcaactcatcaaaaagattctgtgcctcagtatccgcttcaaagctaccatctgaactaaggtcaaggagttcattgtcccattctgttaaaacaccttcttcattgaacgtcacttccagatcacctaaatatttgctatattcattcgcttgtacaacaagtgttgggtcttcaaatgtgtctacaaccacagcctcttcgattttcgtatggctatgtccaccaacgacaacatcaatgccttccaccgttttagcaagctcaacttcaaccgtttttccaaggtgagtgagggctacgattttgtttacacctttatcctggaacatttttaccattttctctgcttgttcctgatggttttggaaagaaattgtttcaccaggacttgagagttcatctgtcgattcaattgttagaccgaataccccaacttcttctccgttcacatcaagaataacggctggatagatcgtgccatcatcccctgtcattgccatttcatttttgtaaagggggctaagataaggatcctggctataatcgatgtttgaacttacgattgggaattttgtttgctttacgaattcagagaatgtttttgggccttcatcgaattcatggttacctggtaccattgcatcgtatttcatcatgttcataaattgaacgtcagcaagacctttatatttattgaaaaagagtgtacctgagaaaacatctccagcatctagtagaatggaattttcacgagcagcgcgaatttcttccactgccgttagtcttcttggtgcattatcaaggtgcgcatgcgtatcgtttgtatgcataattgtaagatcaaaatcgcccgctgccgcttctgcaggtgacggtgaagctgctgcaatccccattgctagtgcagctgttgatagaacgccgaaaagaggttttttcatattcatgtacgtaatcccttccctttcgaatactcaattttttgtcggatgatctccgcggttttcattatatcctagattaataggttaatggtccctttttacgcaatatttcacaaattcaaaacattactttttcactagttttagtgaaaaggaggaggcggagattttccgccttatccttacatctttagttgttttttaattcttccattacattctcgctcacggcattcggaccaccaagaatgtggaagttgtgaatgtcattttcgtcaatcgcatctgaaatcttttctggaacctcttccttcttcacaagaagaatcgctgcatcctcttttgctgcaaggacagaacctgtaagagcatcggcaaattttacaccagtggctacaatcgctgtatctgcatctggagttagaacggttgcgatagcagctgacgtttcatagcggttttctccactaattcggacggcatttgaaaggctatctttgattttgtcattgattgcagtttctccgccaacgacaatttgctcgtctgtcgcgttcagaatttttttcgatacggctggaagcttatcgtcatctgttagcacaattgggtagccatttttcgccgcataagacgcaacagaaagcgcatctgggaagttaaaggcattcgccaagatcgatttttcaggcgttccgtcaagcttcgctgcaatgttcacagctgtttcataacgtgtcgcccctccgatacgatctactttcaggccaagaccttttagttcatattctgtgtaagaagaaattgcggatgttccaccaagaacgatcgcttttttcgcgccaagacgctcaatttctttcttaacagctgcgtttagcctgttttgttcggttaaaaggattggcgcatcgtatttgtatgcaagtggtgctcctgcaagggcatctgggaactcatcgcctcttgcaatcacgatagtgtcagcactttcccaaccttttttcgaaatttcaacggctgtttcataacgcgtttctccagaagtacggtctacgctgttctccatttgaatcttcgcaagcaccggatcgtggtcacttgcacgtccatctgcttcactaaaatcagagttaatgttaatgctatcaatcatcgtacgttttgctaggttgttagatacgagaatatgatcgagcacttgcgcgttaccttgatagttgtacgtgtaacgttgctctgttggaagcttattgatcatgtttgttagaacatcgccttcaagcgtttcgattggctttgaaaattcaaaatcattcaagtcacctagaacaacaacgttgccatcatccatgttcgttacaacctcatttactaagttgtttacgatcgatgcttgcttgatgcgctgtgcttcacttcctaaaacaacaggatgatccgcgccaaatagtgcgccatcgccaccttttgagttgaagtgattcgctacaacgactactttttcaccgttaaattcaaactcggctgctagtggtttacgagaatcttcaaatgcttcattagttggatcaatgcgaccaggattaagcgttaggccgttttcatccacgctaacggaagacgttgcatcgccagattccttctcagggaaatcaacgcgatcaggattatagatgaaaccaacgcgaatatttccgcccggctgaccgccgtctgttttatcggctggtgcgatatcagcaaacttgtacgttgggccgcctgcttcttcaatcgctttaatgatcgcttcgtaagactcgtttgcctttgtcgtgccatcatctgttggaccgttgttatcttgtacttcgattaagccaacgatgtctggtgtcttcatgttctttacgatcgattcagcaatcttgcctgttttctcttccccaacacctgggtagtaattttcgatgttgtaagaagcaatcgttaagtcgcctgttgccgattcgattgtcgttacttcacgctcggtatccccatcaataacggtagggaacgttcccgccggacgaatcttaaagttgctgtagtcgtaactcacgtttcctgtaacggaaccgtcaagttgatctccagttgttacgtcaatatcaatgccatcaacgtcaatgaggagacgttcagggttaggatcgtcttcagaaagaagaagtccgttcgcacgagtgaacagttgatcttcacttgcgtttacgtaaacaggaagctcatcgtatttcactggacctgttaccgttgcatccggaatcttaattaacataccttcaagactttcgtaaaagtccagtccatctgtttttggatcaaatgtcttcatttcatcgtcttctacaatttcagttggaggtgtgcgatcttctccgatcacgattgcctttggcaaagcgctatctgaagaaacaaccgttacgtttgaagctgtaatttgagttgttagaagatcttttgcatcactataaccatcttctctccactctttcacctgaccgtcaacctctactttatcacctgcattaacgccagcgccgccgcttttgtaaacatagataccttctgaagttgcaatgttatcgtcagggttttcttcttgcatgtagaacgcgttattgccagcttttgctgtcacgatcccagcaacttttgtaacagcttttccttcataaggggaagtgtgacctgcaccttgaatatcgtgaatgctaatgccgtcagcagattttagaacagtatagttgaacgtcgcaacgtcgcttgttttaccgtcttttgctgcaacggctttgattgttgtatcttctgttagttcaattggagctgtgtatgctgtgctttcagttgtcggttcgctaccgtccattgtgtaatgaactgttgcaccttcttccgctgtcgcaagtttaactatcgtgccttcaagaacagatcctgatgtaggattggctgttacagagaaagctttttcgatgacgtcagctgcgctacgtggcacgagtttgtattcgttaaagttataatcgataacgccttttaggagttcatatgttttgcctacttctagtagcgatttgtcgactggtttaataacaaattcacctgtagcgtcttcagccgtgaaattaccgttgctgtcgactgatttaatcatgacgtctttaaattgtgtgaacgaagcttcgtgctgttcaccattttctttggaaagatctgttgatgtaagtggctgaggggacggaatgcctttgtcttctgttgtcgtgacaactttagaagcgtctgtttgaatttgctgcatgccataataatctgacatggcgccttctacggttacttcatcaccaggctgagctgtaatacctgctgcacgcacaataatggctgcagtgtcatcctgaataaataggtttgtttgaccacccgtttcaaaggatgcagtggcagttccttttattttcacttgtgtaccgtttgctacttttctagcatcagtaattgttgagagttcgataggttccgggtctgggtcaggagtagtgccgtcggaaaggtgggcaccgaggtagtctgtcgtgtcttttgcgtatttcgtccattcacttgtaacatcgtaggcatcagtcgcatctgtatcgccagatttcacgtcgttattacgaacaagcgtcatatctttcgcaaaatcgtcagctgaaccaatttgacctatggaatcaatgactgcgtctgtttttttgaggacaacaacatcatttccgttaaaattcacaacggattgatttgttacatcagcctgatctaaaatcggctgaatggattgatcgtgggcgaggacaaacacttctccgtcagcaagttttccttctagaggtaaagaatacttaggagcagtctccccattggagtaaagttcaagagtgtaatttgctaaatcaagttcatttcctgttccattgaaaagttcaagcgctttgttatagctcccgccttcaatgtactctgaaatgattaagtcctgaaacgtctcttcagcagctgaagcatactgagaaacaggagccgcgaaaaaactaagaaccattgagaatattagcgcaaagctaataaaacgactggttgaccttcgtttcaaatttcatccccccggatatgtagtctaattttggtgatagtcccaccaattgtcagtatacaataactttcgactcatatgtgtaaaaatagcgtaaattgtctaactttagaatgcgcttacatttttaagagggggtcaggctcgagcctgaccccccttaaagacaaaaccactatttttactgcatttgtccgtgctgacgggacaccactcattataaaaagcgacctttattgaatgcttctcattgtaaagattatataaatttaatatatgccaataggtttactagtttagccctgttgtgctcccacgctaacgcacaagtctaaagtactagttttgtgcattaaaaaaccaccccatcgatggctcgataaggtggttaagaggcaggtttatcttcttctctcttacatcacttccctgatgggttggatccatcatgctctagttagggaaagatgttcttgaagatccttgagggatcaaatcacggaatgcttgcgaaggtttttcattgtttgatggtttcagagaataggaataatctcattttcaattgattcaaaactataataaggacgtataccttgattgattagacagtttgtcccctgcctaaatcgagcgtcattgcttataaaaacaaagactttttttgcatgctttcgagcaaagtgagcggtcgtcatcgcaccactttttacgttagcttccatgatcacaacatgacttgaccatgcactgattaacgcgtttcgctgaataaattgttttggtgtaggtgctgtgccaggtggatactgcgagatgacagcgccttcattaatgactgcttcgtagagcgagcggtgctctttcgggtaacagtcatcaaccccagttgcaacaaaagcaatcggttgcccactatttgcgaggcaggcagtgtgagcagcataatcgatgcctttcgcgagaccgctaacgacaggtatgctcaggcttgagagtctggtggataactcttccgcagcacgtcgtgcgtgattggaacaagaacgggaaccaacaataccgacagaaggtaagcatggtttgatatgacctttgacgtataaaagaactggcgattcagcaacttcttttgcataactcggatatagcgggtcatcccggggtaaaagccagatctccttttgctgaacaagttcaagaatccgcttcgatttctcaagagatcgcgtagcctcaatggcttctcgtgcacgacgagagattcctacttccttaagttcagatggagaggcgttatagactcgttctggatttccgaaagtgcccaatagtttcttttgcgttatagggcccacgtacggaatcgaacttagccagatccagcgctccattcattcacttctctttcattataaattttagagtaaggcgctttatttactgcggtaaattggagagcagataaaccttttttcctttccattctggcaattctttcacaaggtctggtggtaaaaacggctcttcattttcgacgtaccgctgataagcttcacgagaaggtttttgaaacagtgaaagtatgtaatcagggtaagcgtgcggattctttcgatatgaaatataagcacgataactgctccacatatagtccgctggctttacaaccattcgggctttaactggattaaggtgaatgtatttacttacgtcaatttcataatcaattgaatcaagcagttcagcattgtagcgaccttgaaaaacgtggcctgtgtactcatatttgtcgttgaaatatctagcatagttggagttgatcactttcatgatttcaccagggggatggtcgaaggtttcgatggagagatgcacatggttagtcatgagacagtatacgtgtaggcgaaatggaaaggtgagacgagcttgttctagaatttgaaaatacttttgacgatcaattcgttcttcaaacaatggtgcttttcgatttccacggcagataatatgatactttgcaccaggaaaccaggttcgtttcttacgaggcattcgaattactcctttggcaaggaaaatggggaatttctactatagcggggctgataattgtagtataccacttttcaagaatttgggaatagttaattaataaattattcagaaatatttttttagttgttttgaaggaaaatgaagagagaggtaatagaggagtgtgaggggaaaagaagggggtcaggtacgaacctgaccccctcacactcctatatcccgcaaacccatatccaccatagcttttcagcttattaaaggtaatttgctaatgaaaaagtgtccacctgaggtggacacttttggggtgttgtcttttggaggggtcaggctcgagcctgacccccattagacaccacaatcaacaatcacttcattccttccaccacttcattaccaaccgcactttcgccaccgagaatggtgtacgagtcagccttaagttctttaatggcttctgccgtttctgctggtagttcatttggttttacaagaagcatcgccgcgtcttgttttgcagcaagtacggaacctgttaaagcatcagcaaaatccatgccggttacaatgaacacatgagttgatggattcaaatccgttgcaattgacgccgctgtaccaaaacggttatctcctgcatagcgcgttgcgtccggtagcttgctaaacgcatgctcactaataactgcttcgccaccagccacgatcgtctgatcaacactgcgaagcgctacttctgttgcttttggaacctgatcttgctttgcaaacagaatcgggtagccattttctgctgcataagaagcggcagaaagagcatcagggaagtccattccatttgcaacaaccgctttatcaggactaccaccaaggcttgcctggatattcgcagctgtttcaaatcgatcttcaccatatatccgttttacttttaaatccagtccttctaactgataagcgataaatttcggcaccgccgaagtcccgcctagaataatggctttcttcgcaccaaggcgcttaatttcgttaatcacagacttatcaagtcccttttcgcgcgttaaaagaatcggcgcatccactttatacgcgagcggtgccccagctagcgcatctgcaaagttatcgcctcgtgcaatgacgacagtatccgcttccccccatccttctttagatattttaacggctgtcgcatagcgatcatctccaaacaaccgaacaggctctttcgcctccgcttcccctgcattcgaagtcactttccacgtatatttcttcgtattcttttcaatcgcgccaccatcgttattaaagatcgcggttttattttcttctgatggttcaatcgtgatcggaatttcgttctcgtcattttcaagcgttacttcatgcgtaaatgtcatatcatcatttactgccactttttcaccattgatcgtcaggttaccttctttaatcgcatttcctttaaacgtaaccgtgtcaccttccacaacagctccattttcaggcgaagtcaccacaactggcatgtcgatccagcggagaatttcatcctgtacgaccattttattactgccctggttcgttaccgttactttaagatcagtgccttccgctccgtaaccatagtagctcacgtcatcgtctgacttatcgttacgtgtatgatcggcaaggccctcttgctcccaagattccccttttacatatttgtacgttaaaatcgtcccttctgggaaagacttttgaatctcccagtctggtgataccgctccgttacgagacatttcccatgcgcttgtactccagccattttgatcacctggcatcgttactttcgcgctaagcggagtattctcaggggcatgcactttaaacgttacgtccaccattacaatgtctggcgtaatcttcacttcattcgaagcagtttgatttcctgcttgatcatacgccacgatgcgatacgtatacgtttttccgttttctaccgcaaaatcggtatacgtgatcgtctctgcattttcgattagctcaagtctttcgccactacgctccaccgctaaaagataggcaccgtcagctccatcaagcttccagtttaacatcacttgccctgactccttcagtggctcttctagtttcaccgcatccgccggcgctttcgtatcatcttgattttgggtaaacatcacttcttctgtgttcgttgttttccacgttgcaccacggtcggttgaaaaagcaagtcgataagcataggaccctttttcaatcggacggaaatcagctttaaatttattaaatgctccatcctgtcccgtataggttgcctttgactcctgccattcgccaccctgcttgacttgaagctttccaattaagccttctgcaaggcccgattctgtagcaccttcgatttttacacccgcttcaatcgcaaaggtatttgctagatctagcacctggtcttcgattgcggttacagaagaaatctcaaactttccttctttccactcaatgtgtggaatggttggttccgtcgtttctaccttaactgattcatttccatcttcatctactgctgttacagcaaaatagtaggcctggccgtttgttaatccgtcgacggtcaggtcattgccttctgtcacctcaacttcttcatacatcgctccttgaagcgttgagcgatacaccttgtattttgccgcgtcccctgtccatgaaagaatagcgcttccttctccagtagcgacttttaaatcacttggtgctttcggaagttcaaaattctgtccttgatccgcaattagcatgcggccagtcatcgcaggaattgtggcagatactttaccgtcttttaccgatacgctgtaatccttcgcaagtccatcagtaaatgagattttatttttcacaacatcttttacatctagatcgatcgtctgtgctttcgtgccgcggttcactgcaatgattgctgcaccgtcttcattcatacgcgcaaatgcataaacatcgccatctgcatgtagcgttgtaagcttcccgtatgcaagaagatctgaatgatcagtacgaactgctcctgcagcttggtagtgctctactaggtctatattttcatcaccccatggatacgtgcggcggtcatcaggatctttagaacccgttacgccagcttcatcaccataataaatcgtcggagcaccagggtaacccatttgcagcacggcagctagctttagacgctgcacgccaagctcatgatcgtaattcggatcaaactctgctcgctcatacgtatccgttccgccaccaaggacgtagatagcacgcggcgtatcgtgtgatcccattaagttcataagcgcatggaacgcttcagcaggataatcttcctgtaccgccatcagcttctcatctgcactcgctgcatttccgttttttaagaaatcgagaatggcgccttcaaagcgataattcatcacggaatcatattgatcgccaaggaagtatttcgaagcatcatcccaaatttcaccgagaataagcggctcttcaccttcttttaacgtcgcgccagcaccagctatttcttcagactttaattcatcacggaactcacgccagaattccatatctacttcattcgccacgtcaaggcgccagccggacgctccatttgttaaccatgattttgatgcagaatcttcgtcatacataatgtagtccgcaaatttttcattgtttaattcgctatcataatcaaccgcatcgccttcaatgcttttgatttcaggaagggaatcgtatccccaccatgcctggtaatcgtaacgttcattcccattttcatccgttactttttcatttttaagattaaaccagttgtggaaaccgtattcgtcattaaacgtttgtccctcatcctcgagctgtttacgcgcttttactttcgcatcttcttcactcatgccttcttcattcattagatcataaatgcgagaccagtattcataagcgccaacaacgtcgtatttcccgtagcggtcaaaatagatcgagtcgtcacctacgtgattgaagacgccgtccataatgagatgcatctcgcgtttttctagttcatccgtaaacgctttaaattcttctggtgtgccaaacatcggatcaaccgctttccaatccgttgcatcatatttatggtttgatgctgccttagcgattggatttaaatagatcgtattaacaccgagtgattggatgtagtcgagcttttgctgaatccctttaatgtcgccaccaaagaaatcattgctccaaatcccatcaccatcgtagttggcactatccgcaagcctaggattatccggaagctctccccattcttgatcttcaattggttcaggacctcgcgccgtttccttcgcatcgtcattggcttcatttccattgttgaatcgatcagggaaaatttgatatacaactgcttctttcatccagtctggcgtttcataacctggatcaaagactgttaattgatagagttctgcattcgcatccactgcttttcctgcttcaccctgcttcgtatcttctccgtattccgcttttgcagaaccattacgcacgataaatttatagccgtaaaggcccttttcttcaggcgttactgtcgcttcccagtaatctttcccgtcagaagtagcggctttttccattgcaatgagatgacttgtacctgaattttgatttttaatataaagatcggctttcgttaaatcacctttttttgcggcaaggcgaagtgttaccgtctttccttcttgcacggcaccaaatggagcacgaaaagcttcttcccacgagttatgtagaagacttgccttagaaacggcgccatctgatccttccgctggataatctgtgcttacttcttttgtttctgtattaaaaaagaacgtaacgtctgccttttctatcacgtttaactttgcattatctgctggataatcttctccccatgtatctccaaggacgactttatactcatagtttccttttggaacacttgtcgaaaaggaataaatgttatcataattgtcatcagagaatagcgcagtggactgttcaggactccattctgcccctgcatcaatcgcaggttggatcgaaccaacaagtcgtggttgtttatctgtcatcaccggcgtataagtcgttgagttcgcaatagcgtgcgtttcatcatgataataaaacgttacattcgttttttcatctagcgttaatgtaagattgttcgcaccatctccataactctctccccacgattggttgatcgctaccttatactcataagtcccagccggaagttcaccagagatttcgtaaaatccgtccccttttgcttccatctttgtttcctcagacgctggatcccattctcccgcagctccaagctcgtcctgcaaatcaccaacaagggttacaatccgttcatctgtcgtctcaccaattgtaaacgtactgttatcgttaccatttggatttaaaggatctttcatccattcatcccccacgataaatttgtactgatgaagtccatcggataaatcatctaccgttaacttccagacaccatctaccttctcgagcggtagcgccccttcctgccaattggtgaaatcaccggctacaagaacagattcttcgctcccatctccttcgaaaataaacgttgctgacgatccgtctataacaggactactagctgccttcactgttcctggaatagccccagcaagcagttgtataacaagaataatgacgagtgacagtgaaagttttcttcgattaccccttttcatccttttcccccttaaagaaaatgtgaaatcgtttgcacaaaacgctaaaaacaaggaaatcgcttgtctttaaaaattaaccaacgattccataattaagcaagcgctttcactctttattttgtcacaggttttaaaaggaatcaactatttttagaatattgttttatttctcgtatagttcaattggtaggccgtctggatcagcgaaaaaggtaaagcgcttgtttgtgagctcatctagtctaatgttttcaagtgatgaaacgcctttttccttaaggtgttgcaccgcctcatcaagatccgttgcttcaaacgccacgtgccttaaacctctcgcttcagggtagctcggtctctcaggggattcaggaaaagaaaataattcaatttgggtatgttcccctacagctaaatcgagtttgtacgaatttcgttcttttcgatacgtttcttcgataactgttaatcccagggtattcgtataaaattctttggatcgttcataatctgagcaaataatggccacatgatggacttttgtaaacattcaattcacctctcttcaacgatagtccgacgatcttctggcgtcaataagaaaacctgactcacagccaggtttttcctttacaatagtgattctgctccatcgacaaacatcgctgtgcctgtcacatgactggatgcatccgaagctagaaaataaaccacatccgctacttgctctggagagcctggtttttgctcaagcggatgacttccttcaggatactcaaccgggatttcgatgtcttccacactttcttttctgtcggtattctgatcaatgtttgtttcaatcgcgccgggacaaattgcgttaacacgaatgcgatactgagccagttcaagcgcagccattttcataaaagccacttgtcctgctttagacgtactataggccgacatgccgaagtttgagaaggtgcgattgccattaatggagcttgtaataatcatgctacctccattttctttcatataaggaatcgtgtgcttcaccattaaaaacgtacttcgcaagtttgtttcaatcgtttgatcccattcctctaccttcatttcttctattggattgagcgtcccatttatgcccgcattattaaaaagaatatcaatgcgtccccattcgttgacaacttgctttaatccgtatgtaacccgttcttcatcggcaacatccacatcaaggacaaatgcttcacccccgtcattgataatcgcttcctttaccttttctgcacgactttcttttaaatcaaataaacagacgcgaatcccttctttcgccattcgcttagctgtcgcttctccaatgccagaacctccacctgtaatcactgccacctttttcatgttcataacctccttttttctgcctattcccgcaagctagctttttaagcccattatttttcaaaaaactagcagtgtctgatcgaacagtcgaacagtatatactataaattgattggaaaaaggcgttttgaaatgtccattgcacatatagtggtgaatctttaaaagtataatgcgctaatctatttaaagataatagaaaatgatcgaacaaaaaatgttccgtttatcaactatcgataaacggaacatttttctgcctctctcattctatctacctaaccatcctccatctactgccaatagatgtccatgtacataatcagacgccgcggaagttaaatacaaaatcgtccctttaaaatcttctgggtcaccccacctctccgctggaatgcgatctagtatttgggcattacgggtagcattttctaatattgccgtattcatatccgtcgcaatgtaacccggaacaatcgcatttacattcacgttatgttttgcccactcgtttgagagtgccttcgttaactgagccacaccacctttagccgccgcataagctggtacagtaactcccccttgataagaaagtaaagaagccagattcacaattttcccatgcccttcaggcaccatatatcgaccagcttcctggcatagaagccaaacagcttttagattaatatcaatcacatcgtcccagtctgattccaaaaagtcgatagaaggtgaccttctttgaattccagcattattgatcaaaatgtcgattctaccaaaatgattgatgacattaggaattgcttccttcacctgatcttgatcttccaaatcgcacggtataattacacactttcttcctagagtttctatttcattctttatgtctaattgctctgggtttctttgaaggagagcaatatctgctcctgcttctgctaatgctactaccattgatttgcctatccctcttgtagcccctgtaatagcagctacctttccttgtagattaaataattgtaaactcattttcattctcctttttagtaaactatgcgatttctaataaccactactcaattaaattcggtatgaaggtaacgagcgtcgggaaaaagacaataagtaatagcgcaacgcataagactcctacaaatgggactgcactcttcatagcgtgatccagttttactcctgaagacgaacatgccacaaataaacaaactcctactggtggagtcaacgttccgatcgcgatattaataacaatcatcacaccaaaaacaacaggatccatgccagcgctcatagcgatcggtaacataatagggacaaacatgatcaataaagcaagtccctcaataaacatcccaccgactatgaaaatgacattgataactaaaataataaaaatagggttatctgatatactcaaaataaggttgcttaaaatctgcgggaaattatgacttatgagaatccaactgaacaaagatgaagctgcaatgataagcaacacatttccagaactgataattgcttcaacaaaaattccagtcatatcttttaattttatgcttttatagacggccaaacctagaattagcgtatagactactgcgataacactagactcagtaggtgtgaaaatcccggttaaaatccctcccacaatgataattggcgccattagaggtaagattgcttttctaaaactctttataaaataaataatagaaaatcttttcttttcagaagatccatagttttttattgaacaaataaatccggacactaccataagcaagataccaattagtaaccctggaataatcccacctagaaaaagttttccaactgatatgcttgctattccacctaagacgaccattggtatactcgggggaataataattccgatcgaacctgatgccgcttgtagagcagctgcaaaccttgcaggaaagcccattttcaccatgcttggcgtcatgacactgcttaaagcagccgtgtcagcaggcgctgagccagatatcccccccatcagcatacccgaagaaacacttacataactcattccacctcttgtccatccaatgatcgagtcagcaaagtttacaagcttttgtgttagtccacttttatccataatgacacctgtcagcataaagaaaggaatggctaataacgtaaaactatccattgaaataaacatcttttgtggaacgactaataacggaattgaaccttcatacaatattgtgaaaatagatgctacacctaaagaaatacctactggaacaccgaaaataaggagtagaaaaaacgaaataaataaaagcgctatcataaatttcccttccccctaacgtttatgagaataataaagataatcgcaaaaatacctgataggggaataattgaataaatataacctattccaataggcaataccgaagcggttcctgaaaagttttcaatcacaaacaaagtcccttgccaggttagcacacagaagaatgcccccgtgatgatgtgaataaccaggttcactcccttaaaatacttctcaatcttttcaacaacaaatgttatcgcgatatgtctttgtttatagatccccatcgttatgcccaagaacattaaccacacaaatataaatctttcgagctcttcggcccacaccattccgcttgaaaaaacatatcggagaacgacctgcataaacaccagagtcacaaggactaacattaaaattaaaatgactttccccaatatgctttctattcgatcacctactgcggcacttttattcaaatttctcccccctgattaaaaataataaaataacagaaggggcgcttttaaattcgccccagatgcgttattttgtatcaatgattttttgaattaaatcttctccaaattccttaccgtactcgtcgtatacagactgtacagacttcctccatgcatctttatccgggtccttttcaatctgtaactccccagtatcttcaagaaacttaatttcttccttttccttatcacggattaattttctttcataatctccagcttccttcgcagcctccatcaacgattcttgaatatcggcagggagcttatcgaacttcttcgggttcataattagcaacatcgatgtataagtgtgcccatcaaggaccatatagtcctgtacttcatacatctttgagcttttaattgcgaatactggtccttcttgaccatctactacaccatgttgggaagccatatataattcagaaaatggcatcggcacagggtttgcccccaaagcttctgtggttgaaattaatactggccattctggtgttctaatctttaatcctttaagatcttcaggggattcaataggtctagcactattcaaaaaatgtctgaaacccgattcccaataactcatgactttgaagccacccttttcttcagcctctttggcaagtagttctccaacttctccttgcaaaaccttatctacgtgttctgcgtctctaaaaagaaagggaagatcgaatatggaatatctcggataatattttgtaacgcttcctgaagcaactaaagaaatatcaacagtccccatcttggtcccttctgccagttcaccctcatctcctagctgactatcatggtatacttctatctctactttgctttctgtcttttcttcaactagttctgcaaatttctcagcaccagcatgaaattgggagctagtaggttgattgtgtcctaacttaagcgtaattgtttctccatcccctgctgatgtgccgctttcgctcgcaccgcaccctgttagactgattgtaagaatgactgttaacaagaaaattgaaatacccttaaactttctccccatctttttccctccaggttaataaaattgtataaaacagcaatggtcgattactgtatctaccaaatttcaaacaaaactctccctatgtaggttaaccagcaacccgccctcgatgttagcgcttacaaaccaagcaaaggtttactaaaagtaataccttttatttgttaaataataaaatcccttaaatattatatataatacactatgattatatataatatttaagggcatgtctaggggattatatataaaaaagtaatatatatatatatcccagcctattttgttgatttctttttaaataattccttatcaatttttttatttaaccattttcataatatgttctctaaacgcttcctgaacctcttccacatcacctttttccattaattttaccaggtctagatgatatttataaacttcctcaggaaggatctgaactttaggattaagcgctgtaatatacctccttatatgtccagtcagcatactccatattctagtgtagacttctattttggaccactgaataatggttcggtgaaactccatatccaaatcagactgcagtaaatattctggcttaccgaacttcattcgatccacaatgtcataaagttcacctatatctctttttctcaaattaggtaaaataatttctagtgcatttgtttcaatttcagctctcattgaaaatatatggtacatttccaccttatcaatttcagtaacgaaagctcctttatacttaaccgtgcgaataagcccttcttcttctaatcctctcaatgcctctcgaacaggaacttggcttattccaaatttctttgctacttctgtttccactattcgatcaccaggttttagattgtttaaaataatctcatctcttagtttttgtttaactttatcctttaatgagactaacgactgtttacttgattttttttcttccatttgccccaacccttttcgaatagtattaaaaccttttatatgataatgaataaaagacgttttataaataatgatgtaaattatatataatatcattatatataagcatttttgaatcatcaatatgaacaaaaaaaagagacctgtataggcctcttattgctgatcttccgtttcatcattctgctgcttctcggcgtcgtccatatcgccttcctccatgttgccatcttcatcttgatcgccttcttgcttcccatcctgattcatcgtatcgtcatcttcttgatcaattgtcccatcgtcttcattcacgttctcttcatcctcaggagcattttcctgcatttctgggtcttcaactggtccctcttcttcatttgcatttgagcatgccgccatgttcaaagcgagcaaacaagtaaatagtgatagcatccactttttcaacgttattcctcctcgtagctgtaatagtggtatttttaccatctctttaaaaagtatgtatctacaaaaaaatcgtcttttaataaagctatattcagcgagtttattacaaaaaaagtcataaacaattgttattttttacaaatttctacacctttcttaggttgaatgtcctatgataaaagtaattattttcgttaccactcgttaatcgtacaaagtatcctccagaaaagggcaaccatttttgaaaaaaagtggacgcaaagtaaacggatctaaggaaggttttttgtaaaacttctatgatggctgaactacctggaatgagttgaaggaggagttacatgggcgtacatacggaggaaaagcttgatgaagaatggattgcactaatcattgaagcgaaagagcttggcatggatattaacgaaataaaatcatttcttcatcaaaacggaaagtaactttaacgaaagcggcatcgcattatgccgctttcgttctatttacggaacaaaaacatactggtataattaataataataaaggattttgtcgaagtatcggagggatagacgtgatcggagaagaagttaaaaagtatcgtttacgcaaagggttatcactttcagagctagcagagcgcgccaacgttgctaaatcgtatttaagttccattgaacgaaatatacaatcaaatccctctattcaatttttagataaaatatcgaatgttttggacgtgtcagttgaagtacttcttcaaggggatgatcccattcatcaaagtgaattagatgcagaatggaagaagttagtgaaggaagctatggattccggtgttagtaaagatcaattcaaggagtttcttgaatttaataaatggcgcgcaaagcaggggcctcatcaataaagtgtcatgcaagagccgacaccttttggtaggctcttatttcattttcaaataagggcgcgcaagcacaaatctagcgagtaaaccggggaagctgatgaaacattgcgatccttttcccatcactcataatgaggtgaaatggtttggtttttaataatttttcttagttcctcatacatcttctgttcatcttcaatcagtcctttgatgtcctgttctttatattcgagactgtgtattttctttagaataaaagacagatcacattttcctttatattcatcgttaatataaagattgccgatttgttcatcaatcgcaatcactttgatccttttccctagtatataggatacaaaagtcccctcacctaacttaatcaccatcattcctccttacttttttgaggaattgattaaaaaccgcttcacttcctccttagataaacctatatttcttgcgattgacataagggtcacccattcctgatccaatttttcgtcagtatacgttctcattccccatccccctaatcaaattcagcaataaccgacactaataaagaacgttttgttctttatttagaatgtacatctaatatagtcttattttggaagattaaaaagagtgaaaattcttcgttttaaactaaatttttggataaacttgctatttacttataaatccttcgctattcttaattttccgcaattttatttcttatattaatgtttatagttaaaatctatgactattgttctgtttacagaacaatgcgttcttgataaaattaattcattaaataatgataaagtcgaggtaaagggatgatcggtgaaaaaattaaactttatcggaatcgaatgggattgtcgttgacggaattagcgaagcgagcaggcgttgcaaagtcctatctaagttccatcgaacggaatcaacaagcgaatccctctattcaatttcttgaaaaaattgcagcagaacttaaagtaccgattgaggtattcattcttgaagaagatcatgaggaacctgtgcttgatacagaatggaaagaattgatcgaagaagccatgcgctctggcattacaaaagaagattttgcggattatttagagtttaaaaagtggcaaatgcatcatggaaaaagcgagccggaaaaatagaaactcctgtccaggatggacaggagagaaagttcttattcagcagagttctcggagttttcgttagctgcgggctcttcggtgttactaccattgttcatagagttgttgccgttctctgaatcattttcaccactgctacacgctgtgattaacataacagctactaacgaagttgcaattttgagcatgaatttcttgttattcatttccaaaattcctccctgaactcgataagtttaccgctactaattaacggttgagtaaatcatatcaggtcaaaaagggaaaatgttgaaatttacatagtctctattatggttttacaatacgtataagtggttaacatgccgtcaataattccgttctagatctaaaaaacaatcctcctttcttgtgtcaaaatactgacagaagaagggaggattcgttcttttggcttatttaagagcaaacataatttcagcttcagcagcaacttcaccatcaacagtggctgttgcttttcctttgccaatcggtcctttaatgcggataatttccacttcaagacgaagctgatcacctggttttacctgtcttttgaaacggcatttatcaatgcctgtaaagaaagcaagcttcccctggttctcttctttcttaagcatcgccactgcccctacttgagcaagtgcttctacaatcaaaactcctggcataaccgggtagtccgggaaatggccattaaagaattcttcatttgctgtcacgttcttaataccgaccgcgcgtacttcttcttctacttcaagaattcgatcaacaagaaggaaagggtagcgatgcgggataatctttttaatttcctgactatctaacatatcttattctcctatctgttactcttctttttttactatctcactaatcttcacccaggtactctttttaaacacatcgccagggctaccatcaccaattacaccgtaaccgatcatcgcgcctgcaagaagtgatgccatgagcaagagggcaacgagaagaaggcgtagccagatggggattaaccgcacctttggcttacgctcttgctcgtcgtgattcttattcgtttgtgcgacctctttattaagaatgactttttcttcagaggcctggttcaccttttcatggttgttcgccattatgattacacccttacgaatagtttcggttcaaatttagattaattttttcttagcaatcttgtcaatatgttcaagcataaggcctgtcccttttgccacacagctcattggctcttctgctacgagaactggaaccataagctcctcagcaaagagctgatcgatcccgtgaagtagtgcgcctccacctgtcataatgacaccacggtcgataatatccgctgaaagctctggaggtgtacgttctaggacactcttagcagccatcaccatgtgggagattggctcttgaagggcctgctgaatttcatccgattttacagtgattgtccgtggaagccctgataccatgtctcgtccacgaatatcaagttcttcattccggccgcctggaaataccgttgctacattgatcttaatttgttctgctgttcgctccccgatgagaagcttatacgttttcttgatataatccaggatttcgtaatcgaacttgtcccctgccattttaatggaagaggcggtgacaatatcgcccattgaaagtactgcgatatctgtcgttccaccgccaatgtccacaaccatattaccgcttggctgaaaaatatccatgccagcgccaattgcagctacttttggttcttcttcaagaaaaatttgtttcccaccgcttttttcagcagcttctttaatcgctttcttctcaacagatgtgatattcgtaggcgtacaaattaaaatacgcggctttgatagaaagctttttacattaattttgttcaagaaatgtcttagcatcacttctgtaatatcgaagtctgcgatcacgccgtccttaagtggacgcgttgcaacgatgtttccaggagtccgaccaaccatttgtcttgcttcttcaccaacagcaagcgctcttccagtacccgtgtctagtgctacaacagacggttcatctaaaacaatgcctctgcctttcacataaatcagtacgttcgccgtacctaaatcgatcccaatatcacgtgaaaacatgacgtatcctccctgtattctaacactcatctatagtttcagtactagtatgtttaaactacgtatccattagtatattgtaccataaattaagaaacaggaagaaagtatttagaaaaaattgtcgtttttaggcgcattatttgacagcttcttctttttccgtatcctttctatattttattctcgttgcttcgccgccgcggagatggcgtatcgatttatgatactcgagaatgcccttcacctcattggcgaggtccggattaatttcgggaagtcgttctgttaaatccttatgaacggtacttttagaaacgccaaattcttttgcgatcaccctcaccgttttcttagtctccacgatgtaatttccaatcttgatggttcgctctttgatgtaatcgtgcacaccactcgcctccctaaattggatgtgagagatgcgaaatgagactgataaagtgatcatgctacgaagctctagtcatcaggtgacctacatgatgtcaggagtattgcatgcaagaatacttcgaagccttaccacaacttctcacctctgcccctcatttactaagttttgtaacattttattaaagcaaaggtggttatattccaaaaagtcaagagggacaagggattttatttaaatattcttttaaatggaccatgttggttttttgtatgttccgaaacaagaaaaaagaacctctagtttagaactggagattcttcttttagatgacctcatcgtctttccatacctctccatctttgaatgtaagctgttcaggatacctgagatccatcacctcatcctgaagcttctcagaaggtggttttgtactcaatgacacgatcacatttgttaagatggctgaagtagcaccgaagattcctgctccagtgtcaataatgcctaaaatcgtaaagcctccgtactttgcaaggaaaatgtacgttaaggtgaccaataatcctacgatcatcccagcaataacacctggtgcattcgctctcttccaccacaccccgagtataagtgctggaaagaacgtccctgaagcaagtgcaaaagcccacgctacaatttgcgtgatcactcccggtggatttaatgccacgactcccgctacaatcgtcgcaatcaaaatagaccagcgcgcaacagacatccgcttccgctccgttgctctaggattaatgatgcggtagtaaatatcatgagaaaatgaagaggaaatcgcaatcagtaaccctccagctgtcgataacgctgcagccatcgctcctgctgcgacgagaccaatcacaaatatgcctaagtcagcaatttcaggtgtggccatgaccacaatgtcgttgctgatcgcaatctcttgccactgaagaatgccatccccactcgtatcagccattgttaaaagaccggtgttcacccatttttcggtccaggcaggtaaagaatcgatcggactgcctgcgacttccttcatcaaaataaagcgtgaaaaagccgcataggcaggagcagataaataaagaagaccgataaaaagtagcgcccatgcgccgctccaccgcgccgctttcatggtagatacggtatagaagcgaacgataacgtgcggcaacccagctgttccggccattaaactaaacataagggcaataaattgccactttgaagctgattcaaacggtgcaaaatactcagagattccgagctctcgatctaattcaccaagttctgatacaacatttccgtagcttagccacggaatcgggttattcgtaatttgaagtgacatgaaaataactggtattaagtaggccagaattaaaataatatactgagccacctgggtccacgtaattcctttcattccaccaaatgtcgcatagattgcgataatgacgaccccaatcataacgcccactttggcatctacttcaaatagcctcccgatcaccacgccagaccctgctaactgaccaatggaataggtaaagctaataatgattgtggcaatggctgcgataacaagcgccgttttgctttgaaaacgatcgccaatgaattctggaaccgtgtaacgcccgtatttccgtaattgcggtgctaatagaaaggttaacagtaaataaccgcctgtccagcccataatataagcgagcccatcatagccaagtaccataaccgttccagcaagaccgatgaatgaagcagcactcatccagtccgctccgatcgccatgccattgtaaatcgcgggtacgcctcgaccggctacgaagaactcggaggtttgacgtgcgcgattaaagacggcaatcccaatgtatagaccaaatgatgcaactatgagtaaaagtgatactagaaattgtgtatccatcccttatcccccttaagattgtaaggtttgtcctttcgctgctttaactcgcttttcgactaacccatacttttgatcaatcctgtccgatatgtaagcgttaacaaataataaaataatgaagacgacaatcgaaccttgcgcgcccataaaataatgaagagggaacccgttaaacgtatattgcgcaagcgtttcagcaaacagtaccattccaaaagacacagcaaaccagaaaaaaagcaagatggaaatcaactttactctcgcatgaaagtaggcatccgcaattttcttatcaatctttttcataattgaacctcctaactattttaagttaaaaataagttcgatcgtttcgacaaagccaagcggaactctagcaatttcaataacaaaatagattcccattagcgcaattggaactagtaaatacacgccttttcgctttttgattgtgaaaattaaacagactatagcagcagctaggaacacgtataaaataagtagtctctcctttcttgtgaaattatctgaattttccaaaatacacttctcattatgtttctactatactaggaagtcaatgagactaatttaccagcaattgtatatagcagtatgacaatagacctgtattcccgacacaaaaaagcgaatctttccaatcgataaggaatgatagcgctatttcccgggaaaggtcgaatggtgtccgatttcattccatacaaaaagcccccgatcactcggggacttctgttattctgaatcctttgtatctgatttttgatcgtccgatttctgctcgttgcttttttgctcgtcggattgatcctcgtcagcactgtttgcatcttcttcggcgtcattctcagcatccatttcggattctgtactgttgtcctgattctcaacgtcagtaccttctgaggctgatgggtttgaaacttcatcaccagcgtctggcgcttcgactgctgaagaaggctgatttaacacatcaagtgggttaactggcacatcatctttacgtacttcaaagtgtacgtggacacctgcgtctgtatcaaacgtgtttgttccagctgtaccaagcttatcgccttgctttacagtatcgccttgttctacatcaagagcttcaagcgattcgtaaacagtcacaacaccatcgttatgttctaaatgaacaacatttccaagtaactggtcgttcgttgctttcacaaccttaccactcatcgcggctttgacatcaaaactagcgccatcttctttagcatagtcgattcctgcgttctggtagtaggtattattatagaaaacaagggctgcttgttgttcttccgtgctagctgatgtgtcatagaattgtttctgcacaaatacgccactatcttcggatgcaggtactttaaagacttctgaatcacctagaactgggacagactcttcatttgtgtcaaaggcacttctttcttcatcaattccacttaaatcttttgcattttcttgcccgccttgcatccatagaacggttgcaagaacaattgctgcaaaaccaagatagactgctggataaatccaacgttttcttgctagcttctgccatttagaagcgcttttttcaacaggatgagatcgttgtttttcgtctcccatttgttcatcacctcagcaacattgtggtcaggttgcgagatttatatacctcttacgaaaaaaagatctatttatttttcgacaaaggggtttcttttatgcatggatttgaaatttctttgcattccttaatggataaacgcatgatatcactgatctaattacccagttctttactcattatgtaagtgtttcttgtatctattttgttatctatttgtaagaatgattccttaagctatagggtatataacctttatacgcttttgacaacaaatcatattttgattcaatcaaaatgataataaaggggattaaccatttatgaattacgtgattacgtcaacactgcctgagcaatatggaggcagaacaaagtccctccttgaccgcacgaagaagttagttgagcaagctgacatggcatatacgattattacgacaaactataacccttactacggagatatctatgagcaatattatagccagaataaagtcccgcgctcggtaaaaatgattaacatttacgattatctcgccaatcgttcttactctggtaataaagttaagcagccgatcgaagaagaaggacttacctatcgtgaaataaagaaaaataaagcctatcgcttttttgaaaacggagaatatgttctttataaaaactatgatacagaagatggctctttgaaatttatcgattttatggattcttacaaccgtaaacgcgcttgtagaaaagaatttaatagccttgggaaatgtcacagaaagattaactacaagcaaggaacgacaaataagcttgaagaaatctattatgatgacgctggctatgcctatgtaaacaaaacgtatgatggttcaaatgaaaataaattgattcgtatgcatctctttagcggacaagacattctagaattcaaaacggaaaaagacttcttccgctattgccttgagcacatgattgaagacggttcgaccgttattaatgatgctcgccttcttgataaaccaatgtgtgagatgaagggaaatgacgtaacgaaaatcgttatccttcataatacacatctacaaagcgaagacattcatgacattaagtcgtcttatcagtatttgattgagcatgcggatgacgtcgatcatattgtagcgttaactcatgaacagaaaaaagatctttctcatcatatctttaacaatgaaaaaatcagcatcattccgcattccattgctccttccactcgaaacaggagtgttaagaaggaaaataaatttgtttttatcggcaggttaaccgatgtgaaacaacctgaccatttaattgaagcgtatcaaatggcgaaagaacagctatccgactttacgcttgatatttatggagaaggaccggtaaaagaaaagcttgaagagcaaattaaagaatacaagcttgaaaaccatgtaactttaaaaggattaaccaatgatccagaaggtgtctttgcatcagccaaagcttctttcctcccaagtcagtatgaaggatttgggctcgtgattatggaaagtcttaataatgactgccctgttgtggcttacgatattaaatatggtccgagagatttagtcaaggatcatgaaaatggactaatcgttgagaaaaacaatattgaagctctatcaaaagcaatggtacaagtaaaggatatggattttggtacgattgacgtcgagaaagaataccgagaaaaagcctttgtatcaaattggagtgctcttcttggaaaacaacagaaaaaatttaaacttcccttctttaactaaggtctctacagaaaaagaccgctacttcgcagtagcggtctttcttttacctttgcgccgtataatctgtcacgtagttctccatctcactaatcgcgacaccttgataataatgtttcacaatatcagcgtacgccttaccatcttccgccattccatttgctccatattggctcataccaactccatgtccgtacccttttgttaccacgttaatcgtgcctcccactcgttcccatgtaaagtcagaagacctaagtccgagaagatctcttatttctcttccagtaaacgtttttccacctactgaaacttcggctactctcttaccttcggttaagttttcaatcgatccaatggaacttttcgaaagatttacaccaagtttctgttcaaattctgccactgtgaacgttgctttatcttcgtattttggcgaatcaacatcccacggactttcaacacttcttaagtaaggtgctttattttcccaatagtcttctgaattctctgtatagccattactcgtggagaaaaacgaagcgtagattggattgccttcataggttaaaatttgaccagccgttgcttgaaccgcttcttcaattctcgcaaacttttcgtcaaattcttctccccatgccttttttagctgtgcttgatccttatatacctgatcctggatcgtatccgttacgacagcttgatcaggaagatttgcagaaggatttttaagctttgttacgacaaacgttcttgcggtgagcgcctgagctttcaacgcctccatattaaagtctgaaggcatttcagcagcgacgacaccttttacatagtcttcgatcggaatactcatcgtttctttctgttctgatcgaaagaccggaacgtccacttccaccgcttctgttattttctccttcgtcatctgattcccttcactggtcggtggtttcatctctgttgattcaaaaggtaaaaccagaatagatggaagaaggattagaatcgccgcaaacagaatcagtgagccaacaattcgcttcattcacatgcctccttctcgattgcttacccctatcatcgtatggagatggacaaccatttagaacagaaacggcaagcagatacggagtttttttaccatatatatgtaaacgattgatcgcacagccactttttgcacataaaaaaagaggaggccatggcctcctcttgtattcacattatgcgaattttggtttcatatcaacagattgctcagactcttctgttgcaggctttgctgtctcgtcaactgttacacgttcaacgtcagctccaaggcttgcaagctttccagagaagttaacgtaaccgcgatcaaggtgcttcagctcatcaacgcgagtgtagccatcagctacaagtcctgcaagaattaaagcagctccagcgcgtaaatcagtagcagaaacttctgcaccttgaagtgtagaaggtccttcaataatagcggcgcgtccttcaatcttgatgttcccgttcatgcgacggaattcttccacatgcatgaaccgattttcaaagactgtttctgtaataacacttgtacccttcgcttgaagtaacagcgccatcatctgggattgcatatccgtcgggaacccagggtgaggcattgttttcaagtcaactggctttagagtttcaggtccaataatacgaagtccctgaccttcttcagtgatttgaacgcccatttcttccatcttcgcaatcaatggacgaagatgttccgaaacagcattttcaattaatacgttaccacctgtaattgcagcagctaccatgaatgttcctgcttcaatacggtctgggataacagcgtgctctgctcctacgagcttctccacaccttcaatacgaatcgtacctgtacctgcgccgcgtactttcgcacccattgcatttagatagttcgcaagacaaacgatttcaggttcttgagcaacgttctccattaccgttgtaccttctgcaagtacagctgccatcataatattttcagtggcgcctacacttgggaaatcaagataaatctttgccccttgtaatcttcctttaataccagcttcaataaagccattaccgattgtcacttctgcacccattgcttcaaagcctttaagatgctggtcaatcggtcttgagccaattgcgcaacctccaggtagtgcgatacgggcatgacccacgcgggccaaaagtggtcccattacaagaaacgaagctcgcattttacgaactgcttcaaatggtgcctctgtttccaaaggttttgttgcgtctactttgatcgtgttaccttctatttgcgtctcaacattaagatagcttaatacttcactaatcgtgtgtacatctgaaagggcaggcacatcatttaacgtgctcgtgccttcgcctgctaaaatagatgctgtgatgacgggcaagactgcatttttagctccttctactttcacagagcctgacaatctcctgccacctcggacgatgattttttccaacgtattcccctccgcgtcctatttgtatattaatattcagtcgtaattattggtgtgccaattgtagcggttattccgccgcctattcctgtattccgtaatgctatttgtatgttcattctctggttgttcgttacgagatctgcttcccactcttcatggtatgcggaaagagatacaaacgtctcttcattgatttcttctacttttgaagcggaaaaagctcctaacagcttgtctgcttcattgtacaaaacaatgtccattgtatcatttttctcacccacaaaacaagagaaaactggggcttcttgcgtaaccaattgtgacttttgcgccttaaatcgttcgtacgttgttcgccattcctcctgatgaaaccctttaatttccatgttataaataagataagagctaatgcgatttgcttctggataagacacgagtgtcagtgtttctttcgtacccaattctgaatcaattcttgtcccgcttacttttacattaccgtcttttttttccaaatcaccccattgaaaatcgggcgctcttttggaaatctcggacataatacctttgtaccctaacgactttggaatgaaactcactttttctcgtgtgtaaagagaccacttttgtatagaataatcgttggtcagtagaacattcgccatctcggcagtctttacttccgtttcatcttcaattgagactgatgtaccattcgaaaagctcgctagaagtaaaatggacagtattccgattagaagcctcatattaaccctctccccgttctggtcttcttatctttcagtgtgaccatggggggggaaggcatacatggaagttgtagtcagatcccgacaaattccgtacgaagcttctgtatatgaactgtttttgagtttatctagctgctgcgcccagaccctcgagtcgcttcaccttttagattgaacacaaagagcgtgttcattctaaaaggctccagcgcttgtcgggtttaaacgggcgcattcgcttttcgttgtctagctactgcgcccaaaccctcgatcgcttcacctttcagcttgaacacaaagaccgtgttcattctgaaaggctccagcgcttgtcgggtctaaacgggcgcattcgcttttcgttgtctagctactgcgcccaaaccctcgatcgcttcacctttcagcttgaacacaaagaccgtgttcattctgaaaggctccagcgcttgtcgggtctaaacgggcgcattcgcttttcgtttttaaaagaaatattgtagacggagtgaccagttgtagtaatctaggaagaaactgcttgcgagggaaccgatgcttagggttagcaagatcatgaggactttcgcctgtggactgttcggttttttgaaaaagacatcgaaccgaacggtttgtaacgcccaccaggtaatcataatgaaaaccaggttaatcacaatcgttaaaatcgattgttgcgccagtgcttctgtcatcttatctacccccctatctgcaagtgcaccattcgacaaacgtacatttttccatctaatagcctattataagagatttcaactcaaatgaatatcctactttaccactaataagcggtttttttaaatataaataaggcgttttcgccatattttcctttttcttcgtttagaacacgaaaaacagcagattcctctgctgtttcatggattaaagatttcaaggaattgaaagtggtcgtgaataaaggttaatgcaacggaaggaaagacgccaagtataacggttcctgctgcagttatcgcgagtacagcgacgagtccatttgaggcaacgactggctttttcgttggtgatggacggaaatacatttgaatgaatagaccaaaataataaacataggagaggatcgttccggttaacatggcgagcgccagaacgaatcgctttggctccgtgcctagtgcgctcatgaaaatctcaaactttccgataaaaccagccgttaacgggatgccggcgagcgataaaaggtaaatcgtcatcgcgattgtgacataaggggagcgtttaaataaaccggcaaaagaatcgactgttacctctttcgtttcgtcgcctagcgcatgaatcacggcaaatgccccgagattcattaacaaataagcggcaagataaaaccatacggcatcaaagacgagctctgataaagcagctaacggaacgagaaggtagccggcgtgcgcaatacttgaataagcgaacagccttttcgcattcaactgccttaacgcaatgagatttccaatcagaatcgtgagaacagcaagtaacacaaggtagggacgaaccgagacaagcagcgtctcatagcttaccccatctggtgtaatgacttttcctgttccaggggcaaaaacaaatggaaccatgaggagcctgagcatgatcgcaaaccccgcaatttttgaaacgacgctaagataggcagttatcggcgtttcagccccctggtaaacgtccggcgcccacatatgaaatggtgccgctgttattttaaaagcgagaccaacaaaaatcatcagaaaagcaaacacggcgatgtaccgattctctgtaacaacgtcgctacccattaaagcttgaatttcataaatgtttgtttcccctgtcaggccaaataagtaactcattccaaacagcgcgatggctgtcgcaattccgccattcacgatgtatttaaaagcagcttcattcgctaactggttctttttacgaatgccaacaagaatgtaggatgaaagactaagaagctctaacccgacgaaaagcgtgattaaatccgcactcgaagccatcatcatcccgccaagtaaacctgttagcaagaggtagggatattctcctttcacctcatcaaggtcatttgcttttatccctagcaatagcactagacccgttccaatgagcataagaagcttaaatgcttttgcgaatgagtcgagtcgatacgtttgatttaatatcgtcacaacgccatcatcaagctgaaaaatgagaaagacgatggccatcgcgatgcctgcgagggcaaaccagacgagaatcgctctatccctggtctttggcataaataaatcaagtagtgatagcgccactgccgttagcagtattgtaaactccggcatcatgctgctccattggtagtttagtaaatcattgatctccatttcttaacccccgatcccgagcgtacgcgctatttgaagtgtgttggataatactgcaggatagacaccaatccagataattagactgagaagaatggcggacggaactagttcaaccgctgataaatctttttgcttatcaaaatgcggttttctttctccaaacgtcacggcaagcactgcccggagcatataaaccgcggttaggatcagaccgattacaccgatacttcccatgacaggcatcgtttcaaataaaccgagaaatgcgagaaattcactaataaacccactcattcctggcaatccaagtgaagcgagacctgcagcaagaaaaaatcctgcaaaaagcggcgtctgactcgccactccccctaatttcgcaagctctgttgtgtgaaagcgatcaatcataacgccaacaaggagaaacagtagcgctgcgatcaaaccatgtgaaattgtttgaaagatagctccctgtagaccagccgtgttaagggatgccactccaatgagcacaatgcccatatgggaaaccgatgagtaggcaagcaaggtgcgcagttccgtttgcacaagagcgataaaagctccatagagtaaattaacaacgccaagaatcgccagaataacggccgtttcttttagctgatcaggaaaaaaacctgccccgaaacgaataagaccataagcaccaatcttcagtaaaacacccgcatgaatcataaccacagcgattggagcttcaacatgcacacgaaccatccacgtatgaagtggcacaatcggaagctttgtaccaaacgcgactagaagaaggacaaagagccacattcgcgtattccctgaaagaaattcataagaatcagcttcttgcaaaagaaacgttagttcactaatattcatcgtccgcatctctacgaatagcacaatgatgacaattaatagcagaattgaaccgatgccgttataaacaagaaatgaaaaagctgccttttcccgttcaaacccgccccactttccaatgaggaaaaacattgcaacaagcgtcacttcaaaaaataagaaaaacaaaaataaattttcactagaaaacacaccaagaatgccgagttcaagtagtaaaaagagaatgtagaacccttttactccctcctggatccgaacggcagcgagtgaagcaagaaaggtgataagcgcagatagcattaaaaacaatagcgacagaccggttaccccaaggtcgtatgtgaccgggtatggctcatttggactaatcgccgtcatcagttcaaaccattggtaactttcggcaaattgaacacctgaaagtgtccgattataaaagctgaaaacaacaaacgttaacgttagcggtaacactgttccaagaataccgacgcttttgatggaacgatgctttgaaggcatgaggctaagaacgatcacacctagcagcggggagagaattaagatcgttaacaagcccattagaaatacccccctaatacggcaattaacagtatcacaacgacaagacctgagaaggctactgttccatatgtttgcacctgaccggattgtacgtctgatcccgcctttcctattcgttttacaagtattgtgagcccccgtgcgcctccttcgatgataaaacgatcaaagtatatccagaagtagccgatcacacgcgttccttttacgacggttttatcataaaccttatcgagaaagtatccttttgataaaaggcggtgtaaggcacttgaactctcttctgcatgcggtcgccttttcgcatacgttatccaggcaagcacaatgcccgctagtgataaaagaatcgcacttattggaatccacgttggcgcagcatgatgaacgactgccactggataaggactcgtctctaaccagtctccaagaaacgaaccgaaccaggctgtctgaatataacctgcaacgatcgaaagcaccccgagtacgagcattggaatcaacatcactcttgaagactccttcgcttcactcgaacggtcgccagaaaagacgagaaagtacagacggaacatataaaaagctgtgagaaaagccgtcaatagtgcaatcgaaaataatacgtatcgcccgtcggcaaaggcggaaacgagaatttcatctttactaaaaaagcctgcgaaaagcggaaatcctgaaatcgacaagcagccgattaagaatagtgcagccgtgatcggaagctgctttctaagaccacccattttaaaaatgttctgctcatgaacggcatgaatcacacttcctgccgcgagaaacagaagcgctttaaaaaaagcgtgtgtcgttaagtgaaaaatacctgctgtgtaacctgctgcacctaatgcaagcatcatataaccgagctggctaatcgtagaataggcgagaatccgtttaatgtctcgctgcacgagagcgattgttgccgcaaaaaccgccgtaaagcctcccgtgatggctacagtcgtcattgctgtttcagagcttgagaagagtggatacatcacggcaacaagatagacaccagctgcaaccatcgtagccgcatggatcaatgctgagaccggcgtcgggccttccattgcatctggaagccacgtatgcagcgggaactgtcctgactttccgaccgctccaacaaaaatcaaaattgcgataagtgtcatcatcgatggtgcgatctcacctgcttgcactgctgcaaaaataacatcgagctcaaagctacccgtttgccaaaataataggaaaatcgcaacgagcaaaccgatatcgcctattctcgttatgataaaagcttttttagcggctgcctttgcttcaggtttgtagaaataaaaaccaacaaggaggaaggagcaaaccccaacaagctcccaaaaaatatagagctgcagaaggtttggtgaaagaacaagccccgtcattgcaaacgtaaagagaccgaggtagccaaaaaatgtggcaatgcgctcgtcattcgccatataaccgatggaatacatatgtacgagaaaactgacaagcgtcacaatcacaagcattaacgcatttaatggatttacttcaaatcccaccgtaatcatgacggtatcgatcgatagccaattggcttctacgagccgatttccttgtaacaaatgattgaaaaggacaagaagcgcacagccaaaggcagctccagcaaaaatcgtcccaacaaaaccggcttttcgatagaggatcggccgggtgaatagaatgataaggaatgagagaagcggcaatatcgggataagccagacaacgtccacgtttctacccccttcgctactttttaagtgtgttcatttcatcgacattgacagtagccctgtttcgataaagggcaatcaggatggcaagcccaacagccgcttctgctgccgcaaccgtaatcgtaaaaagagaaaacacctgacctcgaatcgatgcgccaacaccgtattttgcaaaagcaacaagatttaaattaacggcgttcagcattaattcaatagaaattaatacaatgaccgcatttcgcttcgttagcgcgccgtatagtccaatacaaaacagaagtaaagcggttaataaataagcggaaagtggaatagagctcatggcttctcaccttcttcatcatcctttttcgcaaggataatggctccaacaagcgctacgagtagaacgacagatacaagttcaaatggaatcacataatctgtgaatagcattagtcccacttgctcggtattattttcatgaagtttctcagcttgcggaccgagtgaaattgtccgaatgcctttaaatacaatcaaaaagaaagcggtaattactgttaacacgatgccttttttcgcccatcctgtcttcggctctttctctgaatgttttgtcagcataatgccgaataacataatgatcgtaatcgctccggaataaattaagatttgaacgaccgctacaaattcagcggaaagcataatatagagtcctgcgatgccaagaaacgttagaacaagcgccatcatcatatgaatcacttttgagagattaatcatcagtaagccgccggacatcgtgacaagaaataggaaaataaatatgagcagctccccggtcatactttgttttcctttctaaggttcgtatcattttcatcgagccactctaaatttttaaataaatcatcgcggctatacgtagcgagctcaaaattatttgtcatgataatcgcttcagtcggacacacctctgtgcatagatcgcacaaaatgcaaatttcgaaattaatatcgtacgtatcgataattttcccttttttagttggatcgggatgttttatacctgtcaatgaaatgcagtctgtcggacaaatggccacacactgattacatacaatacacttttcaggataaaatttttgaatgccgcgaaaccgatctggtaaagcaaggggctgatccggatactggtacgtcactttttccttcgtcatatttttgagggtgtaagctaatcctttcgctagtccacgcatgttggcttcctcccttgtttagaatgaacgaatgatctctatcacaatagtcgttagaaaaatgtttaataaagcgagcggtaaaaggattttccatccgaatgacataagttgatcggctcggagacgaggaaacgtgccgcgaatccagatcatcacgaatacgatgaaaataaatttaagcgcaaaccagactgcgcctggtataaaggttaagaacgggatcgcctgccatcctccaagaaaaagaatcgttgttaacgaagccatcgcaaataaataaacatattccgcaagcataaagaatgcaaagcgaaatcctgaatattcaacgtgataacctgcgacgagctctgattctgcctcaggtaagtcaaatggggttcgattcaattctgcaacggaagcaatcaaaaagattagaaacgcaagcggttgtttaaatagaaaggcaacggactcctgctcggcaataattgtattgagatttaacgatcctgttaacagcacaattcctacaacactcatcacaagcggaatttcataggaaatcatctgagccgctgatcgcatgctaccaagcaacgcatatttattgttcgatgcccatccccccgctagaatgcctatcgttgaaatcccagatatcgcaatataataaagcaagccaacgccaatattggcaaaggaaacctgctctgttagcggaagggcagcgatcacgataaacgccggtgcaaaggcaacgacaggcgcaatgataaagagcgggcggtccgcatcgcgtggaatcgtatcttcttttaataacagcttcaagacgtccgctaccgtttgtagtaaaccgaatcgcccaccaactctgtttggaccatgacggagctgcataaacccaagcacttttcgctcagccaaaatggcgtacgtaacgaacccgagtacaaccattaacatggcggcaccgacaaggaaaaaactgagcgtctgccagtatccgggtggagatgcaagcatgtcgttgatcattagccgtccacctccccgagcacaatatcaatgccaccgagaatagcgatcaagttcgagatattctccccttctagtagctcaggtaaaatttgcaaattataaaaagacggtcgacgaaacttcaggcgataaggctcttttttccctttggaggcaatgtagcagccaatttctccgcgcggcgattcaatgcgcacgtacgtctcacctgcaggaggcttaatgatccgcggaactttcgccataatcggcccttcagaaatttgttccactgcctgctcgacgatttttagcgcttcttcaatttcagccatacgacagttgtagcgtgccagtgcgtcaccttgcggaaagacgggaatttcaaactgaaagcgatcataaagcgaataaggttcgtttttcctgaggtcccactgcatgcctgtacagcgtaggttcgcaccacttaatgagtacgcgagcgccttttgcttggaataagcgcctacccctttcattctcgccataaaaatttcattccctgttacgagatcatggtagcctgcgagctgttctctcatatacggcacgaactctcgcaccttctcgatccagccttcaggcgcatcccatttgacgccaccaacgcgcatataattaaaggtcagtcttcctcctgagatctccgttaacaaattaatgatcacttctcgctctctgaaggcataaagaaacggactcatcgcgccaatgtcgagcaaataggtgccgaaccaaacaaggtgactcgctattcttccaagctccatcacaatgacgcgaaggtaatccgctcgctcaggaatgtccatcgccatcatcgtttcaacagcatggcagagaatgtaattattcgtcattgcagcaagataatccattctatctgtatacgggataatctgcgtgtattgcaggttttctgcaatcttttccgtgcctctatgcaggtaaccgataacaggctttgcttcttttatgacttctccatcaattgtaagcacgatgcggaagacgccatgcgtactcggatgctgtggacctacatttaaaagcatctcctctatccgaatcatcgctacacctccacatcataaggctcataatcttttcgaagcggatgcccgacccagtcatctggcatcatgattcgcgttaaattcggatgcccattgaaaacaatgccgagaaggtcatacccttctcgctcaggccagttcgcaccagcccaaagggacgtcagcgaatcgatgacaggtttgtctcgatcaattttcacttttagggcaacgctctggcgattttgatacgaatacaggtgattgtaaatttccatatgagtctcaaaatcggtgccgtgcgtttcagaaagataatcaaaagcgagaagctcattgtatttaaggaactgcgccacttttaagtacgtttctttcctcgcaacaagcgtcggcacgtctttcgcgagacgattaatataggcatcttcaagaaagtcgttcccaaggttttctcgaataatgtgcaggtatcgatcaagcacaggctgatttggtgaagggctttcttcttttataggctcatcagttttcgaagcagctttcttcgctttagctgcagcggcttttgcctttgcaactgcgatcgcttttgctttctcatccgtagcgtcggaatcacctgcctctttttgctttcttagggctgccgctttcgcctttgcagctgctacagctttctttttcgcaagggctgccgcgtcttccccctctccctctatttgctcccctttttctttctgctttttcagcgcagcggccttcgccttcgctgcagcaaccgccttctttttcgcaagggcgacatcgtcttctgatgcttcctgacccgtttcgttttgattcatttctttttgttttttcagtgccgccgctttcgccttcgcggctgcgactgctttctttttcgcaagttcaacgtcttcttcctccgctatctccgctacgctattctgttcacttttctccatttctttttgctttttaagcgcagcggcttttgctttagccgctgcgaccgcttttttcttttgaagctcaaggtcatcagcaggattctcggcttccgccttctttttccgtaactcagccgccttccgctttgcttcttctacggcttttcgttttgcttccagctcttcaggtgtttgatcgctcatcgattcgtcacccgctttccagtgcgcgcttcatagcgaattttttcttgtagtttatttatgccgtatatgagggctgccgggtttggcgggcagccagggatatacacatcaacagggacgatttgatcgactcctttaacaacagcgtaggagttaatataaggcccgccagctgtcgcgcaagagcccatcgcaataacccattttggttcaggcatttgatcataaagacgctttagtactggagccatttttttcgttacggttcctgatacaatcatgacatcagactgtctcggagacgttcgaaaaaacgttccaaagcgatcaaggtcatagtgtgaagcccctgaacccatcatttcaatggcacagcaggcgagaccaaacgttaacggccagagcgaattgcttcgtgcccacgcctttacattttcaagcgttgcgagaaaaacattatgcttcatttcctcgtattcttccggcgttatattttctaagtttaaatccatttcaacaccttctttttccatgcgtatagtaagccaattaatagcatgacaataaagatcatcatttcgatgaacgcaaagaaaccaagcttttgataggcaaccgcccatggatacaagaaaacggtttcgacatcaaagatgacaaaaagcagtccgaataaataataacgaacgttatactgaatccagctttggtgaaacggctcaatgccgctttcataggttgtttgtttctcagatgttggttttgagggacgaaggaatcttcctgccgttagggcaacagctggaaggagaaggccaaggaaaaggaacatgattacgaagaggtaactattttggtacacgttaagcgattcacccatgaaggtctctcctctcatcgtgctgtaaagttgctagtcttgtatactaattcaacatccccactcttattcttgcttttatttgtaagtttttttaaaatttcgaacagaggtgatcaaatgagcgataaacgaatccgaacgctgacagaaaagctgtgggcaagaaataaatatatggtgatggccaaaggctatgaacattacaaaaacttaggagattcattaaaaaaagcgcaatctcctgaagagctgctttacgtctatgacttactaaaggaaaccttaactcttccctatactaaaaaaggtatgcggacaacactccaacatatgtggggctatttcaaaaaaagagcaacaagtgaggaaaaagaagaatttatcgccattatgaataagcaactatctgatttagatcccttaaccgatcacaacattgaagtgattcgaaagaaactttggaagctactcgaaacatatccgtctgattatttgttacaaagcagctttgttcaaccacagaggaaatggaatgaggtgtatgatcaaaaacagatgcggattgtctcaagagaagattatctagaaagcagtgaaaaatagaaggatttctaccttagcttcccgtagttaaccaacaaaagaaggtgggacgaaaatgacaaactatgtcgcattattaagaggaatcaacgtgggcggtaaaaataaaatccaaatggccaaattgcgcgatgccctttcaaatgaagggtttcagaatgtgaaaacgtatattcaaagtgggaatgttttgtttgaatcagaagaacctggagcccttttaagaaaaatgatggaagggattattcgtaaacagtttgaattaaaagtcccagtcgttttaaggaccgctgtagagtggaagaatatcatcgaaaactgtcctttccgtgatgaacaaattttaaaagcgcaggaaacagcgattggggagagtctttatgtggcaatgttagcagaacctctattaccggatgacgaaaagaagcttcttacatatgcatctgaaaccgaagaatgtgagattagaggtagggaaatttatttactgtttcatgagagcattcgaaactcaaaacttgcggccttcatcactcggtctagtgagtatgcgaccgtacgaaattggaaaacgattaacaaaatgaatagcttgctaccgaatgtacagtcttaattgcaaaaaagcaccagcgggaagttcccgctggtgctttccaattatttacctgccaaatcaaggcggttgattgcacgcttaagcgctagctcagcgcgtttgaaatcaacattgtcttgcttcgcttgatccaagcgttgttccgctctttccttcgctgcacgtgcgcgttccacgtcaatatcagaaggtaattcagcagactcagcaagaattgttacttgctttggtcttacttcaacaaacccaccgctaacggccagtaaatgtgtatccgctccatttttgaaacgcaccgcattgattgtaagaggggcaacaagcggaatgtgtcctggtaaaataccgagctcaccgctctttgcttttacgctgaccaattcagcttccccttcgtataccgggccgtcaggggtgactacactgactttcaatgtattcatcgtacccctccctgggtgtgatcgtaattagaaaagctggcttatcgcccaaatagcaaaaaagtgggagcgaaggccttatgagtctccgccctactttttatttaagccatctgttttgccttttctactacttcttcaattgtcccaacaagacggaatgcgtcctctggaatatcatcgtgtttaccatcaaggatttctttgaatcctttgattgtttctttaactggtacgtatgaacctttttgtccagtaaactgttcagctacgtggaagttctgagaaaggaagaactgaatgcgacgagcgcgagaaacagttagcttatcttcatcagaaagctcatccataccaaggattgcgatgatgtcttgaagctctttgtagcgctgaagtgtttgttgcacttcacgcgcagtgttgtagtgctcatctccaacgatttccggagaaagcgcacgagaagttgaagcaagtggatccaccgcagggtagataccttgctcagatagtttacgttcaaggtttgttgttgcatcaaggtgagcaaacgtcgttgccggagccgggtcagtatagtcatcggctggtacgtagattgcctggattgaagtaacagaacctttgttagttgaagtaatacgctcttgaagttgacccatctcagtagcaagtgtaggctggtaacctactgctgatggcatacgtccaagcaatgccgatacctctgaaccagcttgtgtaaagcggtagatgttatcgataaagagaagaacgtcttgtccttgctcatcacggaagtattctgccattgtaagacctgaaagagcaacacgcatacgtgcacctggtggttcgttcatttgaccgaataccattgctgttttcttaataacgccagaatcagtcatctcgtagtaaaggtcattaccttcacgcgtacgttcaccaacaccagcgaatacagagataccgccgtgctcttgtgcgatgttgttgatcagttcctggataagcaccgttttacctacaccggcaccaccgaagagaccgatcttaccacctttaacgtatggtgcaagaagatctactactttgattcctgtttcaagaatatcagttgttgttgaaaggttctcaaatactggtgcaagacggtgaatcggatcgcggcgaacttcgccgagctcttcattaaggtcaattttctcacctaggacgttaaatacacggcctagcgtgatatctccaactggaacggagatcggtgcacctgtatctagagcatcaactccacgtacaagtccgtctgttgaacccattgctacggtacgaacagagttatcgccaaggtgaagcgcgacttcaagcgtcaattcgatgctctcttcagcaccggtttgagcgatatagttaactttaagggcgttgtagatttctgggagcttgccgctctcaaacttaacgtctacaaccggacccataacctgggtaatgtatcccttgttcatcctgttccctcctaacttgctttaagctgccaaaacaagaagcattcttgtgtgg

SEQ ID NO: 2 - DNA, 4463966 bp, unidentified (residues 2,975,979-4,463,966 of 4,463,966)
  source 1..4463966: mol_type = genomic DNA; note = Genomic DNA of Bacterium
catttatgttttgaaaaaatatatacgtacctattctaacgccgctgcaccagacacaatctcagttagttcctgagtaatcgaagcctgacgagcacggttgtaggatagtgtaaggtcgccgataagatcgtccgcattgtctgtcgcacttctcatcgctgtcatacgggatgcgtgctctgctgctttcgcatcgagaagcgctccgtagatcaagctttcagcatattgaggaaggaggatttcaagaatttcttcttcagatggctcatactcgtagcttgcgagtgatttccctccgcctgtctcaatatccgttaacggaagaagttttctctccgttaaatcttgctgaatggcacttacatagtggttgtaataaagataaagctcatcgaaagctccgtcttcaaacatcccaactgttcgagatgcaatgtctttaatgtctgcaaaagcaggctgatctgaaagaccaacgacactttcaacaacaggcattccgcgctttttaaagaaggaaaggcctactttaccagctacgataatcgcgtactcatcagttgagttatgacgctcattaattgttctatacacatgacgtagtaccgagctattgtatgccccagcaagtccacggtcagatgtgatcaccacatagcccgttttcttcacttcacgactttctagcatcggatgacttccgccgcttgatccatttgcaatgcttccaacaacttcttgaattttctccatgtatggaacgaatgacttggcattcatttcagcacgattcaatttcgcagccgaaaccatctgcattgcttttgtaatctgctttgttttcttcgtcgacgtaattctcgacttaatgtcgcgtaaagatgccattcatttcaccaccttttaagctggccgcggcgtttccgccgcatccctcttattcagatactgcgaagctctttttgaattcttcgattgcaccgttgaattctttttcatcaggaagagcttttgtttcacgaattgtattgaaaatgtctttcttattatgttcgatccatgtcatcatttcagattcaaaacgctggatatcggtaaccgggatatcgtcaaggaatccacgagttagagcataaagaatcgcaacctgcttctcaacagcaagtggcttgtttagcccctgcttaagaacttcaaccgtacgagcaccgcggttcagcttcgcttgtgttgctttatcaaggtcagatccgaactgagcaaatgcttctagctcacggtatgatgcaaggtcaagacgtagtgtaccggcaaccttcttcatcgctttaatctgagcggaaccacctacacgggatacggaaagaccggcgttaaccgctggacgtacgcccgagaagaagagatcagattgaaggaagatctgtccatcagtgatggagataacgttagttgggatataagctgatacgtcaccagcttgtgtttcgataaacggaagggcagttagtgaacctgcaccttttgcatcactaagcttcgctgcacgctcaagaaggcgtgagtgaagatagaatacatcccctggatatgcttcacgacctggaggacgacgaagtagtagggaaagttcacggtatgcagaagcctgctttgttaagtcatcatatacaacaagaacgtgcttgccgttatacatgaattcttcacccattgttacaccagcatatggtgcaaggaaaagaagtggagaaggctgagatgcgcctgctgttacaacgattgtgtaatcaagtgcaccctgcttacgaagcgtttcaacaacgccacgtaccgtagattctttctgaccaattgcaacgtagatacagatcatatcttcgtctttttggtttaggattgtatcgattgcaatcgaagtcttaccagtctgacggtcaccgatgattagctcacgctgtccgcgtccgattggaataagagagtcaattgctttgattcctgtttgaagtggctcatgtactgatttacgatccataacccctggagctgggctttcaatcggacgagtttttgttgtacctagtgggccctgtccatcaacaggttgtccaagagggtttacaacacggccaagaagctcttcaccgactggaacttccatgatgcgtccagtacgacgtacttcatcgccttcacgaatttcagtgtatggtccaaggataatgataccaacgttgctctcctctaggttctgagccatacccataacaccgtttgaaaattcaacaagctctcctgccatcacgttatcgagaccgtgggcacgagcaataccatcaccaatctggataacggtaccaacatcatcaactttaatatcagtttgataatttgcgatttgctgcttgatcagcgcactgatttcttcagcattgatgctcatgcatattcacccctatcttctagctcttcgctgaaactaattctcgttccatgcgtttaagttttccgctaatgcttccgtcaaaaatgcgattgccgatgcgcactttaataccaccgattaaagttggatcgatcacattttcgatgtgaagcgttgttttgcctacacgtttcgcaaatacggcagagaccttcatctgctcctcttccgttagaggcttcacagaataaacttttgctactgctgtttgcttttgttcataagcgaatgtttcatattgatcaacaagttcgaaaacgattgctgtacgcttacgttctatcagtgtaagaagcatattcatcacataagtggatagagacgatccaaaactagtctggatcatattcttcttctcagctgttgtgaattttggatgcttcaacacattcattaaatctggcgtttgatgaaaaacatcttttacaacagttagctcattcttgatttgctcgacgttatcgttctcacgagcgatgtcaaaaagagcaccggcataacgttttgcgattactgcatgttctctactcatttctgatcgcctgcctggtcaagatactcatcgatcagctgcttttgtgcacgctcatcaagttccttctcaacaacttttgaagcaatcatgacagatagagaagctacctgttcacgtagagaggcaactgcactttcacgttcacgtttgatttcagcagtagccgcttctttcaaacgctcagactcaagacgagccgcttcaatcatttcctgacctttttggtcagccatttgtttttgattctcaagcatagctttcgcttcctgacgaacacgcttcatttcatcgcgctgctcattcaggaatgcttcagcttccttacgattcttctcagctgagtcgatttcgttcgcaatgtgctgctcacgttccttcatgatgcccatgagcgggccccaagcaaacttcttaagtaaagcaagaagaacaataaatgcgataagttggaaaactatatcaccagcgtagaatcctgctcctagaattaaactattgaacaccgtgttcactcccttcagaggtcatacaaaacgaatggcgaaggtttcatttcgaaactttctccgccatcatgaaacaaatccgtatccttatctaattgaattattgacccattacgataaatgcaataacgaccgcaataattggaagtgcctcaactagtgcaataccgataaacattgttgtttgaagcgtaccacgaagttctggctgacgagcaattccctcaactgtactctttacgataagaccgttaccaataccggcacctactgccgctaaacctactgcaattgcagctgctaataaacccatgctaaatttcctccttataattcataaatattttttataataaaaactcattgataccttgttttaatggtcatctgccactttatgcgccatgtaaaccattgttagcattgtaaagataaacgcctgaattgtaccgacaaagatactaaatccttgccatgcgagcataggaagaaaggctccaagcgctccagcaaatcctgcgccaccaagtcctgcgagaagtcctagcagaatttcaccagcgtagatattaccataaagacgaaggccaagcgttaaggtgttcgagaattcttcaatgattttgaaaggaaataggaatttaagtgggctaacaaaccctcttccgtactccttcgcacctttcatcttaataccgtaataatgtgttaacaacacgaccatcgttgctaaagttagcgtgattgtcggatctgcagttggagacttccaccaaagttcagaatcgacggcaatggcgaacggtagccccagcatgtttgatacaaagatatacatgagtagcgtcatcccgagaaacaggaagcgtccaccagttttccaatccattgtgctcccaataagtcctttaacaaagtccattacccactcaatgaagttctgcaatcccgtaggtcgcattgctaaagatcgagttgtaactactgcaagaatgaatacaatggcagaagcaatcgtgatcatcaagacattggatagattgaaagtcattcctaaaaaatcagttgtaggtgcatgatgttccaacagcttttcacctctcttcctacttaaagcgtattttggatgttgaatctatgagaatgataatgtaggtggtcattaacccaattaccacacctagcaaattgaaatactctgggtaccttaatgcaatcagtacgccgagtccagcaacagcctgtcttgttaacagaccaagtgatctagcctttgtcccttttactgtagcttcaccaagacgatcaatcttacggaacatgttgaataggttgtaaatactgaaaatggtgccaagaattaacccgaggaataatgctttatatgaggtaatcccccaacccattacgaaaatggcgagcaaatacagggtgaattgcatgtagcggcgaaaactttgagtgtattctgtcatttaatcttcccctgtaaacttatgtagaagacgaaccaatccataaactcctccgcccaaaccgagcaaaagaccaattatgagaaaaagtggaaaagtgtcgaataagcgatccatccatctccccaaaaatacccccgtaaggatcgatccaacaagataagaaaggattgtcgtatagagggccatcgccttcaattaaagcgctcctttgctataaaggtaagtcattgaaaaggatgtttcgagtaaatgaaaaccttatcactataccctttgtaagtctacaatagggtgtacttgatgtcaatgtgtttggaggaaatggtgtgatcaaattcacaaatgaaaaaacgcttaaaaaagcctgtaataacaaggatagtaacgcttacaggagcagagttgtgttaatcaaagaaaacagggaatgattccctgttatttaaggcggaatttgtcacttttttttcacatttgatgacatctcgacaaaaaaatctcttcctgtgaaggaagagatttttccaaattacttcgttccgtacaaacgatctccggcatcgccgagacctggaacaatgtagcctttttcatttagtttctcatcaagacctgcgatgtaaatatccacatcagggtgcgcctcgttaagaagctctacgccttcaggtgctgcgatcagacacatcattttaatgtttttcgctccgcgtttcttaagggagttgatcgcttcaacagccgaaccacctgttgcaagcattggatcaatcacgatgaattcacgttcttcaatatcagcaggaagctttacatagtattctaccggttgaagcgtttcaggatcacgataaagaccaacgtgtcctacttttgcagcagggatcagcttaaggattccgtctgtcatgccaagtccggctcttagaatcggaactagtccaagctttttacctgaaagaacttttgatttcgcttcggttacaggcgttttgaccatcacttcttcagtcggaagctctcttgtaatttcataagccattaacgctgcgacttcgtccacaagttcacggaactccttcgttcctgttttctcatcacgaatgtatgtaagcttatgctgaatcaacggatgatcgaacacgtatactttacccatcgtatgcactccccttttcgttttggtttcgttcctaaatcttcttcgcaattttacagaaaaacgcgagttgattcaaggctttcaaagatgatgaaatattcacgctcttccagcctgaacaaacgcacagcttaataaccaattattgactaaaaacgccgggaaaaggtgatctcccggcgtctgtgtctatttaataagaaatattttcatacattgggaatttagcagtaaggtcttgaacacgcttctctgctttttgaagagcgtccgcgtcttcatgctgcttcaatacatcaccaataatgcttgcgatttcttccatttctgcttcaccaaatcctcgagacgttacagctgccgtaccaatacgaagaccgctcgtaacgaatggactttgtggatcaaatggaatcgtatttttgttcgttgtaatgccaatatcatcaagggctttttcagccactttccctgtcaaatctagactttgtaaatctagtagcacaaggtgattgtccgtgccgtttgagacgaggttaatgccttctttttcaagtgctgaagcgagttttttcgcattcgcaacaaccttttcagagtaacccttaaaatcgtcagaaagtgcttcaccgaaagcaaccgcttttgctgcaatcacgtgcatgagtggtcccccttgaattccagggaaaattgacttatcaattttcttcgcaaattcttctttacaaagaatcataccaccacgcgggccacgaagggttttatgtgttgttgttgttacgaaatgggcgtgtggcacaggatttggatgatgaccagttgcgactagacctgcaatatgcgccatatccaccatcaagtaagcatccacttcatctgcaatttcacggaatcgtttaaaatcaatttcacgcggataagcactcgcacccgcaacgattagttttggacgatgcgcttttgccttctcaagaacatcatcgtagtcaatgcgatgtgagtctttatcaacgccatactcaacgaaattatattgcacgccactgaagttaacagggcttccgtgagttaaatgaccaccatgtgaaaggttcatgccaagaacagtatcaccctgctcaagaatcgtgaaataaacagccatgttagcttgtgcgcctgagtgaggttgcacgttcacatgctctgcaccaaacagttgcttcgcacggtctcttgcaatattttcagcgacatcgacatattcacagccaccgtaataacgtcggcctggatagccttccgcatacttgtttgttaaaacagacccttgtgcctccataacggcttctgatacaaagttctctgatgcgataagttcaatcttgctgcgctgtctgccaagctcatctttcattgcctgtaaaagttcttgatcctgctttgctaggttttgcattgatatcccctttccatcccacacaaattaccattcgtgaacacgaacagttcgtatttaatctcgattgcattgtaccacagaagttcgaatccgtatattagataaatgaactaaattatcgttcggttttaaggctaaaagcagtgctcattttttcctggatatgacgcacgttctccaccaatcaactttggtcttgaacgaaccatcgtcacatgagcctcaccgatcgacgtatgtcgccctctcacaggtactgctacatgccggatgtgcataccaataaacgtatcccctatgtcaatcccggcatctgctgaaatgaactccacaaggaccggatctgccatgtttgcatacgcatgcgtcgccatggaaccacctgctcgtgttgtaggaattgctgcgacaatgtcatatcctttcgcataagccgtttcacgctcaatgactagtgctcgatttaaatgctcgcagcattgaaaggcaagctgaacacccgtttctttttgaaagacttgaacactttcataaatcgcttctgcagctgaaatggtgcctgccgttccgattcgctgaccgactacttcacttgagctcatcccaacgacaagtaaatgacgctctgaaagacgcgcatctttctgaaggtccccgagcgcttctagcgtatggcgggtgatttgacgcgccgtttgttcattcacagaaaacgcctccttatccctttgcttcgtattccgtaatcttaccgactcgttttgcatggcgacctgcttcatactctgtctcaagccacaccttcgcaatttcagtcgcaagccccggtccaataatacgctcgcccatcgctaggacgtttgaatcattatgttgtcttgttgctttcgcactaaaaaggtcatgcacgagcgcacagcgaatgccatttactttatttgccgcaatcgacattccgatcccagtaccgcaaattaaaatgccgcgatccgcttcaccagccgctactttctcggctacgggtatcgcatagtcaggataatcaactgaatcatggcagtcacagccaagatcgatcggctccatccctaattctttaatcacgtgaataatgtcttctttaattttcacaccagcatgatcagcacctacggcaactttcatggttatccctccaattcttgatgatccaaacgctcgatcattcgttcaattgcttcctcaatttctgcatatgttgttcggtactgctcgattgttccgccaaacggatccgatatatccattgaaggtaacgcttgttcaagcgcttgcaactcatttaactcttttctcatttccacttcgaattgttgacgcttttcggcttgtttttctgtatccatttttgtgatgtcatgaagaaaagccgctcgcttcatttcgatttcagctgctttttcctggtattcatcgtactttttttcattttctgttgctgaatattcttttaaggtatacaccttatgagacatctcagggaaatcgcgaagcacgagcgctttatggctactcgtcatcgtcagaagaagatcgccccattctgctagattccgatccaacattttcgctgtatgcacaaatggtacgtttttctcttctaaaagtatttctacctgacggcttgccggtgcgccattcgctgcaaaaacgccagccgacttcgcatcaattttgttgcttttattttttaaaatcacttccgccattggactgcggcatgtgttacctgtacacacaaatacaactctcaccttgtccacttcccttcccttcctattatgagagaagaaaggggataaatccacccctcgcgcatggcgaaaaaactggaagttctgaaacttttttgtcatctgtccgtaatacttgttagaagcaaatcaaggggggaaagtcgcatgtcacaaagaaaaatcgttattttagcaggaagcattgttctatttcttattcttggcgtgatcctcgttacaagctggtataccgtggatgaatccgagcaggctgtcattatgacgttcggaaaagttgatgaagaaattagcgatgctgggcttcattttaaacttccatggccgatccagcaggtcgatattctaccaagagaaacgttcagcttaacctttggatacgataaagaagatggaaagattgtggactatccagaggaaaccaaaatggttactggagatgagaacatcgtgctcgctgacctcgtcgttcagtggcgcatcactaatccaaaacaatacttatattactcagacgaaccgaaagaaatactctataatgcgacttcttcttcattaagaggcgttatcggtagttccgaaatcgatgaagcgctaacgtcaggaaaagcggagattgaaggaaacgttcgagacattcttacaaaattgattgatcgctacgaaattggcatttccatacttgatgtgaagcttcaagacgtggaactcccaaatgatgaagtacgaaaagcgttcacaaacgttgtcgatgcccgcgaacaaaaagaaacaaccatctacggagcgaagaaatacaaaaaccaggaactgagcgtagtagaaggtcaaaaagatgcgcgtatttccaaagcggaaggtcaaaaagcacagcgaatcgagcaggcgcgtggggatgtcgctactttcaacgcactctacaatgaatacaagaacaatccagatatcacaagacagcgccttgtcttagaaacgcttgaagaagtgctacctgatacaaagatctatattaccgatgaaggtggcgacaccgtgaagtatttaccgatccaaccggcgcaagagaaaacgactgagacaccgaagccaaaggagagtgaaaagaatgagtgagaacgtttttaatatggatgaacaccgccgcaagatgagtcccggtaaaattgtaaagagcattctgctcattgttctccttctcattatcattggcagcattttcagcactctctttgtggtaaaggaaggcgagtacaaagtgattcgtcaattcggagacgttgttaagattgaaacggagcctggactaaagatgaaggtgccctttatccaatctgttacgacacttccaaagtatcaaatgctttatgatgtaaatccagaagaaatcacaacgaaagataaaaagcggatgactgttgataactatgcggtctggtcagttagtgacccacaggatatgattactaacgcacggacaatcgaaaatgcggaagcaaaaatgggggaattcattttctccgttattcgctcagagcttggtcagcttgagtacgaccagatcattaacgaggaaaaatcgaatcgaggaagttttaatgacaatgtgcgagagcgcgtaaatgagttacttgaacgcgattcatatgggattcaagtaacggatgtgcgcatgaagcggacagatcttcccgatgcgaacgaaaagtctgtttaccagcgtatgatttcagagcgtgaatcgaaagcacaggaatacctatcgcaaggggatgccgactccgaccgaatcaaagcagaaacagataaagaggttgatacgattcttgccaaggccgatgcggatgcggaagaaattcgcgcaaaaggtgaatctgaagcggctaaaatctacaacaaagcatttagcaaagaccctgaattctatgagctttaccgcacgcttgagtcgtataaaacaacgctcaacgacgaaactgtgattatgttaccagcagattcgccgtatgcgagacttttacagggaattacggaataaatttttcaggaaggccgcttgtatgaccgaaagcggcctccctggaagtgttttattggctaaaatctcgttttattggccaaaaacccccaccgccttcattacacgatcaacagcttcagaccaaaacaaaataagatgcaacctccaagcagttcgctataagaaccgatccagcgctgaaacttccgacccattattaatccggaccacgttaagaacatgctgatcaggccgaacaatagaatcgtgacaaatactcttgctccataaataccaagacttagaccaacggaaaagctatcgagactaacgctcaacgaaaaaacaagcaggccgaatccgacaggggttacaaacggtttatcgcgtgatgatagcgaggaaagtcccatttgaataccgagtaacagcaaaaggccgccgccgaccatcgtcgcgaccgtgccaaaatgttcggatagaacacggccaatcatcattccggcaagcggcattcccatatgaaaaagtccaatcaccacaccgattttggcaatttggcggagacggagcgggatcatgcccatgccaagtccaactgaaaaagcatccataccgagagcaaatgccattatgcttaatgtggcgagctctccaattaatgcagtggaaatcattccatctcccccccgggacgtgctattcaacttttatgcacgtcctcttgaaaatagaaggaaaagaatgaataataggttaagtaaggctcgttaagggtagtgttttagtaatgattgagccaaattggaggaacgaatacgatgagtgtgcataaagggatttcgaatcagcttagtcaaaaaaaccgggaaattaatttgtttattcagttagataaagagcgagaagccgcaattgcgcatgctgccgaattatgtgcagctaacgaaacatttacaacggatcgcattaacgaactttctctacaaattaatgaacttgcaaaacaaggaagcatccctacccgtacgtacgtaacaccgcaaatggtagaagagttcgtcaataaaaaacgcagctaatctctccaataacaaaaacccgctcaaagcctgagcgggtttttgttattctttgatcacacgattgctggctgcttttgatagccggttcattacggctgctcctacgccatcatgtgtaaacatttcgctataaatttcatcaacgtctgattcatcgaactgccttagaacatcatacaagcgattcgcaactgagatcagatcttctcttgttccgcacgggataaccacatctgcacggtacgttgctttagattcttccgttgcgagaacaccaatttttttaccttctgctctacgcttgtccacaattgtttgcaagtatgacggtgaaccatccacaagcgttaccggggccgtcggagcatagtgtgtgtacttcacgccaggggattttggcttttgcccttcatcgctgagggctggatccacgttcacttctccaacaacttcttctaactgctctttcgtcacgccacccggtcgaagaatggtcacgtgatcacctgaacaatcgacaaccgtagactcaagtccaacacctgtcgaaccgccgtctacaataccagcaattctgccacttaaatcatgaatcacatgtttcgctgtggttggactcggttttcctgataagtttgcacttggtgcggcaagtggtaaattcgccgccttcaaaagcgcgagtgccactggatggtcaggcatacgaatcgccaccgtatcgaggcccgcggtcacatttgtagctacgctcttaccaccaggtaatacaatcgttaatggtcctggccagaatgcgctcattagcttatccgcttgttttggaatatgcgatactaacttttccacatgtggacgactcgcaacgtgtacaatcagtggattatcggcaggacggcctttcgcactgaatattttggcgacagcttcttccgataacgcgtttccccctagtccatagacggtttcagtaggaaaagcgacgacttcattacgttgtaaacattcggcagcttccacaacctgtggataaactttttcactatccacatttccatccacataccaaacatttgtgtggatacctttcacgttattcaccttcttattcaataaatgctaataaacccggttatttcgggataataagtgatctttccacagaattctacacaattcgtaaaaacgcttcctttcgctaaacacacaaatatccacacaatgtggataacatacgttcgatttgtgcataaccttgttgatgagatcacttagtttaaacgttttctcataatcactcgctgatctgattgattggaaaacagctcattttcccttactaactttggaacttcttcgacgggaattgtcgagaaaccgaaaacttgaaagaaaaatgattcttcttttgaagtaagaaacaactcgtgcaaatttgcttttttcgcgaaaagaattacctggtcaaaaaactgtaatagccgttcagaagttgattcagagctatttaagacgagtgctctcaggagacctgacggacctaacgcttcaagcccaatcacgcctagcaggtcttttttttctgattcagcgataagaaacgactcaatgtcagggagcccgtccacatcaagcccggattgcataacaaaattcctaacggctacggcatcatctgtcgttgcttttctaacgagaaacaaatgaatcccctccttcagttttcacacaaaaccgttctgttatggtcttatgcgttgaagaaggagaatagaccagttagctaaaaattccttttacccagtccacaatcgtgtcaaagactttcactaagaagaagtcaacttccacgtcttctgcaggctcttctacaggcgcctcgctttccgcctgaacagcgtccccattggagaaatcaaggaaacaaagcggtgggaaaagaacgcaccaccagttatccccaagtccttccccaattgtgattaagacggcttcgtaatcaccggcagggtaaacaaaatctccatacagtttcgttgggaaaccaacttctccaaaggagacagaaaatgattcacggctaccgattaactcgagctctttttttacgatcgcttcaatttcattcaggtgacttttaataacatgacgagaatctttaatcgatgttaaatcagcaacccacgcattaatcgattcgtttacttcgtcacgaatgcggcgtttcactgattgatcttcttcactattactatttgctaaaatgcgaagacgaatcgcttcgtctggaataacctgctgatttgctgtaacaactcccgaaccctggagacttgaagcaagaataaaaaatgagattaatagattaataagtcctctttgattcatcttgtatcccgtcccttctagctcccattctggccagattcatacgttttaaacgtagaactgttcaccagaatgcgagtagaatcgacagtgttactttacaacaccaaataccatccgttctttcccactaatatctttcacaacctcgacctcaatacgctcaccaaaagaagcttcgagcattgcggcgactgttctagcctgcttttcgcctacctcaaatccaattaaccctggagaagagattaactctttcaaaccttcagcaagtctgcgataaagtacgtagccatcttctcctcctacaagcgcgccaatcggttcatggtctcgaactaatggatcaagagtggcatactcttcttctgaaatgtaaggaggattagaaacgacgatatcaaacgtttctccttgtaacggctgaagtagatcaccgtgaagaaacgagattggtgcgtcaagctgacgcgcgttttcctttgctaccttaagcgcatcctgagaaatatccactgctgtgacgttttgattttgcagttctagcgcaaggctaatcgcaatcgctccgcttccggtaccgatgtcggcgatcgcggctttttccggattaggaaacagcctttttgccctagaaagaatgccttccacaagctcttctgtttcaggtcttggcacgaggacatgatgattcacgcgaaacgttcttccgtaaaactcttcttttccaacgatgtgctgaacaggaatgcctttcgcgtgctcgtttatttttgcttcaaaacttgcaaaatccggcatttgatcttgcatctgaagcaagagttctgttctcgatacgtttaactcgtgcttgatcagccactcagcagccgatgcttcacgtccgtgcttctctaaaaaagaagaagcccatttaagggcttcgaatacagtcatcatagagtcactcaccagcttccgccattaagcgcgtttgttcttctgtaataagcgcatcaatgaactcatcaagcttaccttgaaggatctggtcaagcttttggatcgttaagttaattctgtgatccgttacgcggttttgcgggaagttgtatgtgcgaatccgttcagaccggtcaccagtaccaacagcggatttgcggttatcgtcatactctttctgtgcttcctgctggaacttatcatacacacgagcacgaagaaccttcatcgctttttctttgttcttgatctgtgacttttcatcctgacaagatacaacaacacccgtcggcgtatgcgttaaacgaacggctgacatcgttgtattaacactctgtccacctggtccacttgaagtaaaggtatcaacacgaatgtctttatcgtgaatgtcaacttctacttcttctgcttcaggaagcacagcaaccgttgctgtagacgtatgaatacgaccacctgactccgttgacggaacgcgctgaacgcggtgtgccccgttctcatacttcatctttgaataagctcctgcaccattgatcataaagataatctctttaaaaccaccaagctcggttgaactcgattcaatgacttcagacttccaaccttgcatttcagcaaagcggctgtacattttgtacaagtcacctgcaaatagagcggcttcatctccacccgctgctccgcgaacctcgataataacgttcttgtcatcgttcgggtcttttggaagaagtagcactcgcaagcgctccgcatactcttcttctttaggtgtaagctcggatagctcagctttcaccatttcacgcatttctgcatctttttcttcctcaagcatcgctttcgcatcttgaatgccttcgagaatttccttatattcacgatacacctgaacggtttcctcaagacttgattgctctttggaatattcccggagtttcgtcgtgtcattaatgacttctggatcactcaacaactgatttaacttatcataacgttcttctacaatttctaaacggtctaacaagatctttcacctcgttttcgttgcataacattctaattatagtataggacatttcgcaggtcaaaagcaaaaatagcttgaacttgatttattcagggtaaactggaagtaggttagtaaaaatgaacgattccggaaggggctgtttgaacatgaaatttgtcattattggcggcgatgcagctggtatgagtgcagcgatgcaaattattcgaaatgatgaggaagctgaagttgtgacgcttgagaaggggaatatctactcttatgggcaatgcggcctcccttatgtcattagtggaaaaattgaatccactgaaaagcttatcgctagatccgtggatacgtttcgagagaagtatggcatcgatgctcgtgtgtatcatgaagtaacaaacgtggataccgataaaaaaatcgtaaaaggaattaatttaaagaccggcgaacattttaccgaaaaatacgataagctgctgatcgcgactggagttagtcctgtgaaaccaaattgggaaggaatcgatcttaacggaatacatacattaaaaacgattccggatgctgagaaggtgatcaatgatctggatgactcagttaaaaacgttgcggtcattggaggcggctatatcgggcttgaaatggccgagacgttccgtgaacttggtaaaaatgtgcgcattattgaactagggccacacctagccagtatttttgatgaagacatggcgaagatgattcataacgaggcagagcgaaacgaagttgccgttcatacaaacgaaggcgtgcaatcttttaaaggtgaaaagcgcgttaaaaagatagtaacagataaaggagaatatgatgcagatctcgttctagtttctgttggagtaaagcctaatacaggtttccttaaggagtgcgggctacacaccgcttttaacggggcaatacaggtgaaccgctacatgcaaacgagcaaagaggacatctatgccgctggagactgcgcgacacattaccatcgtgtgaaagaacgggatgactttgttcctcttgggacgacagcaaataaacagggacgtattgcaggacagaatatgatcggacagccgaacacatttaaaggaattgtcggtacttctgtcattaaattctttgacttaacgcttggtcgaacagggctttcaacaagtgaagcagaagaactaaacttgcctttcgctagctgttctactgaagcgacagatattgctggatactatcctgaagcacgagagctttgcgtcaaaatcattttccgagatgataacgagcgcatccttggtggacagtttatcggaaaatatggcgtggataagcgggtagacgtacttgcgactgctctttatcaccaaatgacgcttcatgacatcgaggatctggacctcgcctatgctccaccttacaacagcgtttgggatccgttgcaacaagcagcaagacgagcgcagcattaataaaaataaccctctcattgttgagagggtttatcttgctcgtacgtgtattttgtatcttggcactgcttgataaattttagcggcaaggttttttttctgattatttagttccgcttcttgtttattcgtaaacttaacattcacccacgcatggttgccggtaattgaaattaatccagcatcgaaaccttctgcttcgactacttctcgaattttattttgatcgtcactaatcgttggcttgtccacactcatattccgataggactgtgggtttaagttaatatcggtatttaaattttgaccttctcctgcctgtccatttgcttctggcggcttgagtggcgaacaggctgacacaagcaacagaaacgcaagcatcatccaagtgatttttctcatcagtcggtcacctcctgtttttaaggtgcccaacaaatgatggttagattcaaatcagtgcttttcttatcctttcactatgaatccaatatttcgaaatcacaaaaaaagcccggtttcccggacttattttgtgatttcttgttcttgatgatcccgtgccgttggcttcccaggcactttatgacagtgacgacagcgcggttcataagactcagatgcaccgacaaggatgatcggatcctcgtaatgagcaggcttaccatcaataagacgctgcgtacgacttgctggtgaaccgcacacgacacagatcgcttgaagttttgtgaccgattctgcaaccgttaaaagctttggaacctgtccaaaagcttcaccacgaaaatcctgatccagtcctgcaacgatcacacgaacaccttcatccgcaagctgttgcgccacatcgacaatgccttcatcaaaaaattgcacttcatcaaccgcaaccatatccgtatcttctgcaacgcggtccaggatcgcctgtgaatgatcaaccggaacagcgatgacggacattccattatgagatacaacagattcttcgctatatctgttatccacttttggtttaaacacctgaactttttgtttggcataagtcgctcgtcttacgcgacgaattaattcttcagacttcccggaaaacatactcccgcaaacaacctcaatccagccgctgtacttcataacatgcattcaaccgcttctcctttcccagcataagcataaaaaaatgactgatcagcgcagtccttattttgcgtatactttcatccaattattgatcgtagagtgctcacaaaccgcaatcactcgtattcgcttaaaaaggcttcgcccatcttaaaaatcatccttcataggaagaaacgagtgaacaaatcggtttgttcgaaccgtttcttcctacaaatacgtgcaaagcagctctgcatgatgatcatttcttgcttcattgagttaaaaaacaggcaaggagtaaaaacttgcctgttctatcattaaccttttaggttgtatttttttctaaacttatctacgcgtccaccagcgtcattgaacttctgacgtccagtatagaatggatggcactcagagcaaacctctacgctcacgccgtcctgttttgtagaaccagtttcgaattcgttaccgcaagcacatcttaccttaatggtttcataaccaggatgaatcgcttgtttcatgaatttcatctccttccgccctgattcctgaggaaccagagttaaatgaagctaaaaggcagtgccttttagcttctgcacacatagacgtattatagcagggtgttccagacaatgcaattgatcatcttgtgacgaaacaccttcattctttacctggaagaaccgcttttttctttctcaaacaggtcgaaaaactcacgattttctttcgttttcttaagtcgttttaagaaattatccacgaattcaaaggagtcatccatgctcttacgaatcgtccaaagcatttcaagctgttctttcggaagaagcaactcttctttacgtgtaccagagcgacgaatatcaatcgcagggaagacgcggcgttctgcgagacgacgatcaagatgaagctccatgttacccgttcctttaaattcttcataaatcacgtcatccatgcgcgaacctgtctcaactagcgctgttgctaaaatcgtcaagcttccgccttcttcaatgttacgcgccgcaccaaagaatcgttttggacgatggaaggctgcgggatcaataccaccggaaagggtacgtccacttggtgggatgacgaggttataggcacgagcaagacgtgtaatactatccaaaagaatgacaacatctttcttatgctcaaccaatcgcatcgcacgttcgagcacaagctcagctactttaatatgattatctggcgtttcatcaaacgttgaatgaaccacatcgccatcaacggaacgctcaatatccgtcacttcctcaggacgctcgtcaatgagaagaacgattaattccgtttcaggatggttcgttgtaatgctattggcaatttccttcaaaagcatcgttttaccagctttaggtggcgctacaattagtccacgctgaccaaacccaactggtgaaatcatgtcgatgattcgtgtagacagattgcctgatttgttttcgaaattcatgcgcttctctggataaagcggtgttagcgctggaaaatggacgcgttcttttgaagaatcagggtcctctccgttcacggccgctacgtgcaaaagaccgtagtagcgttcattttcttttggagggcgtactttcccagaaacgcgatccccgttacgaaggtcaaatctgcgaatttgagatgccgagatataaatgtcttctgcgcttggcgagtagttaatcggtcgaaggaagccaaatccttcagacgaaataatttcaagaatcccttccatgaatagaagtcctgattgctctgcctgggcttttaaaatagcgaaaactagctctcgtttgtttaacttactatagtaagagactttgtataatctagcctgttcataaagctcttttaatgtcatttgttctaattctgatatatttactgccatgttgacaccacactttttaaatgattatgggttttacccaaatgattggaaaatgaaataagtgcacaaaaggttcattaaaacaacagaggtatgttgcgtacagatcgcccttttgattatgaataataaagaaagagagaaagagtttgttgagatcctgtgagaggctagtatgtgatccattcaggcatctcttaagtgagagtagaggaagtgcacaacgaaggtgttgcttagcaatcgttactcttgaacatgttctttaatgatttttggctcattttcgccattaactaaaacaggacaggtggtccactacgtgaatgacgacatttgagccaaaaatcaacttttccactcaacgatgttgagcgaatagtaataggaaataatacagcaccttatagttttaccagattcctaaaaaatattcaacatgaaatgatacttgtggtgttgaatcatgtacgttaaatgaacttttaagaacgaataacaaggtctggtttcttttttaaactgtgttttccatcgataaagcgaacagtaccggactttgcgcgcatgacaaccgattgggtcgtaccagaagttccctggaatctgacaccttttaataattcgccatctgtcacgccagttgccgcaaaaatggcatcttccccttttacaagatcctccatgtaaagaacgcgggaaacatcatgaattcccatctcgttacaacgcttcaactcttcttcattttgagggagaagtttaccctgtatttctccaccgagacatttcaatgcaacggccgcaagtacaccttcaggggcaccaccagagccaaataaaatatcgaagcctgtatcatcgaaggccgtgttaattgccgctgccacatctccatctgaaataagcttaattctagctcctgcagcacgaacttcttctataatcaattcgtgacgcttgcggtctaatatgaccgccacacagtcttcaatttcttttcctttcgcttcagcaaccgccttcaaattatcatgaacggaagcgttaatatcgattttgccaaccgctttcggtccgaccgcaattttatccatgtacatgtcaggtgcatgcagcaaattgccgtgatcagcaaccgctaacacagcgagtgcattccacgttcctgcagctacaatattggttccttcaagagggtcaaccgcgacatctacccggggaccataaccagttccaagtttttcaccgatatacagcatcggggcttcatccatttccccttccccgataaccaccgttcccttcatcggtaccgtgtcaaacacatcccgcattgccgtggtcgctgcatcatcagcttcttctttcttgcctcttcccatccagcgtgctgaagcgagcgcagcagcttctgtgactctgaaagttccatcgttaaacttctttccatcatgctttcctcccccggggcgcgcaatgttagtaaaacgctttcataatagagataacagaatggtggttttcaccaccatttctgctaatttaagaactttcgacttctttcagctcttcttgatctaatttctcacgccaaacccgcgcaccaagattgctaagcttctcaacgagtcgctcatagccacgatcaatgtgctccagtcctgagacttccgttacgccttcagccattaggccagcaacaacaagggctgcaccagcacgtagatctgaagcgcgcacctttgctccctggagcttcacagcgccattaattatggcagaacgtccttcaaccttaacgttcgcacccattcgacgtagttcatcgatgtgtttgaatcttgcactatatatcgtatcggttacaatactgctaccttcagcattcgttaagagcgaagtaaatggctgctgaagatcggttgggaatcctggataaacaagggttttaagatcaacgcctttccaaccttcacgcggcgaacgaataaaaacttggtcttcattcgtctcgacttgtacgcccatctcacggagtttcgcaataagcgattctaagtgctgagaaataacattgtcgatcacaacttcatcacccatcgcagctgccatgatcatatatgttcctgcctcaatgcggtcaggaataatggaatgatagcagccggttagctcgtccacgccgtcaattcgaataacgtccgttccagcccctttaatctttgctcccatacttgataaaagtgtggcaacatcaatgatttcaggttctttagctgcattttcaatcacggtacgacctttcgcacgaaccgctgcaagcataatgttaattgtcgctccaacgcttactacatcaaggtaaatgcgagcacctctcagttcatctgcacgaaggtaaatggcaccttgttcattcgtaacttttgcgccaagcgcttcaaatcctttaatatgctgatcaatcggacgtggtccaagattacatccgcctggaagtccgataaccgccttgttaaaacgacctaacatcgcacccattaaataataagaagcacgtaacttctttactttgccattcggcagcggcatcgcaatcatatccttaggatttacagttaatgtatttccatttagctcagcttgtcccccgatttcttcaagcaaatcacggagaatcccaacgtcagaaatgttcggcaagtgatcaatagtgacagtggaatctgctagaatagccgccgggattaatgctaccgcactattcttggccccgctcacctgaacggttccacttaaacggtggcctccagcgatcatcaacttttccataacggtctcccttcttcgtccgcatcgtatgttcctcattctgtcatgatacttcataagaatagtatgggcaaaaacaggaagttcatgccaattcgttcattttattcgtttgcttttttcgcttcttcccaatcagtaaggaattgatcgattcctttgtctgttagcgggtgctcaagcatttgaagcacgactttcaatggcattgtgccgatgtcagctccgcgtagggcagcttctgttacgtgcatagggtgacgaatcgatgcagcaatgatttcagtttcgatgccatgcaccgcgaacagttcagagatttcagagataagatctagaccattttgaccgatatcatcaagacgaccaaggaatggtgagacgtaagaagccccagctcgcgccgcaagcaatgcctggttcgcagagaaaacgagcgttacgtttgttttaataccagcttcagagaatgctttaacagctttcattccttcacggttcatcggcactttcactgtaatgtttggagcgatttcagcaagctgtttgccttcttcaatcatttcctcagctgtagtggaaaccacttcagcactaaccgatccagctacaaggctagtaatttcacgaagacgatcgtgaaaattcactttttctttcataacaagggacggattcgttgttacacctgaaacgatacccatatcatgtgcttctttgatgtcagttaagttagcggaatctatgaaaattttcattgcattcgtcctcctttaatttagaaagcgtttacgagaaaaagtttaacatattttgttttacgttagctgatttgattgtaaataattgaaaaatagtcgcaaggtagtagttaggggattaaaaaacggaaatcagaaaccgctcataatagagcggttttgatgatccgattttaagaagattatgctttgtttgaagaaccgaattcacgcattttgccaattactgtttctttaattgcatcgcgtgcaggtcccatgtatttacgaggatcgtaaagatctggcttttcttcaagtacagaacgaactgctttagcagaagaaagttggctctcagtgttaacgttgatcttagcatgtccaaatttgatcgcttttttaacgtcagctgttggaataccagtaccaccgtgaagtacgagaggaacaccagtcattttgctgattgtttccatgcggtcgaatcctaggttaggctcacctttgtaaggaccgtgtacagaaccaagtgcaggcgcgaagcaatctacaccagtttcgttgattagacgctcacactcttcagggatcgcgtatgcagcttctgcatcgtcaacgattaggtcgtcttcttgtccaccaatgcgtccaagctcagcttcaacagaaacaccaactgcgtgtgcagcttctactacttttgtagtaagagcgatgttttcatctagtgggtagtgagaaccatcgatcataacagaagtaaatccagcgttgatcgcttgcatacacttctcgaagctagaaccgtggtcaaggtgaatcgcaactggtactgtaaccttgtactcttccataagcgcttctacaattgtaacaattgttttgaatccgcccatgtaacgagcagcaccttcagaaacaccaaggataactggtgattgttcttcttgtgcagcttgtaggatcgcttgagtgaactcaaggttgttaaggttaaattggccaactgcgtagccttctgctttacctttttcgagcatttctttcatagaaactaaaggcatgataaatcctcctcaatctaatttaaaattgccaggtctgacctggaacatcttaataacgaatacctgttattgaagcatgcagatgcatccagaaaaaactgtcttctacaagatggcacaaacgtggtgtttttatgtatgccacagcttaagaaatttcagctaatctgaattcatttcgtctacaatttatccaaaaacacggttctattatagcatatcacttctataatagaaggggaaaaagcttgatttaataggatttgtttatgtaagcgttacctttctttatgaaagcgatgctaattcttttttgactgttgctcgaatctcatcgatgtcaaaaggcttcgcaaaatgcgttattgcccctaagtccatcgcttcatggatcatgtccaattcgccgtatgccgtcatgatgataacgagcgctcttgcttccatttttttgattcgttttaaaatctctagcccatccattcctgggattttcatatcgagaataactaagtcaggatcctcactttttacgattgagagtgcttgaacgccgtttgctgcctggaaagtttgatagccttctttttgaaaaatttcgttaagaaggatgcgtataccgtattgatcatctacgattaagattttttcattcatgtgtgagcacctacttttccgttagtcttatgtttaagttcgcttaaagatcgtgaatcccttcctgattatacattgagggctgatattcgcaagtgttggacagtttcgttataatagtgaccggttatacatataaaaggtattcgcttatcccacctccttttcgctagcaattcatttgtatacctatacccagatcgacataaaattagctttcatttttttataaaaatacagaaaggcagtgattaaatgcttaaaatttttacgactcaactaatgggtaagtttaagggaattcaggatcaacatgagatgataattgaagatatttcacgcttgtttgctcaaattattacaggcggtggtacggtttatttctatggagaaaacgagcttcagggagctgctctcgaagcagtatatggctctgaaaagcttccctcaagtgcgattcttcatgatcctgccgatttaactgagaatgattgtgtgcttttattttcaaggcttagtgaagacaaagcggccgccaagcatgccgaaacgtttaaagcgactggtgcaacggtcgtcggtatttccgctacgcgaaaagaagccgatcccatccttgagcaaaacaccgattttcatattaacaccggattaacgaccggtcttgttccaaatgacgaaggagaacgcattggttatccggccttacttacttcgttatatgtttaccatgctctctatttaaccactcgggaaatactagaagaacacggctacgaattttaagtctatacaaaaagacatccttttcgccgtagataaggatgtctttttattaggctcttttcgtagatattgttgcttttagataagtggttaatttccgctccaggatgctcgctttccgcggggcgggcggtgagcctcctcgtcgctttcgctcctgtggggtctcacctgtcccgctagtcccgcaggagtcgagcatccttccgctacaattagcgaagtgtggttttttattcaataattgattcaaaagcaacaatttattagaaaagagcctttttttaattagttattcgccattgaagcgccgataaattctttaaatagcggctgtggacgtgttggacgtgacgtaaattctgggtggaattgtgaagcgacaaaccacgggtgatctttcacttcaacgacttcaacaaggcggccatcagggctcgtaccagagaaaataaatcctgcctcttccatttgcgcacgatactggttgctgaactcatagcggtgacgatgacgctcatagacgacttcatcattgtaagcagcataagcctttgtaccttctgttagcttacaagggtaaagaccaagacgaagcgtaccaccaaggtcctccacatctttttgttctggtagaagatcaatgacagggtattttgttgttggcttaatttcggctgaatgcgcaccttctagatttagaacgttgcgagcaaattcaacagaagcaagctgcataccaagacagatacctaagaaaggtactttgttttcacgcgcatattgaatcgccgtaatctttccttcgattccgcgatcgccgaatccaccaggaacaagaataccatcgacatcagaaagaagctcttttacattctcttgtgttactgtttcagagttcacccatttaatatcaatgtctgcgtcaaacgcatagccggcatgctttaaagattccacaactgaaatataagcatcttgaagggctacatatttaccaacgagggcgattctcgtttttctagaaaggttttgaaccttatttacaagtgcgttccactcatccatgtcggcttcctgacagtttagcttcaggtgctggcaagtgatttcgtccagtttctgttcttgaagagcaagaggtactttgtaaagcgtgtcagcatcctgtgcttcgataacggcgtgctcatcgatgtcacagaacaaagcaatcttgtctttcatttcttgaggaacaggctgctcagcacgaacaacgatcacatttggttggatgccaagactacgaagttcttttacactatgctgtgttggctttgttttcatttcgcctgcagcttttaaataaggaagtagcgtacagtgaatgtacatcacgttttccttaccaatatcactcttaatttgacggattgcttcaaggaatggaagactttcgatgtctccaactgttccaccaatttccgtaatcacgacatcagcgtttgtttcatttccagcacggaaaatacgctctttgatttcattcgtgatgtgcggaattacctgaactgtaccaccaaggtagtcaccgcgacgctctttacgaagaacagttgagtagactttacctgtcgttacgttcgagtttttcgaaaggttgatatcgatgaagcgctcgtagtgaccaagatcaaggtctgtttcagcgccatcatccgttacaaatacctctccgtgttgataaggactcatcgtccctgggtcaacgttaatgtatggatcgaatttttgaatcgttacacttacgccacggtttttcaaaagtcggcctagtgaagctgctgtaattcctttaccaagtgacgaaacaacgccgcctgttacaaagatgtacttcttatgttttgctgtcatctttctgccccctcatggtttgtattctgcccttttagaaagggagagaattcatctgaaacgagagattttatttttttaataaaatccatgcagatggatacaatttcaattttctttacttaaacggaaggtccactcgtactggctaaaagcttctcaatatgagtataaaaacaaaaaaaacaaaagtggcacctgtcccataaatggggggcacttttgtttttatatcggatctataaattagtttagtattttggtgaagcccaaaaatgattctaccgatttcgctactgaaagtcaagaagcgacagaaattatttcttttcttcttcgtcgtcttccacgtcgtcgtcatcttcatcatctaggtcttcatcatccaaatcttctgtatcatcatcgaagtcgtcgtcatcaaaatcgtcaaggtcatcaacttcaagatcttcaagatcgtcttcatcatcttcatcgaaaccaaggtcatcttcagacttcttgcgtttcttaggcttgattgttgttgctagctcttcttgtgattgctcaactgggtaccagccttttagaccccactggttgtctccaagcgttacaaatcgaccatccgtgttcaagtttgtataaacttctgcaagcatctcctgaagctgtgaggaagataaacctttcatctttccaatccggtccatcagtttatagaaagaaacgggtttcttctcgtcctgcaggatgaaatacataatatcaatcatggatgtttcttgaatgtcttcagcagacagctgctttaagctactcacgatatcggcactccctttcaattatctcctatgaataatagctactaaaaaaactagcatttcactatttttaaaacgatcgcgtttcatgttgctcgttataccctaatgcaaaacataccattcattataaacaaatttacacaatctatgctacgattttcaaacaaatctattgaaataacaggatttaatcttccgtacgctcttctctttcgaacgaaaaggaggaagggaagtccttcctcctacaataatatgaacgcttgcatttgacaagttctttactgcctacatattacgacggtatttcccgcctacttcataaagagctctcgtaatttggccaaggctcgcgaccttaacggtttccattaactcttcaaaaatatttcctttactaagggcggcacgcttcaagcgattaagcgcttcttctgtcttatcagcatgcgcttcctggaactgctttaagttcgtaatctgctgttccttctcttctttgcttgctcgcgcaagttccatgttccactcttcttctgcgggtggattcggatttttatacgtattcacaccaacgatcggcagctcgccgctatgctttagcatctcgtaatgcatggactcttcttgaattttaccgcgctggtactgcgtttccatcgcacctaaaaccccaccgcgcgcattgattttctcaaattcactcagaaccgcctcttccacaaggtcggttaattcttcgataataaacgaaccctggagcggattttcgttcttcgttaacccgtactcttttgtaataatcatttgaatggccatcgcccgacgaaccgactcctctgtcggcgttgttaccgcttcatcgtatgcattcgtgtgaagcgagttgcagttgtcatgaatcgccattaaaccttgtaacgttgtgcgtatatcattaaaatccatctcttgcgcatgcagggagcgacctgacgtttgaacatgatactttaacttctgactacgcgcatttgcacagtacttctcgcgcatcaccgttgcccaaattctgcgcgccactcttccaatgaccgtatattctggatccagtccattgctaaagaagaacgagagatttggcgcaaatttatcgatatccatgccgcggcttaaatagtattcaacatacgtaaaaccattggcaagcgtaaatgccagctgcgatattggatttgccccagcttctgcaatatgataccccgaaatcgataccgaataataattacgcacgttttcgttaataaaatattcttgaatatctcccatcattcgaagggcaaattccgttgaaaagatgcacgtgttctgtccttgatcttcttttaaaatgtcagcttgaaccgtcccacgaacagtgctaagggtgtgtgccttaatctctgcaagctccttcgcgcttgctttactgccttctttttcttcaaagcgctgaatttgctgctcaatcgccgtgttcataaacatcgcaagaatgattggcgcagggccgttaattgtcatggataccgaagtcgaaggcgcacataaatcaaaccctgcataaagctttttcatatcatcaagcgtacaaatgcttacgccactttcgccaacttttccgtaaatatccggtcgatagtctggatcttctccataaagcgtaacggaatcaaaggccgtgcttaagcgcttcgcgtcttcgttctcagaaaggtaatggaagcggcgattcgtgcgctccggggttccttcccctgcgaattgacgcttcggatcctcaccttttcgtttaaacggaaaaacacctgctgtataaggaaatgatcctggtacgttctcttttagaacccagcgaacgatttctccccagtcctcgtatttcggtagagaaactttaggaatatcaagtccagacaaactctttgtcgtaagctccgtcacgatttccttctctcggatcaccgtcacaaaccctttcccgctatacttttctttcacttcagaccagttctcgatgattttacgggtttctgtatgcatgtcgtccatgttttgatctttcattttcgttagcatgacgatagtctcgtcgctatcttccgcactctcaagcatctcaatcgtcccttgaagctggaacgctttccttgcaagctgaacctgcttttcaacgtattcatggtaacgacgaacggagccagaaatatcctgcaaatattgctggcgctgcggcggaataatcaaattcagcttttcaacaatgtcactcgtctcgatgtttgtcgcccagtcattacgacatttgcggtgaatggtatcaaccaatgctttaaaaagcgtattcgtgcccggatcattaaattgactcgcaatcgtgccatagacaggcatttgatctaaattttgctcaaacagcatgtgactgcgctgatattgcttctttacatcacgtaaggcatcttcagaaccttttcgctcatatttattaatgacaatcaaatcagcaaagtcgatcatatcaattttctccagctgagaaggcgcaccgaattcgcttgtcatcacatacattgaaacatcggaaatttcaacgatctcggcatccccctggccgattccgctcgtttcaatgatgatcaaatcatagccagccgccttcacaaccgttagcgcttcacgaatcgaaagtgaaagctcggtttttgatttgcgcgttgcaagacttctcataaagacgcgatcattatgaatcgcattcatccgaattctgtcaccaagcagagcgccgcctgttttttgtttcgttggatcaatcgacaaaatcgcaactgttttatcatcaaattcgtttataaaacgtcgcacaagctcatcggttaaggaacttttccccgcgccaccggttccggtaataccaagaacaggtgaatcagttgccatactctttagcttatcgaacacttgctcagccgccgtctcttctgtgcgctctcctccatagctttccgctagcgtaatcagacttgatacagcttgaggatcacgctcatgcaagcgatcaatctgattatcaatttgtttaaatgtcgggaaatcgcactccttgatcatgtggtcgatcatgccttgaagtccaagatcgctgccatcatcaggtgagaaaatacgtgatattccgtaggcgtgaagttctttaatttccttaggaataatgacaccgcctccaccgccataaatcttaacgtgagaagcccctttttccttcaaaagatcgtacatgtatttaaaatactccatgtgaccgccctggtaagaagaaatcgcaattccctgcgcatcttcctgaatcgcagcattaacaacttcctcaacagatcggttatgaccaagatggatcacttctgctccgcttgcctgtaaaattcgacgcataatgttaatggatgcatcgtgaccgtcaaacaaacttgaagcggttacaaaacgaacgtgattaaccggtttatacgtttcaactacactcactgctgttcctcctctatacgtttttagcttcgatcggatttaaagctttcatcaaaaatccttcttgcattttggtgtattcttcaattgaataatgtgaatgaagcgcccaacgcctaaaggtccacatctgcccctgcactaggatgttatgcgcagcaccgtagatctcgtcttctgtcaagcgtagcttcccttccgtcacgcactcttgaatcagtcgctcaaaaatttcggccataccgagttcctttttcaatacatagggaagcgtctcccgcggaagcgattttgcttcctggtacatgacaagcacttcatcctgcatatcatccatgacatgataaaacgcatgaagggcctgcctcagtcgctcgatacccgttatatctggcttcagctgttcttcaagccgctcgcgcacttcatcgtagatgctatcgcaaacaaggtatagcacatcttccttttttcgaatgtattcataaagcgttccaatgctaaacccggcgacacgagcaatctctctcgtcgttgtccgatgaaaccctttttctttaaaaagagagaccgccgctttaatcatttgctcacgccgtttctggattagcttctcatctttcaccatagaaggaacgttcttcttcatcttcccatccccttcctctcaagactgccgtccatgtaattctgaagcagctttacagcagctgagtaagggtcaatggaaccacttgtcacttcctcgacccagcctttctccgtttcttcatgctccataagctttttcatcatttcagcatgcaccacttcaattacttcacgctcaagggacgttttacgccgagcatcacgttcaccggatgctttgctgtattcaaagtgctcctgcattcgtttccaaacattttcaagacctagattttgaacagagatcgcctttacaattggagggcgccaaggggcatcatgcttcacaagatctagcatgctttcaagctcggcaagaagcttcggaacgcctggtaaatccgctttattcacgacaaagagatccgcaatttccatgatgccagctttaaagacttgcaccacatctccgctacccggatttagaacgaccgcgatcgtatccgcgattttcataatgtcgagctccgattgcccaaccccaaccgtttcaatcaaaataacatcaaatccaaacgcatccattaaacgaacggtttctttcgtcgttcgcgaaagtcctccaaggctccctctcgttcccatgctccggataaatacgcctggatcagtaaaatgctccgccatccgcacccggtcgccaagaagagccccaccgctgaacggactcgtcgggtcaacagcgacaacgccaacggtaaggttttgttttcttaaatacgtaatcaatcgatttacgagtgaactttttccggcgccaggtgacccagtcatgccaatataatgggcccgccctgtcatcggatgtatatccttcagcaattctaatttatcttcagcatcattttcgacaagactaatggctttagcgagcgctcgctcatccttttttgaaagtcgtactgcgagtggatgcatggcgcttcttaatcagccatcagcattcttgaaataacaagacgctgaatttcatttgtaccttcatagatttgcgtaatcttcgcatcacgcatatagcgctcaaccggataatccttcgtatagccatagccaccaaagacttgcaccgcttccgtcgtcacttccattgaaatgtcaccagcgtaaagctttgacatcgcagattcctttccgtacggcagaccttgactttctttccatgctgcctggtaagttaatagtctagcggcttcaatctttgtagccatatcggctagcttaaagccaatgccctgattctcaccaatcggcttaccaaactgcttacgctctttcgcatacgcagttgccgcatctagtgcaccctgcgcgatgccgacagcttgagccgcaatcccgttacgtccaccgtcaagcgtcttcattgcaatcttaaagccttgaccctcttcaccaagacgattctcaaccgggacacgacaatcttcaaaaataatttctaatgtaggagaagagcgaatgccgagttttttttctttcttacccatcgagaagccaggcgtacctttttcaacgataaatgcggtaatccctttgtgacgcttttctttatccgtttgagcaaacacgatataaatctccgcttcgccgccgtttgtgataaaaatctttgatccatttaaaatatagtgatcaccatcaagcttcgctgtcgttttcatccccccagcatcagatcctgatccaggctcagttaggccgtaagcccccattaattttccttctgccatcggacgcaagaacttctgcttttgttcttcagaaccaaatgcattaagtggccagccagctagagaggtatgagcggataaggttactccagtagatgcacatacgcgagaaagttcttccactgcaataacgtaacttaaataatcggagccaatgcccccgtactcttcagaccatggaatgcccgttaaaccaagttccgccatttgatcaaacagcttgcgatcaaagcgctcctcttcatcacgctcagctgcagttggttctacttctttcctcgcaaagtcgcgcaccattttccgtagcatttcatgttcttctgatagttgaaaattcatctcgtttctctccctttttggtggtttggacaataaaagttggttttggaaaatatatttcgaatttggctaataaaaatgaagtttggccaatatatcccgaatttggctaataaacagcacctcgggcgtacattgccgccgcgagcttccgcttttctgatccaactgcactgaccagaccctctgtcacttcaccttccaactcgaacacaaagaacgtgttcgttttggaagcctccagtgcctgacgggtctaaacggtcacttccgcttttctgatccagctgctgtgaccagaccctctgtcacttcaccttccaactcgaacacaaagaacgtgttcgttttggaagcctccagtgcctgacgggtctaaacggtcacttccgcttttctctacttcataaggtttcgactaatcacgatcttctggatttcgctcgttccttcatagatttcgcatacttttgcatcgcggaagaggcgctctaccggataatctttcgtatacccgtacccgccgtaaacctgaaccgcttcaatcgaagctttcacggccgctttcgatgcaaaaagctttgccatcgagacttcctgcatacaagggattccgtggtttttcaggtcagccgcacggtaggttaggagttttgccgcctcaacttctgtcgccatatcggcaagtttaaaaccaaggccttgattttgcccgatcggcttcccaaattgatgacgctctttcgcgtaagcagtcgcatagttcagcgcagcttctgcgatgccaagtgactgtgctgcaattccgatgcgaccgctttcaagattcgccatcgcaattttaaaaccctgcccttcttcgccaagacgatttacaacagggacacggcagtcttcgaaaatgatttccaccgtattcgagccatttagccccattttcttttctttctttccaacactaaagccaggcatatcacgctcaataataaaagcagttacgcctttgcttcctttttcatccggattcgttatagcgaaggcgacatacgtatccgcttcgccaccatttgtaatgaagattttcgagccgttcaaaatgtaatgatcgccgtctcgtacggcgcgcgttttcatgctgcttgcgtctgaccctgaactcggctccgtcagcgcgaacgcaccaaggtattcaccagtcgctagcttcgggatgtagcgctttttctgttcttctgttccaaacgctaatatcggcagtgtcccaacggacgtatgaaccgatagaatcacgccaaccgtggcgcttacttttgagagctcatgaatcgcaataatataagacgtatagtccatttccgctccaccgtacgcttctggaatcgggatgcccattaaaccaagctcgcccattcgtttgatcacttcgcgtggaaagcgatccgtctcttccatttcctcaacgattggggcgatttctttttccgcaaaatcccgcaccattttctgcatcatcttctgctcttccgtaaatacaagctccatgctcgttcctcctcgtggtgttaatcctggtattgataaaagcctcttcctgtcttacgtccgagccagccggcttttacatactttcgtagaaggggacatgggcggtatttgtcatcaccaaatccttcttgaagcgtttccataatatacagacatgtatccagcccaataaaatcagcgagagttagcggtcccatcggatgattcatgccgagcttcatcacgctatcgatatcttcaggagacgccacaccttcataaacggtatagatcgcttcattgatcattggcattaaaattcgattcgacacaaatccaggaaaatcattcacttccactgctgtttttccaagatccactgccagcttttcaaccgcctgatagctttcatccgtggtcgctaagccccgaatgatttcaacaagcttcataactggtaccggattcataaagtgcatgccgatcactttttccgggcgctttgtcgctgccgcaatttccgtaattggaagggaggatgtattggtcgcaaggattgtatgttcctcggcaatttcatctaggcgtgcaaaaaggttgccctttacttccatgttttcaactgcggcttcaatgacgatatcaacatgctttgcatcctgcagatccgtcgttgctctcaaccgctccatcgttccgttcaagtcttcctgtgtaatccgctctttggaaacttgcttcgagaggtttttctcaattcctgcaagtcctttatcaataaattcctgctttaaatcattcaaatacacggtatagccagaagctgcacatacctgcgcaatccctgaacccatttgtcctgcaccaatcaccataattgttttgatttccatcgtcatgctcccttctatacttgaaccataattgcgtcgccttgaccaccgccgctacaaatcgccgctaccccgatgccaccaccgcgtcgtttcaattcatgaataagtgtaatcaaaatgcgcgcaccgcttgcgccaattggatgcccaagtgccactgcaccgccgtgtacattcactttttcttcatcaagagaagcaattttcccgctcgttaatgcgacggctgcaaacgcttcattgatttcaaaaagatcgatttcttcaagcgattttcctgttttcgttaaaagttcattaatcacaagtcccggtgtctttgggaaatcctttgcttcaacagcaatggccgtatgcgcaagaatcgttgccatcacttcttttccttctttcgaagcgcgttcttccgacatcaggacaagcgctccagctccgtcattaacgccaggtgcattccctgcagtaatcgttccgtcagcaccgaaaacgggcttaagttttgcgagctgctcctccgttgtgccttttcttggcgcctcatcatgttcaacgacaagaggatctccctttcgctgtggcacttctactgggataatttcctctgcgaaaatgcccgcttccatcgcttttactgctcgctcctgacttcttgtcgcccagcgatcctgctcttctctagaaatctcatattcttctgcggttgtgtttccataaacgcccatatgacagccatcaaaggagcacgttaagccatcatgaaccataaggtcaaccacttgtttatcgcccattcgcataccccagcgtgcgtccttcatgatgtatggcgcattgctcattgattccatcccacctgcaacgattaattcttcatcaccagagcgaatgatctgatcggcgagcgtcacactacgaagaccagaggcgcacactttgttaatcgtttctgttttcacttcccatggaatgcccgcatgtcttgcagcctgacgcgatggaatttgcccctgaccaccttgaagcaccgatcccatgatcacttcaccaacatcagctggctcaactccagcgcgaactaacgcttctttgatcgctgttccaccgagcttagacgcttcgattgattttaaagcccctccaaattttccaaatggtgttcttacgccactaactatgaccgttttgcccacaaaaaacctctcctctcttttttgaaaacgctatcattattgcgtaaaatgcgactgaacgctcgctcaccttaccgacaaagtaacaaaggaaagagctcatgccggtcgtaaaaaccagcataagctaaccctttgccaaacagtctattgaagaacggcttctttttgaacaatcgagcgttctaatatctcgacgatatcaagcgttgctacttcttcttctacttctttcgctttcgtcccatcactcatcatcgttaagcaatatggacatgcacttccgataacggatggcttcacacttagtgcctgctcggttctcgtcacgttaatacgggatcctgtgtcttcttctgtccacatcaaaccgccacctgcgccacagcacataccattttcgcggttgcggtccatctcgatgacttcaacgcctggaatactgcgaagaatttcacgtggtggatcgtacacttcgttgtaacggccgaggtaacaggaatcatgataggtgattctctcgtttacttcgtgcttcggcttcagttttccttctttaatccagtcatataataattctgtatggtgataaacctctgcttcaagcccaaactctggatactcatttttgagtgagttataagcatgagggtcgatcgtaacgatttttgtaatgttatgcttctggaacgtttcaatgtttttctgtgcaaggtcctggaataagaactcgtttccaacacgtcttggcgtatcgccagagttcttttctttatttccaagaatagcgaatgagatgcctgcttcgttcatgatttttgcaaaagaagcagcaatcttctggctacggttatcgtaggagcccattgagccaacccagaaaaggtattcaaactcttcgcctgctttttctttttctttcaccgttggaacaacgatatcgtcgcgcagatcgcgccagttctcacgctctttacgactaatgccccacgggttgccttgtcgttcaatgttcgtgattgctcgctgaacatcgctatccatcttcccttccattaagacaaggtgacgacgcatgtcgatgatcttatcaacgtgctcgttctcgaccggacactgatcttcacagttacggcaagttgtacaagcccaaatttcttcttcggtaatgacgttaccaattaagtctccgcttacaagaccttcagctgctgcagctgtttcctgctgcgcacgtgactggtaagcgatttgatttccagccgtatttgagaaggcataagctggaacccatggcgttcttgacgtgacggcagcccctttttccgttagatgatcacgaagcttaacgattaaatccattggagaaagaatttttcctgttgcggttgctggacacatatttgtacagcgtccacattccacacaagcgtacagatcaacaagctgtttttggttaaaatcttcaattgtattgacgccatatgtttcttgactttcatcttcaaagttaatggatgaaagctgccccactttgtgtgtgcggccaagaaaaacgttcactggtccagcaattaagtgagcatgcttcgattgcggtacatacaccataaacgttagtagcacgagcaagtggatccaccagaaaaagaagaatagcgcaatcgctgctgtttcattgatccaggagaacaaaaaggcgatccctgaagctactggtgcgctccacgagtaacctgcatcatgccaaatgatttccataccacctgcaaataggacggaaatcataagaagaccgataaataagaggacaagtcctgctttaaagccttttttcaatcgagcaatggcttcaatatagcgacgatagaatgcccatacgaccgctgttaaaatcatgagcgtcacgagctcctggaaaaacgtaaacgctggataaagcggtccaagaggaaggtgtgaccccggcgatagacctttcacaatcatatcgattgcaccgaattgaacgagaaggaaaccgtagaacatcatcacatggatggttccactcttcttatcttttagtaatttcttttgcccaaatactttaactagaatcgcttctagtcgttctttcatggaatgatcaaattctgctttctttccaagcttaatgtattcgtatcgcgtcttgacaacatacccaaacaaaaacagtgcgtaagcggttacaagaatgaaagcaatccagttagcgatcaataaaacatccatgttggcaaacctctcctttcgagtcattccttcttagccgcttctaagttgcttgaacgatggtgctccccgattgtccaaaccatttatgaaaacgcttttaagtcagaatgaaagtaattttctgactttagtataacacaaaaacaaatgaatgagcattcagtcagagatttttttttacttttttcaagtttaggacaaactatgtccatatcaacaatggaaaggggtgaaacgcatgaaatacttttttttcgttctccttgttctcgtattatggatcgtcattgatcttcacttaggaagtaaaaaaagaaagcagacttcttcttcatggattgaaacgaccggtaatgccactttcatcggggatggagatgattttttccgacagctgcttagcgatatcgacagcgcgagccaagaaatccagatgatgttttacatttttcgtaatgatgaaacaggtcaaaaggtgattgatcacctttgtaaaaaagctggttctggcgttctcatttacctgcttgttgactacggaggtagtcatggcttaaagaaatccaccattaccaaaatgcgcacatgcggcatccatttttcctattctagaaaaatttcttttccgaatctctttacttctttaaatgaacgcaatcatcgtaagataacagttattgacggaaagattggctatataggtgggtttaatgtgggcaacgaatatgcgggcaaagacccgaaattcggctattggcgcgactaccatctcaggttgactggtgaagctgtaaaaggactacaagatcaatttgttcacgactggatggaaaaccattcctctccaattgaagctgtttcagccgatttggagaaaggggctgaaacacttacatttcatattacaaatggaagtgatatcgaaaaatcattcgcttcttacattgataaagcaacaacgtcaatcaaaattgggacaccctactatattccaggacaaaccgtccaaacgagtcttttgcgtgcattaaaatgcggcgtgtctgtgcaaatcattttaccaatgcgcgctgatcatcccctcgtgaaagaagcatcttatccctatctcgtcgaactgatccaggctggttgtgaagtgtatcaatatatgaacgggttttaccacgccaaagtgatggttattgatgatacgttttgcgatataggtacagcgaatttcgatcagagaagttttcacattaatggcgagatcaattgcctcttacactctcctgattttatttcagaaatcaaagaggtattaaaaaaggatcttcttcagtcggagcgactcgatttgaagcgacttcaagatcgatccattgggaaccgcatgcttgctccaatcgcacgcctatttagtccgtttctctaggcttaaatgtgctacgttccgttttaacttaaggtcaaagggaatgaaacgatcagaccttttaagaaaggagttgatctcattatgcaacttcggttcggctatgtatcaaatgcactcgccttatatgaagcttcccccgcgcgaacgatgacatttgcgacgtggtcaaagctatcgaaagaagaacgcgaagccaaactgcacaatattacagagaccaatttaaaaagtacgcttcgagcgctgcattataacattgcacatgaggttgctctgtatcgcatgtcttcgtccatcgtgccgcttgcaacgcaccccgaagcaacctgggattatatcacgcctttccgagaactgtttgaagaaattggatttctggttaagaagcacggacttcgcgtaagcttccacccaaatcaatttacgctttttacaagccctaaatcacacgtaacagaaaatgcgattggggatttgagttatcatgtcgccatgttagacgcaatgggtcttgacacacgttcaatcgtcaatatccatattggtggcgcctatggagataaaaaggaaacgttgaaacggttttataaaaacttcgatacgatcccaactgaactccgctctcacgtaacgcttgaaaatgacgacaaaacctatactgcactggaaacgttagaagcctgtgagcaaaccggtgtgccgtttattttcgattaccatcatcatatggcgaatccaggggatggccttcctaaccgtttcttcgagcgcgtttataagacgtgggaatctcgctgcattcgaccaaaattccatctctcttcaccaaaatcaacgagtgcgtatcgcagtcacgctgattatgtggacagtgagtttgccattccgtttatcaacatgttaaaacaacacggagaagatgcagacattatgattgaagcaaagaaaaaagacctcgcagcgcttcagcttgtcgaagatctttcagccgttcgcggtgtaaagcgacttaacggcggttcaattcaatggaagtagcaaattgacgaagaatctgatttagctctctccatgattttgtaggcagctcatgatacgaattcgagacgcgtatgagcttgctttccggtacatactttttgtaaatctgttgataacgatgaaaataaaaggcgcgctctcccgttacgtgtagaaacggaatattgagcgtgcttaatttgtttgtacacacatagcgacgccctttttcgtaaaagttctcaagaagatatggatccgtgctaacgatgtacgaacgtaacattttgaactctgcttcggttctcgcatgccctttcgcaataatccacgacagaagccttatattatgaacaagcgctttcccggctcggaattcagcttgcagaaatggatcgctcacctcagaaaagccaccacataaaatgagtccggctactttttcttgatgctgaatggcaaactcctgagcaacacttcctccgctagaatagccgatcagcaccgcttctttaatgctaagtgcctccattagaaggtttaaatcatttgctaacagagcaatcgaaaattcctttgaacctaatccgcttctaccatgacctcgcatatcgaaaacgataatgcgaaaatgatccgcaagctttgcctgttcatgaaagacaacatgccccatccccggtggatgaagaaagattagcggcagcccgctccctttctcttcataaaataagtcgatatcgtctacctttacataccccaatccattaacctcatttccttataatgaaaaaaaccccgtcatccactcgtacgctttaaatccaaggtaaatgccaactatgccggcaattcccgcgaaagcaggcggagctggaatcggaagttttaagaaagcaaagataagccctactaaaaatcccgttaatgttgcgattaatacagtcttcatcccatcacctcttctttaaagtatgaccgaatgaatgaatcattataaaaaatgattggaacttcgtagtgattaagaaaaaaagtcctgtcgcaaaagcgacaggacttcgttactacattttctctggagctgtgaccccgataatctcaagcgtgttttgaatcgtttgacgaacggctttcatgagcttaaagcgcgctgcgcttttcgcaagatcttctgaatccagaacgcgttccgcattatagaagctgtgaagcgcctgagcaagctcaaatgcatagtttgtgatgcggtgcgtcatgcgcttatccgctgcttctgcaatcgcctcaggaagttccccgagcttcttaagaaggtccatttctttctcagatgtaataagagaaagatctgcgtcttctgttaagcccatttcttcgccttgacgaagaatgctgcacacgcgagcatgcgcatactgcacgtaatacacagggttttcgttcgaacgagatacagcaagatccatatcaaaatcaagatgtgaatccgagcttctcatggagaagaaatagcgcatcgcatcgatgccaacttcatccattaattcacgaagggtaacggctttccctgttcgtttactcatcttcattttctcgccgtctttaaagagatttaccatctggatgatttccacttcaagctgctcacgcttatagccaagtgcttcaatggctgctttcattctagggatgtagccgtgatggtctgctccccagatgttgatcaacttatcaaacccacgagaaagtttatcttggtggtaagcaatatccggcgttaagtacgtataagagccgtcacctttaatcaaaacgcgatctttgtcatcgccgtaagtagttgagcggaaccaagttgcaccgtcctgctcaaacgtttcaccacgctctttcaatttcgcaaggacgttatcgatcttgtttgattgataaagagatgtttcagagaaccagacatcaaattcaacgccaaattccttcaaatcttttttaagcttttcaagctcgcgctcaaggccatattcacggaagtaagcatagcgctctttgtcatcaagttgaagaagacggtcgccttctttctcaacaagatctttcccgaactgcacaatatcctgtccttgatagccatcttcaggcatgtctttttcttttccaagtgcctgcatgtagcgcgcttcaagcgatacagtaaggttatgaatctggtttccagcgtcattgatgtaatattcacgtgatacatcataaccagcacggtctaatacgttacataacgtatcacctactgccgctcctcgcgcgtgaccaaggtgcaagcttccagtcggattggctgaaacgaactcgacctggattttttcattcttgtcagctgaacgaccgtagttattccctttatcaagaatcgttggaataagctctgttaaataagccgtatccatgaaaaagttaataaaacctggacccgcaatatcaatttgtttaatgcctgcttttgtcatatcaagattcgcctttaaatcttctgcaatggcacgaggtgctttcttcgcaatacgagcaagctgcatcgccatgttcgttgcataatcaccgtgcgctttatctttcggtgattccagaatcacttcaggtatttcactttcggatgcaaggttcgctttgatgacggcctgcttaatctcttcttttaactgctctttcttttgttccacactgttcattgacttgctcctttccagcttagcgacagctcatgtcgctgcgtttcatcttcttcaaggtaaagcaaatagcgaagtgttaaccggcctttctgattttccatatccaccagctgctcaattcgttctgttcggatttgcatcggcatcgctccgaacggcgttttataaagagattctgacacttgccccggcgcaaactgctgacgcatggaaagtgcccctcttcgaatcacggtcacttgttcttgatctattttcaccgttgttgaaaccttcccaatctcaaggctttcttcataacgcaaataaagcgcttcgcctttctcaacaaggtttccctgaacggaataatttgtagactctttctctttccctgactgaatccgggaatcaatcgttatttcaatcggatgatcactcatcacttcacgtcctcactaaagcattaactttcttattataagaaaagcgtaggtggcttgtccacccccgacaagcttaaggtcactctcactgtgacgtcctttgtcacaatgagaggggaggaggctttggaataacgcccactaaaagttcttccattctttccaataagaaaagactgtattcaaatagaatacagcctctacgctttatttcttatgcgtccagccaagcaacatttcacggataaatttactagccgcaattggcgtttgttcagatggatcgtatgctggagccacttcaacaagatcggctccgaccacgttaatttccgaacctgcaatcgacgcaatcgcttcaagtaattctttggatgtaatgccacctgcttcagccgtgcctgttccaggtgcatgagcagggtcaagcacatcaatatcgatcgtaacgtacacgttgcgtccttttaacgttgggagcacctttttcagaggctctactacgtcgaacttatgcatgtgcatgcccgactccttcgcaaattgaaactcttcacgcatgccagagcgaattccgaacgagtacacgttctctgcaccaatcaacccacaaattttacgaacaggtgtggaatgagaaagcgtttcgccttcatactcctcacgcaaatcagcgtgcgcgtcaatgtgaatcaacgcaagatcgtcgtattttttatgaaatgctttaaggattggccacgtcacaaggtgctcgccacccataccaagtggaaactttccagcttcaagcaacgaatcgatgtattcttcaatcatatcgatgcttcgctggggatttccgaatggaagtggaatatctcctgcatcaaaataccgaatttcttcaagatgacgatccgcataaggactatattcttcaagcccaagagaagcctcgcgaatgcgacctggtccaaagcgagaacctggtcggaagctaaccgtccagtccatcggcatgccgtagatcacaacgttactttcatcaaaagacggattgcttaggataaaaacgttacctgaataagcttcatcaaacttcatgctcatttaatgagatcctgtacgaatttcggaagtgcgaagctagccgtatgaagctcttttgtgtagtattttgtgtcaatctcatggaagcgactttcaggtacttcaagcggatcgttctttttcgatccaatcgtaaatgtccagagaccgcttggatacgtaggaatgttcgctgtataaacgcgcgtaatcgggaaaatctctcttacgtctttggatacttgtgtaattaagtctgctttaaaccatgggttatccgtctgtgcaacgaaaataccgtcatcttttaaagcttttgaaataccttcataaaagccacgctcaaaaagctttgcagctggtccaaccggttccgttgaatcaaccataatcacgtcgtattctccttcgcttttcgcgatatgcataaagccgtcatcaacgagaacttcaacacgctcgttatctaatgctcctgctatggaaggcaagtatttcttcgagtactcgatcactttgccatcgatttcaacaagcgttgctttttcaacagatgggtgcttcaatacttcacgaatgacgccaccatctccaccgccaacaacaagaacgtgttttggattcggatgggtaaataacggtacgtgagcaaccatttcatgatagacgaactcatctttttccgtcgtcattaccatgccatcaagaacgagcatgtttccgaactcttctgtttcaatcatatccagacgctgaaagtcagtttgttctgtgtgcaacgtctgtttaattttcgccgtaattccaaagctttctgtctgtttctctgtgtaccataattccatgtaaaccactcctctatgtcaaattactacactaagaccgttcccgaaccgcataggcccaaacacctttagtatgtagcaaaaaaatgtatctaagcattaggaaagcttgccaccaagcggaagccatcgtttccttatcctttcgtccttttaaaaagtttcttaaagcacaagaaaagtatagtcgactctgcgtaaaaagcaagagaattttctacattcatatcctctttctcaaagttataaatttgcccctcttccattcacgctaaaacaacaccatccatacaaagagagcgagcacaaatcgatagatcgcaaaagggatcaatcggacgcgttcaatgaatttaataaatgttacaatagcgaaaagcgcaacgacaaaggctgctaaaaagcctgtcgcgaatactggaatatcagatacggataaaaactgatagctcttcaataaatcatatccgcttgccgccaccatcatcggaaccgctaaaataaacgaaaattcagccgctgttttgtgatttgttcctagtaagacgccgcctgaaatcgtggcacctgaccgtgaaaatcctggccacagtgctaaacattgaaagagaccaatcgagaaagcttgcttcagcgttaagtcatctaaacttgaactaactggggcacgtttttttagatcagcgaaaatcattaacactccaccaacaataagtccaatgacaacggtatacggcgagaacagataacttttaataaaaccatgaagaagaaagcctgccacgacagctggaatcatcccaaggatgagatgaacaagggttaacccttcacttgattttggtgataataacgcaacaaatctttttcgatacatgacaaccaccgcaagaattgacccgagttgaatgacgatttcaaacgtctttgccctctctccagtgaaatcgagccagtatcctgttaaaatcaaatgccctgttgatgaaactggtaaaaattctgttagtccttctacaatcccaagtatgattgcaataatgatctccatacgtttctctccccgctctcagttaacattgagtatagttcatcttattcaaaaactggacaactattttcaaacttatcgctaccgtcgttcgtttttaaaaaacaagtatctttcatcggggaacgtgtttaagagtttctagattgttacatactagatttaagacgatgtgggggtgaaccacatgaaatggctcaaggatgagcgattccattattggaagcgatggaccatgcttctaagtaaattaatgatgattggcatcgtgttaatcggcatatctatggggatgctttatttgctaacggtgtttatgggggcacccgagcttcaagtcccacaaacaacgatatactatgatcatgatgaaaatgttataagcgaatcaaatcaagatggtcagaaccgctattgggttgaccttgaacatatttctcctaacgtaattgatgcaacaatcgccattgaagacaagcacttttatgaacatatggggtttgattttagacggatcggtggggccatccttgctgatttaaaagcaatggcaaaagttcaaggagctagtaccattacacagcaatatgcgcgaaatctctttttagaacatgataaaacgtggaaacgaaaaatcgcagaagccttttacgcttaccgactcgaggttcattattcaaaagaagagattcttgaaggatatttaaacacgatctactatggccacggctcttacgggattgagtctgcagcaagaacttactttggcaaaaacgcggaggaactttctcttccagaagcggcgatgctagccggtattccaaaaggacctggctattactctccttatgccgatgccgagcgggcagaggaacgacaaagcaccgttctccaagcgatggtatcgaacgatatgttatctgaagcggaagcaatgcaagcagaaacagaaaacatggcgctccaaacgttcacggaagaaacgaagtccgaaatcgcaccatattttgctcaggaagtaaaaaaggaattaagatcggtgctttcacttgatgagcgtgttattgagcaaggaggacttcatgtttatacgacgcttgatgctcagatgcaaaaagcagctgaaaagtgggtagcctcctccattgaccaaaaaagcgacattcaggcagcgctcgtcgccatggaaccgacgtcaggagccgttaaggtgatgatcggaggtcgtgattattcagaaagtaaattcaatcgtgccacgatggcaaagcgtacgccaggctccacgtttaaaccgctgttgtattatgcggctatcaaaaatggcttcacgccttcgacgcttgtgcgaagtgagccaacaactttctactatgataatgaaaagaaaacctattctccacacaactatggagacgtttatgcgaatgaggaaattacccttgcacaagctttagcactttctgataatgttgtcgcggtaaaaacacatatgtttttggaggaaaaaacgctcgttaatacggcaaaatcatttgggattacgagtaaactatcagccatcccttcccttgcgcttggaacaaagcctgttgggatgatggaaatgacagaagcgtatagcatgctagcaaatggtggctatagtgttgctccttactacatcgagaaagtaacggatcgcgacggcaaagtgatttatgagcattcatcacaatctgaactcgttttagatcctgaggccgcttttgtaacgaccagtatgatgaccggagtcttcgatgaatcactcaatgattacactcgcgtaacggggtctggaattgatcacctcttaacgcgaccggcagccgccaaaacaggatcaacttctacagatagttggatggtaggatttacaccgcagcttaccgcagcagtttgggttggatacgataaaggagagacattgaatcatcgaaacgatggctcttatacgaaaaagatttgggcaaatttcatcgaagaggcgcttgcagaagaagaagcgactgattttaagaaaccagaaaatgttgttgggatagaggtcgatcctcaaacagggctgatcgcgactgacaattgccctgtgaagcgcttaacttattatatagaaggaactgagccttcacacctttgtgaagatcatcccggaacgccttcttcagagcaagaaaagcagaaaaaaggcattttcgatcggttctttaattggattagataaaagacgggtgctatacccgtctttcttagcgattcacttctggatctggcttctttaaagcctcaaggtcttgttcgatactaatccatttttgttctgtcataccaattgcatcagaaattccagcgttatagattgtcggaccgatttcggacatcacaaaatgcaaaacgttttcagccgcaagctcaccaatttcttcatttcgctcttcatagaaaaatgtttggatgcgctcaattaattctttctttttctcacgtgagatttgatacaccttgctcatcctctctaagcaaacgcttacgaaatcttccctagaaccagaacaacccggggaaaattccccgggctgttttgggtcctagctatatgtgttgcgtacccataagtttacgctcagtttcaggaaacctcaagggattttatcaattagtcagaaaacaactcaaagttagtcttgaagtcctgctttcacttcatcactagaacgttcatagacatctttatcaaactcaattaaatagttacggagcatttgttttgatttagcatccatatgatccacaacgactttacccttcatggatttatccatattgttcacatgctctggcatgcttttccatgcgcgtttcgcttctgcattaaagaaaaattcacacgcgccaatgccgtaatagtgtggtccttcttcagtacgttgtagggtaacccatacaatccacgctgtatgaccatctggcacttcttcgcgcgtcttaacgagcttcttgcgtttttcaagagcactacgcgcgtgaagcgcacctacatctacataaatttcgtccgttgttggatcgataatgacaggtgaaacgttatcgaggttaatcgtacctactccataacctccgtgtccgtcagtagaatcaccacttaaaatgttaaaacctgttgaaggcttctttttcggattcttttcttcttcatttgccattccttagtacctccttcaatcgcaattgtccgctatcattttatcacaattacctgaatggattcatgtcacagccattcacggttttatcggaattgattttagattaccccttgtcaaacgcgtttattacgaatattatagtatttgtgcttaaaaaacgttcgtatttaatggaggtcttaccatgtttaactcctttttccgcttgaaagaaaatggaacaaacgttaaaacagaatttcttgcaggattaaccactttcctgacaatggtatatatcgtaattgttaacccaattatcctatcttcaacaggggttccgttcgatactgtctttatcgcaacgattattgcagccgttgtcggaacactgtggatgggattattcgcaaattacccaatcgcaatcgcacctggtatgggtctaaatgcttacttcgcattttccgtcgtaggtggacaggcaggcgtatcctatcaagtcgcctttggcgctgttttcattgcgggattattatttattattctttctctaaccccattccgtgagaaactaattgaagcgattccgacaaatcttaagcttggtatcacagctggaattggcttattcattgcgtttatcggccttcgcatgacaggtattatcgtcgctgatgaagagaaccttgttggtcttggaaaccttcattctcctgaagtgcttttagcgcttgttggcctgatcattacgctcattctcatggtgcgtaacgttcctggggcactattcttcggcatgattgtcactgcgatgattgcgatcttcacaggacagcttgaatttaaagaaggcttcatgcaaacaccttcggctcctgaattcttcattttcggaagcccacttcaggcgattaaagatatggttgaatacggcttatacgccgttgtgttctccttcttactcgttactttatttgatacgaccggtacgatggttggcgttgctgagcaagctggtttaatgaaagggaagaaaatgccgcgtgcacgtcaggcacttcttgctgactcgatcggcacaacagttggagccatttttggaacaagccctacaagtgcttatcttgaatcctctgcaggcgttgcggctggtggtagaactggtttaacatctgtcgtcgtttcaatcttattcattgtctctgcgttctttggcccactcgtcggctctctatcaggtcttgcggcgattacagcaccaacgctcattatcgtcggaagcttaatgattggcgccgttggcaaaattgattggagtgagtttgacgaagcatttccagctttcttaatcattcttacaatgccgctaaccgcaagtattgcaacaggaatcgctcttggctttattacgtaccctattttaaaagttgttaaaggaaaatggcgcgacgttcatccgcttctgtatcttttcgccgtactattcttctatcaacttgcttttctgcctcatgcataatcaaaagctctgccctcgcggcagagctttttttatcttctgaaaaatcgactttatgcgttaccatggcttctatttgtgaaaaattgcttagagaagggcccgtttctaatacaggtaacgtccttgtgatcaatgatgacctatacccagcgcatcattttcttctcttcactgctctttaatgcaagctcaattactttaataacgttaagcgcttcttcagcagtgaccggcggcgcactattttctttcagtgcctgataaacttccttgtagtacgtttgataagatccaggtaaggtcttcacaacgtgatcaccttcttcattagtaagcacaccgaactgctctcgcgcttcttctccccaacctgcgtccccgggaactcttcccgctatcaacgctttctcttgaggatcaatgccccattttaagaatgagcccttaattccatgaatttgataacgcggcccatgtttttttacgagagagccaccatgaagaatcactctcttttttccataatgcagaataagatgaaagtagtcatctgttttgccttcttcgcgctgggccatgatatccgcataaacgccgtccggtttcccaaagagggtgagcgcctggtcaattaaatgggaaccgaggtcaaataggatgccagaacctttcttgtcttgttctcgccagcgatcacgtacctccgcacgatagcgatcataatgagcctcgtaagtggtgaccgccccaagctgctcttcctttacgagctgctgaatagtgagaaaatcactatcgtagcgtctgttatggtacacgcttaacaaacggtcattttcttctgcaaccgtaatgaggcgctccccttcttctacactaacagtgaatggcttttcaagaacaacatgctttcctgcttcaagagcctgtttggccattggaaaatgaaactcattcggtgtcgtaataatgaccagctcgatttcctcatcggttaacaactcctccatagacgacacaacattcatttctggaaatgaacgatggaccttgtctgcattcgaagaaacgactgttgaaatcgttaatccctctaccgcttcaatgactggtgcatgaaacgttgcccctgaaaatccaaaaccaactaaacctacttttacttctctcattttttctcactcccatgttataagtcttttgaaccctttttccaattcgacaagaaagcacaaattactcgacttctttttccaaattttgatgctaataaacgattatactaatgttcagacgggtatttatgtaatgaattcgaaacatttgtaaagaaggtggctttattatgaaaaaaaccctttattcccctattatgatcagtttcattcttggattacttgcttctctcatttatacgatcattctagcagcaggcggctatcatcacactggattagctggcttcttttcaattctcaccatcctggtagcttatcttctactttcgacgtactggcttcctacccttcttgaaataaaaacgacgattgcgctcggagccggaattacgttccatgttattagttctttcacactcgtcgttatgatggcaggtacgttaccggagatttcagaactgcttctcccttacttaagtacactccttatttcttttctaatcatgatcatcattcttatcgctggaatcattgttggaaaagttgatttcacgaagtttactactagagataagaaaatgtcgatgaaaggttaatttcaacaacaaaaggtgcccggaccggggcaccttttgttgtctattaatctattgtgccaaaatggcattaacagccaagcttttccataaaagcgtaggcttgctcaatttcatcttcagaataattttgcttccgtttaatcgtatgaaccttctcaacaacttcttcttttgtcaggcgatcgaaaaaaagaatcgttgaaacgagttcaagaaaacgggagctctggctattaatttcactgatacactgacgaagctctggcaattcaaaatcgtaatgacctagaaattcgtcgccttcttccgttactgcatacttatattggtaatagttccctttactttctttcacttctgtgacaagaccaaggttacaaagttcctccactcttagtgttaactcttcagagtaaggaccatagaaatgaaattgatatttctcgttaaatggaaactgcaactttttgcaaatgtagatgatcttttgtagtttcttacgtccaatgacctctccggcttctttcaacacagctatcactttcgcgtgatcttctagcaacctgcacccctcccatgtactttttacaggttgtccaaaaagcaatcttactttatcagatgaggttcaaaagcaatgaaggcgatccacgccacttcttttgaacacaaaccagcataacctgtagcggaagcgaacttcatgccaggactgcctttctttttgaacagctaatcgatttgaagcaatgacttaatacgacgagtagcatctgtatttccttcaagaataaagtctgcagggaaatacagtttatgatcggttctttttttaccggaaatggcttccaccacatcagattcacgcgaaagctcacgtaaatcgccaccaggttttaatagatgtatcggtaaccgttcttcttcttcaccgggccgatagaaatcatacggcaaatcggaagatgaatcaaccactagataataatcagggtcaatccccgcttcgtgaaaggaatcatgtagctctctccacgcattcatctgctgcatcgggttaaattcgatgtatttaaataacctacgattcataaaccgttcgcatagatcgctcaggatatggtcattctcctcctgccagatctggaaataaaacatcacaacagaatcatccaacttcaaaaaatcttcaagactaatatcttctttaaaaagagaatagaagtgaatcggatcatgttgaaagtgatagccctgctcaaataaagcctttgcgcgatgaagaattttacttaaaatcacctctgcacttcgcgtcacaggatgaaaataaatttgccagtacatttgatagcgactcataatatagtcttctacagcatgcataccactttgctttatgacgatttgatcgtcacccgggcgcatcacgcgtagaatacgctcaatatcaaattgaccataacttacccctgtaaaataagcatcgcgaagaagatagtccattcgatccgcatcgatttggcttgatattaagctaacaacaagtttattatcatgcgttttggcaatcacatcagcaacttgaagcgggaaatcatcgctcacccttcgtagtaccttgttgatctcagtgtcacctagaataaccatccgcgtaaaatcttcatgatcaaggttaaatactttttcaaaggagtgtgaaaaaggcccatgcccaacgtcatgcaatagagctgcgcacatgcttaacagcctattcttttcatcccatccctcatattgagagaaaatctcgttaatacgcctcacaatctcataaacaccgagtgagtgactgaagcgactatgttctgccccgtgaaaagtaagatacgttgttccgagctgtcgaactctacgcaaacgctggaattctttcgtgccaatcagatcccagattaaacggtatcgaacatggatatagcgatggacagggtctttaaatactttttcttcgtttaatcgttcgagcattccgcggcaggctccttccgtcaaattcatcccttcattatataccaccccataacaaatgaaaaccttcccccgggctgtgatgggagaaggctcatgttgtttgggtagataaaaagaatggaaacgaataaagctgatcgtcaaatcattctgcatatagagagggggacgtgcccctcttaactcttaatacatgttatagaacagtttcaacttttttgccttcccgtttttcttctgattttgcgatatacatcgcacaagccgcgtcacctgtaatgttaacagctgtacgcgtcatatcgagaagacggtcaacggcaagaattaagccgatcggttcgacaggtaaacctacttgctttagaaccattgcgagcataatgagtcctactcctggtacacctgcagtaccgatactagcgagtgtcgccgtaactacaacaataataagctgtgtaaaggttaaatcaacaccggtaatttgagcaataaatatcgttgcaacaccttgcataatcgccgttccgtccatgttgattgtcgctccaagcggttggacaaaactactgatttgctttggtactttcagattttcctgagcggttttcattgaaactggaagcgtaccgctactagaagaagtactgaaagcaactgccatcgctggcgcaaaagctttgtagaatttaattggattctctttacataagaagtaaatcgcactaccatatgtgaagagaaaatgaatgagcaaagctcctagtacaacgaggaaatacattcccatcgattgtagcgcttctttcccctgtccaccaacggcagaagcgattagcgcaaaagcaccgtatggcgctgtttccataatgattttaacaagatacatcataacgtcgttaccttgttcaaacagattacgtagtgctttcgtgcgttctccaagaatcgcaagggcaaaacctacgaaaatagcaaatgcgataatttgaagcatgtttccttcaaccatcgcttgaatgggattggttggaatgatattaataattgtatccaatacaggaggtgcttcttcagctttaaagtctgagtttcctgagaacgatccttcaacacctggtttaattaagtaagcaagtgccattgcaatcgaaatggcaatcgttgttgtaacaaggaaaaacgcaactgtttttccgcccattcggccaagcttcttcggatcgcttattccggctgttcctactacgatagagaagaatacgattggtacaacgagcatcttaattaagttcagaaagatttgcccaacaggaccaaataaatattgatcgacaggtccgaaggcatctggtgcaaatagattaaagatcacaccaacaagaatacctagaacaagacctgcaataattttaactgttagcttcataaacatgtcccctttcgtctcatcgacttagataccatcatcgtgtgcataatacggaccgcacaatgctggctaatttctgctttatgtagatttttcttatgatcttagtcatacatgaaagctcttacatagattaccatttcttttctatctatacccgctcgctcgctaacttgaaactaccgtaattatcattatatcattttagacaattctcgcaatttcctttttttcgcaagccctcatttccctttagaaatcgaagttttatagggaaataaggggtgaaattgggtaaaaaggatcagcgattttgtcatcacccgggaaatactgtcggatgatgtcttaaaactcctttcgtctgctataataagaacgattagtacgtgaaaaaggggtaagaaaatgggaaacaacgattcaattctttatcagccaaaatggcggattattgatcaatcaacccttggcccgtcgtttgatgccctccaatcgttcgcaatggatgatacgctttgcaattccgctggaagcggcgaatcaccaccaattttgcgctcatgggttcatcacaatacgattgtccttggcatacaagatacgcgccttccttattttgaagaggccgttcactatttaaaatctctagggtatcgagtaatcgtaagaaactccggtggccttgccgtcgtccttgatgcaggcgtcttaaatctctcactcgtcttagctgaaaagcaacagcaaattgatattgatacagggtacgaagcgatggtcgattttgtacaggaaatgctagcaccgtacaatgtcaccatcgaagaccgtgaaattgttggtagttactgtcctggtcgctatgacttaagcattaatggaaagaaattcgccggcatttcccagcgcagacttcgcggaggagtcgccgtacaagtctacttatgcgttgatggaagcggagcggggcgagcatctgtgatccaggagttttataaacgaggtgtgaatggagaagcaacgaaattcacctatcccgaaattgttccagaaacaatggcttcgttaagtgaattaattggagaagaattaaccgtttcagacatgatgatgaaaacgctgaaaacgctaaagacgtattccgaatcaatgacaacggcacacctttcgattcctgagctttctctttatgattacaattaccagcgcgtctttacgcgtaatgaaaaagcgctcggttaatttaaaaaagtcccctgaaggaatgccttcaggggattttcatatcttataggctttgcattgcagtaatcaatgctagcttgtacacgtcttcctcactacatccgcgagaaaggtcgttaactggtttgtttaatccttgaagaaccggaccaacggcttcatagccaccaaggcgctgaaccattttgtagccaatgtttcctgcttcaagactagggaatacaaatacattcgcttcccctttaagcggcgattcaggtgctttcttttgagcaacttctggaacgaaggcagcatcaaattggaattcaccatcaatgacaagatcaggcgccatttctttcgcaagacgcgttgcttcttcaaccttctctgtttcaggagattttgcagatccttttgtcgagaagcttagcatcgctacttttggctcaatgccaaacatttttgctgtttccgcactgcttacgccgatttcagccaaatcattgctgtcaggagagatattaatcgcacagtcagcaaagacgtacttctcatcaccttttaccataacgaatgcgccagatgttttcttcacgccttctttcgtcttgataatttgaagtgctggacgaacagtatcaccagtcgagtgagcagcaccacttactaggccgtctgctttgcctgtgtgaacgagcattgtcccaaagtagtttacattaagaagaatttcctgcgcctgttctgctgttgctttgcctttacgacgttcaacaaatgattcaacaagtccatccatttcagaataagttgctggatccatcacagttaaatcactgtgcaatgtaaggtttaagcttgtcgctttatcttgaatggcattttctccaccaataacgattggctttaggatgccatcctctgctagacggttagccgctactaatacgcgctcatctgttccttctggaaaaacgattgtcggatagcctgcttttacctggtctttcatgcttgtaaaaagatcactcattattttcacctcattattattaatatccaactcctacgataaccctttttcccacaaaacgaaaataaatcccttattgtaagctctttcatataaaagttctatttttcagacgaatttaaagtgtctgagtagcgctcattcttattactcttctaaatataatctaactctgctgtaattaaacatccgtactgattttctatccgatttctcagtgtctttattcatccaatcgtcactctcaatcgcttttaaagagggacaagtattggtatagtgggtagtggatatagtgaaacttccatcagaatgagcattgcttgatttcctctgatggttagttgaaccaatcagacctttaggggcagttgtcaccgtaagtaacctgccttaatggtgtgataaaacataaggagtgaatcagatatgaaccaagcagcagttactcttgatggctggtattgcctccatgacttccgtactatgaactggacagcatggaaacagctttcaagcgaagaacgcgatcttgcgatgaatgaatttctaacgttccttgaaaaatgggaagtcacagcaggccataagcaaggaagtcatacgctttattccatccttggtcagaaagcggactttatgttgatgcttctccgcccaactatggaagagttaaatgaaattgaaaatgcttttaacaaaacgacattagctgaatatacggttaaagaatactcatacgtttctgtcgttgagcttagtaactatatggctggaaaagatagcgatcctgataatgatccgcgcattcaggctcgtttgaaacctgaattagcagaagcgccttacgtgtgcttctacccaatgaacaaaaaacgtgaaggaaacgacaactggtacatgctttcaatggacgagcgtcgtgaaatgatgcgtagtcacggacttatcggacgtagctatgcaggcaaagtgaagcagatcatcacaggctctgttggctttgacgactgggaatggggcgttaccctcttcgcagacgacgtgcttcagtttaaaaagcttgtctatgaaatgcgcttcgatgaagttagtgcccgttatggcgaatttggtagcttctacgttggaactcaccttccaaaagaacgccttccacaattcttatacgtataatcttgcaagctcttctaacacttttttgtgttcaggagagcttttttgtttctctgagcgattttcctcataggcatattctttcatttcgtacatacaatgagttacgtagagccatggcattatcctttcttatttgcgtgccagaaacatcaatttgctagctattcgctctggttctttaattctggcggcgcctagcgtggaaagcgggacgctttaagtcacactgtttcaccaagcctaccgaaagcaattgtgcgggaatttacaacagtttgaaagagaacgctttaaggagggttatgatgaataatcaatactggaaaaccccacagtcacaaaacatgggcggctatggtcaaatgccgcagcaaccgcaaggcggagggcaaatggcacagtatccttcaggcttccctggtcaaggacaacaagttcaaggagcatccatgggcgtaggctttcctggacagcttgccgttgaacaatcctacattgaaaacatcctgcgcctgaatttaggaaaaatcgccaccgtttatatgacgttcgaaaacaatgagaaatggaatgcaaaagtgttcaaaggggttgtcgaagcagcaggaagagatcatattattctttcggatccccaaacaggcaaacggtatattttactcatggtttatttagactatattacatttgatgaagagctcgagtacaactaccctcttcaacaaacaacgcaatattccccgcgttagcgggtatggaaaaaagctgccggatttccggcagctttttgttttggccaatatattgtgagtttggccaatataatcccgttttgaccaatattctgagaatttagccaataaaccgcacccatccgccatggttcgacatatagcgagcggtgacaggcactcgcgaactcgcgagcaacgcgtaaaccgcgctacgccttaaacgccgctaccacaaccaaaatccacgctgtaataaacgcgacgccaccaagcggcgtgatcgcaccaagaatcttgattccgctcaggctaagcacgtacaagcttccggaaaacagcacgattccggcaaacataagccagccagcccattgcatcaaccctgcggattggagcttatctgccgcaatggccactccaactaaaccaagcgcatgatacatgtgatattgaacacctgttttgaacgtttctagcattttctctgatagtcgtccttctaatccatgtgcaccgaatgcgccaagtccaaccgcaagcgccgcattaatcgcaccaataattaaaaatatcttcatctcattatccgctccctcgtctgaatcttctctctcatcatagcggaaagcgcttgaatgaagcaacgaattctgatattgttcatacacctttcgaatctttccacttcatctcacttgtctgcatacttctgttcacaattagaacactttctttaaaagcaaaccagccgcctagtggaaatagtaacagcccgatccatccagggaatgaaaagccagttaccaaacatagcaagagaaaactcggcatcgccactagttttaacgcttgtttccccgcttgctcacgtagcgacgtctcccactggaaaagctgagcatagctaccttctgagaactcacgccagtcagctctcgatagcccgatcaacgcataaagtgcaaacagaagcaccaccactttcacaacgagcggcaacaaaaggatcgctgccgttccccagccgatcacttgtaggtaatattgtatttttccaatcgatcgaagcacccatttcgtataaagatcaatcatccttgcctccggggaacgtttcttacgtattcgcttggatcctcgaaaaagaaaaggctgttttcgaacaatcagagtcgccggcgcgaccccaacgtttcccatcaaaaatttcgttatactctgcttatgcccccgctcgatgactgcatcgtgaaaaaaggttccccttatcttcacacgcgcctgtagctgaacaaacaacaaaagaagcaaactcccgctcccggcaacaaccgcccattcgtactgccaaccgacctgactcactacaaacagggttacaatggaaagcaggttcacaaatccaaccgggatccatttcacccaaatagaaggcacgaacagatcgataaaataccgactcgttttcacattccaacttattaaaagtagaaatagtccggtaacagcaattcgctccaaactccacccccatcctgtcacgagtagcggcagagcaacaccaattccaatagacgttacgagcagtccttttgtaagcgaatgcgccatgccccactttttcaaaccctcactcagaactgcattttgcaacaaatacacctgatccgcttcctctgtataaatccgtagcgaccaggttgttgcgattaagaatagcggaaaaacagcggcctgatccggaatttctgccagccagtctggtgcgatcagccaccaggagcggtaataggccacaccgataacgagcgccggaactagaatatagagccaaaccgtccaatcaagcgcagcctttagatcacgaattttataacgacgatcgtcacttactcgctttcgtaacagttgtagcgatgtcatatacgtcgctccattaacgtatcaacacaatcgagaagcgaactttcgatgcctgtacccgaccactcacgcatttcttgaagcgacccttttgcaagaatcgttccgttcgacagtaaaacaaagcgatcacatacccgctccgctgtatctaacacgtgcgtacacattaagattgccgcacctcgcgctcgttctttttcaatcagctttaaaaagtcctttgtcgcgcgcggatccaggcctagaaacggttcatcaataatatagacgtcaggtttcagcataaaagcggtaatcagcatcaccttttgtctcattccttttgaaaagcttgatggaagatgatgaagcacgtgctcaagttgaaagtaacggatcaagtcctgtgcacacccctgccagttctcatcagctagtgacgttgccgctgccgcaagctctagatgctcccaaagcgttaaactatcatagaaaactggctgctctggtacgtaagcatagcgagtcccattttcaaacgtgacgcttcctttccactctttcaacaaccctagaatcgtcttaatcgtcgtgcttttgcccgctccgtttgatcctaataacccgagtagctcaccactcttcacttcgaattcaatctctcgaattttactctctcttttttcataacctgcttcatcaatcgcaaccttcaacatcagcttcacctctatccttttatacgagataaaatgggtggaagtttcctatttcttacctttttgagcttcaataaactgttcaaagtttggcacatcctccaccttgtacttttcaacagcttccataaccttaatcactaattcctgacgtaaatcatccctgttttgaggggaggtttgcctgagctctgcttcgatttttttctcaaactgattgaggatcgcactcagtccctctttgtcttcattcttagcctgctgtaaaagcgtatatagtcttttttccatagtcatcccttcttgtttgtttccttatcctccactgcattcgtgagatcatcaattttcttttcaagtcgaacgagcaaataaagagagaccacaatcggaaatcctaaatcaccgataatcgcgttaaccactgttgtgatgctcatgaactcccctcctttcctgcagcccttaacttctcaagtgctcgtttacgccttctgctcacggcttgctgtgaaataccagccgttctagcaatctccgtatcagatagctctatgcgataaaaaagatctagaacctctttctgctttgaagttaacctgctaaatgcgagataaagtgatttctgctgaatactctcttcaaacgttggttctccatcacgcgtcggactttcaaccaaatcaatccaggcagcatctgacgctcctacaggctgatcaagtgtgagaggaaaacgaagatgcccaagtctacgctttcgatcaaagttaatcgccgtgtaacgaattagcttcgtcacataagcaataaatcgaatttccgtgtaatacttatgaaaaagagaattgagcgtatttaacgattcacgatcctgcgattcataagcgtcaataaaacttgtccaatgcgcttcttcttgaataaacgactgaaacaagagattttcctttaactcctcaatcagtttatctaaccgccattcattattcatcctcacctctcctttctctgtctgtaggaatgaaagtatgttgaaagataaaaatcacaaccattatttcgaacgtatgttcttattttaattatagaaaaaactcatgcaaataaccatgagtcaatacttcctattttagataggtcgatcgaactagagagaaagatcaacaagcagcccttttatttcaccaactagcgataataaggtcatcccattcttctctttctctctcatctcttcctgaatttcaatgagcttgttctctaccgtttccacaagcttgtacgttcgacttctaccgtaatgatccatgctctttttctccgatagcgtaaatccctggctaaccacttcttcaagaaactgttttaccatccgcttgtaggcggataagttctgaaacgttcgttcctttccaagtagctcaccctgacgatcaatttgttgcagaagacgctgaagttcagcccctttcagctctttagacgcctcctgaatcacagactgaaacgcaacctgcttgtttccttttggcaaatctagctttaaaggatcaactgatggtttgccatgctggtgaattttcatcgctgttcagaccttccatgcaaattaacgatcagctctacttctccgatcccgcaatttaatatccgagcaatgtctgctactgaaaagccctgctggtgaagctgaacggctttttggtttcgttcattatgagcggaaggatgctgaacaatatccggtttcgttggctcttcgacttcaggggccttaccctgctctaaaacgcgaaggcgcgtatccagctggttttcacgtttatcgacgtaggatttcacttcgtttaagagacggtcattctcttcctctagctgttcgatatagacttccatactggccgcgatctcttctcgtacttccgttcccttcgtttgctttagaaaaagaagcacgatacatagaaagctaacaagatgaagcgcaatgctaataaaaatgaatggatacataaggatcactccgattacattgattgaacatgttctttgttagcgcggaggacacccttcatccgaaggagcgctctcgagtgtagctgggaaattcgacttgttgataactctagaattcttgcaatctcagtaagcgtcaattcttcaaaatatacgagtgagacgacaagcttttccttctcaggtaagcggtcaatcgtttcagctaatagttctttaataaaatggtggtgtagatgcttttctggtaaatcagcatgctcgttttcaatcacgctataccgttcgattttttgctgctcatcctctggcacaggctcatcgactgataccattgttgataaagatgcatcttgaatcacacgctgcacttcttcaattgtcataccaaggaactcggccacatcatggtcactgctggatgtttgatttcgctgttctaaaacagcataagcttcttcaattttacgcgccttgtctcgaacagagcgtggcacccaatcattttgacgaaggccatcaatgatcgcgcctttaatccgccagccggcgtacgtttcaaatttcaaatcacgttctggctcgaatttttcaagtgcatcaagaagcccctgataggcgaaactcgtaaggtcatcccgctgaacggtagatgggagagcggcagcatatcgttgcacagcgaaatcaacaagcggacgataaagcaaaataagatggttacccgcctcttcctgcttctcctctttccacgctctccaatattcggttgtctgtttatccattctggatttcatgaagttcaccacctgaaaaattcttcccgcttatttatgaaacagtatctttgtcaaaaaccctttcacgccaagcttataaacagacggtaggtttaaatacgatcgaaccaattcgtctattgcctttgccgctttcgaatttggatattcgagtaaatagggtgattgtgcgataaccgcttttcgcacatgaggatcatctggaatcgacccaagcaaatcaatcgacttatttaaaaactgaacagaggctttttggaaattaagggacgtacgttcagcctcttccttagtaagggatcgattcacgatcagtttgacagaggcttgtttatttttttcatagagcgcttttagaacgctatatccatctgtaatcgaaggtggttctggattaatgacaagaaaaacatcatcagccgcttgaagaaaccgcattccttcataagtgagcccggctcctgtatcgagaataatgtaatcaactttgccttgtagtgaacccacttctttaaaaaagtgatttaattgctggccatctaacgtaagaattttcccgattccatgaccacctgctaaatattgaagaccatttatccctgtttcaacgacggcttcaagtgatagctgtttctcaagcatcgtcataatggtttctttcggcgtaacccccattagcacatcaaggttcgccataccgacatctaaatcaaaaattaccacttttttatttaacgcaacaagactaagggcaaaattaagcgatacattcgactttccaacgccgccttttccacttgttacagcgatcacttttgtttttcgattacttgaaccagaatgaaggcgccgcttcacttcttgacgtagttgattcgcttgatcagccatctcatcgtccctccatcaccagatcaaggaggaactctggtgtcgttctcacgagatcatcgggtacgttctgcccagttgttaggatcgtaatcggaaggttgtaatcttccataaaattaaaaatcggccctcgaactgtcgtttcatccatcttcgtcatgatcacttccgataccccaagcgaatgaaaattatcggcaatcaatttcatatcagaataacgatgggtaaggcttagcatgagcgtaatcgacatttcctgaccggataaaagcgtttctagctgtgtaatatagctatactgctgataatttcgtcccgccgtgtccataagaatgatatcacatgaggaaaggcgttcaagtgactgttctaaatcgacaggagactggacgacttccattggtattcctaagatatcggcataggttcgaagctgttcgactgccgcaatccggtacgtatctgacgtaataaggccaacggattgacgctcttttaataataaatgcccagctatttttgcaattgttgttgtttttcccactcctgttggaccaacgaagcaccgtattttcttcggttcacttcttatactaggataattctttattcgtttcgcaaattcctgtctcatccatgtaaaagcatcttcttttgtataacttggataagattttgatttaatgagcagttccgccatgacacttgagcgaatcgcctgcgagaattcctgtgtttctaaaaacgcctgtaccggctttaactgtttcggtaaacgctcattctccatcatttgcatcatgatttctttcatcgactttagctcaccaagcacctgaatatcagcttcttgctgtttgttaggcgtctgctcttctagtcgttcagacgcctcttcccgacgctttttttctgactgtagtagcgtcgcaaactctgtctcttctttcgctactttttcctcatcaagagcggcgagcacttcaagacgctgttttcgaaataagccgaagatcccgcctacttttacttttttcgtatttaaaatgacagcctcctggccgagctcctgcctaataaggggcatagcttcgcgaagatgggtgaccacatagcgtttgatcttcatggtagattaatcactcctacactttggacttcaacatcaggctctagctcgctatatgaaaggatcgtgagctcaggcatatagcgctctaaaaattggcgtaaatacatgcggatcgcaggtgacgttaataggattggctgaatgcctgactgctgaaggcgacttacctgctgcagcacttcctgataaatggtttgtgatgtttcaggatcaagcgctaagtaactaccctgatccgattgctgaaccgattccgcgaagcgcttttcaagtcgcgctcctgctgttaagactttcacaggctcaccaggtatcgctacttgtgacgtaatctggcgagataatgactgacgcacatattccgctaatacatcagtatctttcgttcgcacgccgttatcggctaacgattcaagaatcatatccaatgatcgaatcgatactttttctttcaaaagtctcatcagtactttctgcacatcaccgattgtcagtatatttggaatcagttcttctagaacagctggagatgattctctgacgttatcgagcaagtgcttcacttcctgacgacttaacaactcatgcgcatggcgcttgatcacttccgttaaatgcgtcgaaacaactgacggtggatcaacaatcgtgtatcccgatagctcggcgcgatctttcatttcttccgttacccatagagccggaagtccgaaagccggttccaccgtttcgatccctgtaatggtttcatcttctaaaccgctactcatcgcaaggtattgatccaaccgaacctctccgccagctacgcggtttccttttattttaatcacgtactcgttcggttcgagctggatattgtcgcgaattcgaataacaggcacgacaatcccaaattcaagggcgatttgtctgcgaatcatgatgacacgatcgagaagatcaccgccctgcttttgatcggccagtggaatgagtccgtatccaaactcaaactcaattggatcgacttgaagaagactcgtcacgctttctggctttttcatttcttcgacctcttcgtcgcctgcggctaattcgacttctttcgtttgatccagattcttttgcatcgtccagcctccatagacaaggagccctgcgattggaaatgtgagaagcggattaatcggtgtcgcaagtccgaggagcgtcacaaccgctccaacaacgtaaagaagcttcggataagcaaagatttgtgcagtgatatcagaccctagattgccatctgacgctgctcgcgtcacgacaattcccgtcgctgttgaaatgagcagcgcaggaatttgactaacaaggccatcgccaatcgagagaagcgtaaacgtcgttgccgcatcacccactggcataccatgaacgaccattccaataatgagtccgccgataatattaattaacgtaatgacaatcccggcaatcgcatcgccttttacgaacttactggctccgtccatcgccccataaaagtcagcttcgcgcgcaatcttttctcggcttactttcgcctcccgatctgaaatcatacctgcgttcaaatcagcatcaatgctcatttgcttccctggcatcgcgtcgagcgtaaatcgagcggctacttcagccactcgttcggatccttttgtaataacaatgaattgaataataacaagaatcaggaaaacaaggagtccgatcacaacacttccgccaacaacaaaggaaccaaacgtttcaatcacctgtccgcctgttttgttcgttaaaatggagcgcgtcgtcgagacgtttaagcctaggcggaagagcgttgttaataacaacagcgatggaaaaatcgagaactggagtgcttctttcgtattcatcgcaacaaggatgatcgtgagcgcaaggctaatgttcatcataatgagaaaatcgagtaagagtggagggaacgggataaccatcatgatcacaatcataatgacggatacgagcacggcataatcttttatcttcatcgttcgttccctcctcccgggtagccttttatgctataaacgtaagcaagtatttctgcgacagccttgaacagctcttctggcaccccatcaccaatttccacctgatgataaagcgcacgcgcaagctggacattttccgtcgtaataatctcgtgctctttcgctttttctttaatcttttgcgccacgtagtccatccctttcgctacgactgtcggcttatccatttctttcggatcgtaccgaagtgcaacagcaaagtgcgtagggttagtaataacaacgtccgcatttggaatttccgagatcatgcggttcattccaagtgcacgctgcttttctttaatctttgatttaatgagcgggtcaccctcgctctttttatattcatctttaatgtcctgttttgacatgcggatgtttttttcaaagtcatatttttgataaacatagtctaatagggctaagaataataatagaattcctacagctaagcccgtttggacgatgagtgagcctacaagagcagttgcttccccaatcgacttttgcgaaatgagcatcacttcatctcgcttattccaaagaacaatgaatgtaacagctgaaataaaggtgattttaattagtgattttaaaagttccacgagcgttcgagctgaaaaaatcctcttcgctccttttaacgggtcaattcgttcaagctttgcctggagcggatcagtagaaacgagaaaaccaacctgcatatagtttccgagcacgcccatcacgagcgaaatgcccatgagtggtgccgcgatcacggccgcctgccagacgttttcttttaacatgcgatcgacgttttgctctgtgagcgtccagtcagtgatgtgaacaaggttatatcgaatcatcgattgaagactttcaatcatccatccaccaatgaacgacataaataaaaaaacgcctatcatcataaatgcggatggaatctcagcacttcttgccacctgaccttttttacgagattcctgtttcttttgcggtgttgctttctccgtcttttcttgtgaaaagaactgaagatccatttggaagcgatatgttcgcatcgtactacccacccaatagttgaataagctggcccatcgtatccagcatctcttgaaacaccccgcgcagtaaaaagaaaaacgttggaatggtaacgagaatcagaacgaatccgacaaatatttttaacggcaatccgacaacaaatatgttcacctgcgggacggccctcgcaagaagccctagtgcaacatcgactaggaaaagagaggcaacgatcggtagcgccagctgaaacgcagagaaaaacatcccagcgaaaacttcagcgataaatcgagccagtgactgactgtccgcctgactaaggagcgcatcagccggtaaaagctcataactccttacaagtccatcaagcatcatatgatgaccatcaacggaaacgagaaaaagcagcgcaagcatgtatttaaaattcccaataatcggcacctgcgtcctcgtctgaggatcaatcacgttcgcaatcacaaagcccatttgaaaatcgatgaacgcacctgcgacctgtaccgtataaaggataagggaagcgataaatccaagcgacaatccgataaacaattcttttaaaatgtagatggtaaacgtcagatcaagcgttagctctgtttctgctcctaacccggctgttacaattaaagcaataaaaaaaccaagtcccactttaaagcggtttggaacgcttcttgttgagaaaactggtgcggttatgaaaaaagacgttgccctcataaagacgagtaaaaataagggcagagcgttaacgatactttccatctttagccgataaacctgtacagattttggtataaattcgttgtgtaatcgagtagcgttgtgagcatccacggtccaaacagaacgatcgttaacagaacggcaacgatttttggtataaacgctagcgtctgttcttgaatttgcgtcattgcctgaaacacgctgacgattaaccccacgccaagagcgattaacagaagcggagctgaaataataattacggtataaacggcgtcttctgcaagtgaaatgaccatatccggcgtcatcgtcgtcctccttagaagcttaatagaagtgattcgacgaccagataccagccatcgacaagcacaaataatagaattttaaacggcagagaaatcataacgggcggtagcatcatcatccccatcgccatgagggtagaggcgactaccatgtcgataataagaaatggaataaagataataaatccaatctgaaacgccgttttcagttctgaaatcgcaaatgcgggaacgagtgcggttaagcgaatgtcttccactgattccggcttctctagctctgcgtacttataaaaaagagcaagatctttttcgcgcgtatgccccgccataaactctttgatcggcagttcggccgcatcgagcgcttcttcctgtccgatctcttcattcaaatacggctgtagcgcctcactattaatctctgaaagaacaggtgacatgacgaaaaaggttagaaacagagcgagtccaatgagcacctgattcggtggcattgactgcgtcgcaagcgctgagcgaacgaaggaaagaacaacaacgattctcgtaaaacaggtcatcaatactagaattgctggggcaagtgagagaacggttaagagaaggacgagctgaatggtgacggacacatcttctgtggcgtttgatccgaagtcaaggccaggaatcgttaagtttatgagcaaatccattacttatcgtcccttctatcgccgtcgtcccaatagttcttacgtttatttcgctgtttctttaagcttgcttgaatcaactcttgaatgcccgtttgtttatgattcataaacgaaaagcctgttttctgctcttccgcctgctctaagatgcgctccacttcttccttatcttcaatttctttcagcaaattcacgttgtcaccaacgcccatcatatagagcgaatcgccaaccttcaccatttgaaccgatttattgttaccgagcggcgttccgccaatcggcgtaaaaaccgaatgatgctgaagcttttgctgccgttttgatagaaaccgaatgagtaaatagatcagcccgacgactacgatcgtatagaaaacaagcttgatgagaagaaaaaaaatgttcgtgttcgctccgtctacttcaggctcttcttgaggttcagaaggctcggctccatcttccgttagccagtctgttacgctcccgttattggccgctaccacatggttaggtattagtattgtgaagcaaaagaggagtgttatgatgctaatcacatgctgtctcatctgtaaacactccttctaacgcagctttgacaaacgctcggctgcacttaaaatatctgttactctaacaccaaagttttcatcaatcacgacaacttcacctttggcaatgagtttactattaatcaaaatatcgaccggctctcctgcaagcttatctagctctaaaatcgatccatgagaaagttcaagaatgtcttttacaatgcgcttcgttcggcctagctcgaccgtcacctgaagcggaatatcaagtaacatattcaaattgcgttgctcaccgtacgggtgatcttcctggctgaaatttgtaaactgaacgttttggatattcggttcaggctctttcactcgtgaatcaaaagtgactggttccttttcttcgttaacctgttcaggatgatttgattgctgcaatttggcctcctgctcctttgccttctgtgtctcttgctgctctgctgcttgaaggtcttctgcactgacgagcagttcgctaatttgctttgctacggttgctggcactacatggtggacgacagtttgtacaatcgaaccgattgaaagttcgaacgtaatatccatataaatcggttctgttcctttttctacaagtacggagtttgctgattcagaaacaacctgaagattcgtaaacgacccagaaaaagaagagcctgaagccatgcttagccccttatggatgctgtccatcatgcctgtcatcacagcggttaaacttttatccacgcttccattgccgtcatcccctttggctacttgccaaatatcagccatatcctgagcatcaggagggttcaccatcatgattgtttctccagccgccgctccctcatagcgaatcgctgcttctacgtaagggagagacacttcttgctgaaaacgatcttcaggaagaatctgcattgtaatattggatacaaacacatcttgcataaaaacagatgaaagtgttgttgtaagactgccgagcgcgacgctaaacagctcgctcagcgcttccttttcaacttcatgaaaatgcacgacgtcttcctccttccctgctgccgattcttgaaataacgcattgatttcttcttttgaaaggcgatcatccgtcatgtcctatttcctcctcttccttcacttcagtgatttgtaccgccattcgaccctttgacgttccaggctgtccgtgaaatttcacgcgattatcaaccttgacgatgagtggatcagaaacagtttgattcaatcgaattacgtctccatcttctaaatttaaaaattcttcaatggttatttcagaatgaccaagctctgcgacaatgcctaaattggttttttttagtctcttctcaagttccttgctttcctgcggctcgcgatcctttttttgattggatagccagtgatgagccgaaagtcttggcatgattggttcaagaacgacgtgtggaagacagagacgaatattgccactaacttctcctacttttacacgtagcgtaacggttacgaccgtttcgtttggtgatacaatttgaagaaaatgcggattaacttcaagctccttcaattccgttttcagcttaaggacagacgtccaggcgtcttgaaagctttcaagaattttactgaaaatccgctcaatcaccatcgtctcaatttcggttaaatgggagagcttatccggttgaacaccttgacctccaagcatgcgatcaagcatcgcatacgcgagctctggcgccacctcaagcaccatctgtccttgcaatggtgaagcaacaaagagactaataatcgagttctctgttatcgacttcacaaattcttcaaatggcatctgatcaacagaatgaacggaggcttgaatgatcgtccgaagctgagcggatgaataggtcgtcataagccgcgcatagttctcatgaatacgcgttaaaattcgaatgtggtcttgagaaaagcgaagcgctcttttaaaatcatacgtttctacttttctctctttcattggcttcttctgcccaggttcatcaatagcagcaagaagcgcatctacagttgctggcgatagcatatcagacaacatggtcacccccgttcgtctattttttctctaatacgttaatgttacggtaaaattccgtaacgagctgtttcacttcatcgattgattccatcaccacatagcgttttccattcgttaatagaatcatcgtatccggtgttgattcgatcttttcaatgtaaatcgcattcaacatcatcgtttctcgatttaatttcgttaacggtatcatatgaacagagcaggccgagggaaaaatagcccctcagcccttaccccctatcgttttaaattgacgatttcttgaaggatctcatctgaggttgtaatcactcttgagtttgcctggaagccacgctgcgccacgatcatttccgtaaactcttcggttaagtcaacgttggacatttcgagttgaccggcaacgacgcgcgagccttctggtaggccaccagcagctaccccagatttttctgtttcaataaatagggaatttccaactttattaagacctgctgggtttggaactgtatcaatccctaaattgattgtttgctgagggttgccattattatctgtatacgtaatctggccagctgcattaatactagaaatctggccaatatttgaaattggattcccagcgtcatctaaaaccgcgtacccttgagtggttacaagattcccttcagggtctagctgaaaagatcccgaacgagcaaggtattcagtgccaccttcagcctgcactctaaaatacccatctccttgaatgctaagatccgtctgaacacctgtcgtcatcggtgatcccgggctatctatcatattaatggcagaaacagatgaaccaagccctacttgcattgagttcacggagtttccagccacgctttgactaagcatatcttcaaacaacactctacttttctggtaacctactgtattcacgttcgcaatattattcccaatcacgtctagcttcgtttgaaagcctctcattcccgaaacgcctgagtacattgaatttaacaagttgtttccccctctaattgtgtcgctgcttcaatcggtccacagcgattgggcctcctgctcggtccggccactataaaataagtgctgaatcaatgtttgttacgatttggttttccatattgtcctgtttcatggcggtaatcactttgttgtttttaacgctaacaacaaatgcgagatccttcatcaacatgagcgattcttttgaacctttttctcgcgctttctccactccgtcatttaactgttggagctgctgatctgaaagcgaaataccgttttgctcgagtcgaacttgagcgtgatgactaaacgaaacttgggactcaatcgtttgttttagctgatctgcaaaagaactggcttcctgctttttaaccgattgaattggctgcttcggataatatgcctgattgacttgaatatttgccacgctattccctcgtttcgatacgctctaaaagggaaacgtctacttgtttaccactatcaagttctgcgagtacattgccttctttgtataaaacggcctgaacctttccagagctaaccttgttattctcttgccactgaacacttttcccaatcaaatccgcgtaatctgtcatcgagctttgtagctgacgatcaaaaaatttattcatcgatgtacccatgtttgtcatttgttcgagtgaactaaattgtgccatttggccgataaattcagtgtcctgcatcggcttcattggatcttggttcgaaagctgggcaacaagaattttcagaaaatcattttttccaagctgacctggtgcttctgtcttttgtgtttgtgttgcttgggatgctgtaatggagtttgtattcatctaatcctccttatatggcgtagttaattccgccggacgtgctttcttctctttcgtttgttacgagcggattgtcttctaactcatattcgccttttccacggcgctgttttccttgatgaaactgctgtccctgctctccacgtccatcctgcatgaaggtgttttgggacccctgcggctgctgaactacttccactttatccagctgaatgccctgctgaacgagcgtatgacgaagctgatgaagctgtgattcgatcaattcttttgcgcctgcagtggctgtaacgatgtgcgctgttactttcccttctgatgtcgttaaccgaatatcaagctgtccgagattttctggagaaagcttaatcctaatgttcgtttcatcaccatttttggaaacgtgcatgcgctccgtgatcatttcacttagctctgtgctcaagtaacgagcttgcactgggacttctttaacgggtgtgtcactttgctttactagcggaagagcgtctggcttttcctccaattgaacgtcatctatcaacgtttcatttgatgtttgttccaaattctccagttgctctgttacttctgtgcgatcaactgatggctttgctttttctcctctatccaggacaggcctttgctgattatcctccacaatagcttcttgctcttctagctgaggagtttgatcgactgttacatcaagatttttttgtgttgaagattgctcagctgtcaatttctttatcatctggagtggctcgcctgactcttgcaccttcgcagtttcaaccagcttcgttgcttcgaacggcttctctcctaacggatcagcgagaatttttgttgcaccttgctgcattttcaaccattcttgcttcgaaaatccaggtaagatttcttcgcccttatgaaaaatggttttttcttgtaactgcacactcgattcattactcaaaggtaacttggaaactactgactcaagaggtgtttgctttccaacctgctcaatggtctctaactcttgcttcgtaaaacccgttaagatgaatccttgctggcttccacttttcatctgtatggtctcagcgctttcacgatttccctgaagcttagtcgaactagactcttggctaccttgaacgtctaacggatgtgctccgttagttatcatcagaagattgagcggtagttcagcttcaccgtatggaaccttaccatcaccctgctccaattcactctcgcctgcagttccttgatctctacccgcttcttgttcatttacctttactcctaaagcacttaacaaagttgaaaagttagttgaattggctgttggcttaggctgcacgataacgctttttccaagtgactggatggcgttcactttttcacctcctctcagttcgctagatcggcgacgtaactagatgaaaccgatttttccatttctgcgagtaaagccttccgcttgtcatctttaagttctttaagaattgagagtcccacttctttctcttcttcagactgagccatcttcgaaaggatactagccgcttcttcttcaggcatttctgataagtctttggcaacatctgaagtagagagcgaactgtcttcacggtcaatcgcattcatgagaagcgtcactctttcttgcatcgccgcaagctcgggatcgtctgctttttcaagatctcttaaagcgatagtaagatccgccgcaacagctgcgttcattttaccgagcactgccgcctgctctgtacttcccatcgcatcaagtaagagagcagcctcatttaacgtgaggttttccataatcgaagctgactttgaagctgaaatgccttcatacgtattggctaattgctgaagcttcttctcgcgctcttctttgtcggctaattcacttttgatttcttccgatagcgattcaagctcagactgcttcttccctagctcaatttctttttcgtccaactgcttttttaatccagatatttcggtatctttctcatcgatttctttcttaagcagctcttcttcattttgatcagtagcttcagccgttaaattgttctcaacataagcgatcggcttttttgtaagtgaagttgccactgcgaacagatcatagccaagaaacggcagaacgacgagcagcacggtggccataaaggcaagcggtaaaagaaaaccgtgaatgatgcgttctttccatgaacttttctgtcgctttcgcatccctctcactccccttagccgtttcttgtcagcatatacgctcgcacggtgtttaaatcgtccaattcattttgttcaatcattttcatatcgtgataaaactcttcttttctcgtttctttgatcgattgccacgttttctcttctcttacttttgaagcaagggtatcctgttgttcgcttaccttatgttcaacctgactcagctggattcgcttttgctcaagctgcttttcgagataagcaatgtgctcttcttcttttaaaagctcgatgatcggaaggccctctaactgacgttgttcaagtcggaggcgcttagaatgaatttcttcttcaaacagttgtgctgagtgctcgagatcgacctgtactttgagcgactccgccatttcaagctgagcctgagatttttcgttttctttcacatccaaaattcgttgaaatggaaattgaaaagctgcgatggttagtcatcctttccaaatcgtgatagtagccgatccttactttcttcatatgaagcctgatcatcaatgccctgcttaatatacttttcaatctctggatgaatcgagattgctttatcgatgttgctgtttgttcctgctttatatgcgccaatgttaattaaatcttccgatgacacatagacggcaagtagccgcttaaactcttctgctgacttcatatgtgcgggcgttacgatttctttcataacacgactgacgctttggggaacgttaatggctggatactgccctttttgtgcgagctttcgatccagaacgatgtgcccgtccaaaatgcctcgtaccgcatctgcaattggctcattcatatcatcgccatcaacaagaacggtgtagaaagcggtaatcgatcccgtctctgccgtccctgatcgctctaatagttttggcaaaagtgcaaagacgcttggcgtgtaacctttactcgtcggaggctccccaatcgcaagccctacttcccgctgtgccattgcaaatcgcgtcaccgagtccatcataagcatgacgttctttccttgatctcgaaaaaattctgcaattgacgttgccgttagtgcgcccttaatccgctgtagtggcggctgatccgatgtagctacaacgacaacggatttctttaagccctcttcaccaagatcgcgttcaataaaatctctcacttcacgtccacgctcaccgataagcgcaatcacgtttacatccgcttctgagtttcgtgctgccatacccattaacgtacttttaccaacgccgcttcctgcaaaaataccgatgcgctgaccctgcccaactgttaacaaaccatcaatcgcgcgaacgccaagttgaaaaggcgtcgtaatccgcggtctcgtcatcggatttggcggctttcggtttgtggaaacggcctttaatccgcctggcagatctgtttgatcaagcggcctaccgcgtccatcaagaatcgtacctaacagcgaatagccgaccttcacttcaagcggctgtcctgttgccacaacgagacacccagggccaatttctgataaatcatgcataggcataaggagaacgcgattttcacgaaagcctactacttccgcctcgatcggttcctttaatggcgctgggtaaaggtagcaaagctcaccgattttcacttctggtccaagcgattcaattgtcagtccgatgacctgcgtgacttttccatatttctgaactgtttcgattgcctgaatttgtgacagataaggttcaacattaatgctcatcgatcgttcgctcctcaaacatcccaagcagctgttttttcatttcagaaagctggctatgaatcgaaatatcgtacgatccacttggcgtatgaacaagcccagagccgacctccaaatcattcataggaatgagtttaagactagcgtttacatctagctgtttttctagctcgtccaccatcggcatgacgtgttggtagtcttctgtcgacacttgaaaaacgacttcaccacgatcctgcacttttttcagcgtatcctggacaatgccaagtagcacttcaggacgttgttccaattctttcaaaataattttcttcgcaatggccgtgcttagcgagagaagaaacggctcagcgctttgaatcaactcttcttttttgtcataagcggccttcaccatctgttccatctctttcttttgctgatcgaactcgaaatgaatttgctgcatgcctgcttcatatccagccgcataaccgctttcttctgcttctcgcacggtttttttcgtgatttcctgccactcgagctctttttcctgctgcttcttctctaaatgctgatgaacatttgcttcttcttccccaagcctcgttcgaatcgtatgatagagatcttcaagacgaatcatcatttcaagaagctgagatttcttctcttcaactgtcatcgttcgcgttgggaggacgcgactacgctttggctctcttaccattctctgttcaatgaccttaggaacagctcgtttttctccagaggtttttcggatgatgttagacaatcaaatcatctcctccaccgcgcgcaatcatgacgtctcctgtttcttcaaggtagcgaatgacggaaacgatgcgcgtctgggcttcttccacttcacgaagtctaagcggccccattaattcgatctcttcttttacggtatcgacgcggcgattcgacatatttctgaaaatcgtatccttcacatcgtcactagcgactttcaacgcaatcgagagatcttcatccttcacttcgctaatcacaaggcgaatcgaacgatcatcaagcgtgacgatatcttcaaatacaaacatccgctttttaatctcttctgctagcgttggatcatctttttcaagtgaacttaaaatcgttcgttctgtgcttcgatcaacgctgctcagcacctgaacaatcgcttccactccacctgtaaatgtgtagtcttgagagcccgtagcattaagttttccttcaataatcgtctcaagatgactaatcacttctggtgatgtgctatccattagcgcgatgcggcgagcgacgtctgcctgactttcttgcggcagcgaggaaaggatatgagacgactgctttgcatcaaggtaggaaagaacaagggcaatcgtctgtggatgctcctgctgtaaaatatttaaaatttgatcaggatccgcttttcgtgcaaacgcaaaaggttttacttttaggttcgctttcaaacgtgtcaaaatctcttctgctttcttagatccaagcgcctgttcaagaatatgctgtgcatattcaatgccaccaacggcaatgtagtcttttgcttttaccatttggataaactcgtccacaactgcctctcgctcatcaggctctacttttcgaagctctgagatcccgagcgctagctgatcgatttctttttccgataaatgtttaaaggtttgtacagataagtctggtcctaaagaagtaagaaggattgccgctttctgagttcccgttaattcttctgtcgtgctcaccatccaacccctcctattcttctttcatccatagtctcagaagtttcacaaattcttcaggatcattttttgcaagactttcaatctcgtcttttcctacaagcgtttctggggtcatatcgacttcgcgctcttcgcgtggtaaataatgatcttccggaggactataagactgctcaaactccatgaagtcttcatcttctttacttccccggcgtcggaaaagtagaaaaattcctcctataacgagaatccccactccacctgcaatagcgtaaagtacccaggctggaacgctatccatcatcgttgaaaagatgccttcggttggctcttcatagtcggcccgtcccttaaattcattcgcaaataccgagatccgctcttcaagagccgcatcatcaagcggaacttcactttcacttaacgaagtacggacaacattttttagtacagtacgaatatcttctatatcagctgcagttaacgtcgtgatatcatcagccacaggtggctctacaccaacgtttatcgtgatatcatcaataagatatgggctttcttcgatctctttatgaatgcgattcacttcacggttaatacggtcttctactttttcataagaaccgtcaccctgggcgtcgggatcatctgcgttatagtttggaatttcgccttcatctgtacccgttccatcctgagcagcggcttgatcgccagaatacgattccatgattttctcaacgctaatatcaatgccttcacctgtttcttcatcgacaggttcaacaagatcttccgtgcgtttttcttttgtaaaatcaacgctagccatgacggagacaaccactttgtcttgaccaagaatcatgccaagcatttgttggagctcctgctgcatgtctttttcaatactgttacgaatatcttcttgttgctggtaggcagataatgttgtatcaacgccaccttcaccatagtcaaaagccgttccgttctgatccatgattacgatgttttcaacaggaagattcggaacacttttactgatgagatgatagagaccagtgatttgaccttgatcaagctgaacgccgggatctcgcgttaggactacggaagcagaagcggtttcacccgtttcatctagccacacgctttcagccggtagggtaatcatcacttttgattccttaatcccaccaatttgctcaatgaggtagcttaattcattttgcatcgcatcgcgttcaacgacatcaaattgtcgatccgtcattcccatacccatgttttcactaaaaatgctgtaattcacattaccgcttttcggaatgccctctgcagcaagacttacttttaaatcagaggcctggtcttttggcacactaattgttgtaccatctgctgaaacttctacaggaatacccttttgttcaatcgcgctcttgatctcgccagcttctgtcggcgtcaaattcgcatatattggtgttaaattaggtttagacatccaaaaaacaaggaatagaagtagaagaagagtgacgagaaacgtccctccgatcagccatttggtttttgtggaatagcttccccacgtttcctgccagcgacttttaaagttcagtagttgttggttcatcttttatccatccctgattgtctacatttgcatgcgcatgatttcctggtatgattcaataaccttatttctcacttcaactgttaaatttagagatagtgaggctttttgtgctgcaagcataacttcatgaacatcctgtacttctccagttacgagcttatttgtcatttgttctgatgcgacctggttatcgttcacctgtttaatcgcattctgcagcatttgaccgaaatcagctgtcgcttccccagaagtagcctgctgctttgcttgagcaggaagctgctgaagtgcactaattgtattcatataatcctcctatgctcgccatcactacttcccaagttcgagcgctttcatatacatactttttgtggcgtttaacgccgttacgtttgcttcatatgaacgagaggctgacataagatcaaccatttccttcaccatatcgacattcggcatctctacgtatccctcttcattcgcatcgggatgagcgggattataaacgagcttattaggcgcattatcttctttgatattcgttactttcactccagaaggtgactcattccccattgcagcttgaagcttgctttcaaacgaattttcctctagctctactacttttcgcttgtacggctgccattcaccatcaacaagttctgaacgcgttgtttcggcattcgcaatatttgaggaaacgacatccattcggagtcggtttgctgttaacgctgaagcgctcgtgttgaatccgttaaataaattcatttttcattagctccctcgaattgcggtttgtaagtcacggaattggctattcgtcttctcaaccatcgcattgtaccagagctggtttttcgcgagttctgccatttcaacatccatgtcaacgttgtttccattcgattgatttactgtactttgatccgtcttaacaacgggatttaatgaatttttttcgttactaaaagggacatgtttggggttagatttgtagctctgcagattttgggtagcttcctgcaggttatcttgaaatgaaacggtttgtcgtttgtaattaggggtgtcaacatttgaaatatttgacgtaatggttcgctgctgtaccattgacgcatttaatgcttgttcaagcggtttgatcgattgaaaaacattcacgaagctttccacactccttgtataaatgtgtttttataggtaaatattggttttgaagtcataagtatactcattcgacaattttttcgacattgttagcatagcattgtcaaaaataatagtaaatgagtgttttcacctaaaaaacgacttttttcacttaattttcccacatctaaacggtataatagaggtataattttcaaggtacgcgttcaatagtactacgatgggagcgaaaaaatgtttaaaggcatgtatacggctacgtccggcatgatggcaagtgagcgaaagcagcagttcttaacgaataatctctcaaatgctgaaacaccaggctttaagcaggatgaagcaactttccgttccttccctgaatacttaatgaaagaaagaaatacgaacacgccccctaactcttccattggcacgctccaaactggcgtctacacgcaagaaggtattcccaacttttcaagcggatctcttaaagaaactagcaaacaaacagattttgcccttatcgatgagaatctcccaatcgacgaagaaactagtaaaaaaggactacttctatttggtgttcgttttgaggataactcgattcactacacaagaaatggaaatttttctgtcgatgaagagggttttctttcgacaagtgagggcgatcaagtaattggcgaagatcttcagccgattcaactaacgagcgactcgttcactgtgacagatgatggcacgattctcgaggaaaatggcaacgaacagcagctatggattggctataccgatgaccctactaatctcactcagcaaggaaatggtgtttttgcatgggaaggcgatgaagctgatgcgccaataaatgttcaaacaactgatatcaccgagtatgctgtgaaacaaggctacctcgaaggttcgaacgtggatatgacgacaacgatgacggatatgcttaacacgtaccgcttatatgaagcaaaccaaaaagtactacaaacatacgatcaaagcatcgacaaagccgtaaatgatgtcggtcgcgtctactaggagggttacgattgaatattcaaatggctaccgcatcttcttcacttagtcagacacaaaagaaaatcgatacgatcgcaaataacatcgcaaacgttaacacagcaggttttaaaagccgagaagcgacgttccagaatctcttaacccaaacgtatgcaaatcaaacaggagaagcaactgagcctggaagagaaacgcctgaaaaccttcgcgtaggttttggatcaaaagttggtttaacggcccttaacaacaagcagggatctgctcaggaaacagggcgtgatcttgacgtgatgcttgaaggagagaacgtttatttccgggttcaaaacggcgatgccgtaaactatacgagagatggctcttttgaaattcaaaatcagaatggagcgttttcactcgtaacaagccgtgggaacgcgattctggatacgaacggtattgcgattacgtttgatcgtaatccatcagaaatcacgatctctgatgcaggagaactggtagcgacggatgcaaacggcaatgaccaaacgtttcagctcagcatcgccaaagtcgatcgcccccaggcgctcgtgaacgtcggaggaaatgaattttctcttcaagagaacggcgagcttgatcttgtcgcggttaatggagacgaatataaaacaagacagggctaccttgaaacgtcgaacgtggatttaacgaatgaaacaacggagatgatatcgacacagcgactcctccaattccagagccaggcgattaaaatggcggatgaaatgatggggttagcgaatacgatcaaaagataaatcgataaacaaaatccctctcgcgtgagagggattttgtttatctaagaaagtctaatagagatggctgaatgatcttcgcgctagcggcaagagaagcctggtagacgctttcttcggtttttagtttcatgatggcttcggcaaaatcgacgtcatcatttttagaaacgagcgtttgtagggaaaggttttcttccttcaagcgttgattcatcccctccactctcgactgctttgcgccaagggtggtccagctgtttaacacttgctctttacctgtctcaatctgttccagtgcactgctaacgccttcctgatccccactcgctaatgcgcctgaaagttgatcaagtgtcttaaagaggttcacattcccatcaaacacttctcccgtaacgttcatttcaatcgtattgctagaagacatacgctgcatcagtggctggttgttatacgttaaatctccattcgctgcaatttgaatcggttgatctgttttctgtccattgaagatgtactttccatcaaactttgtattggcaatatcctgaatctcagcgcgtaattgttcaatttcttttccaatcgtttgctgatcttctggtgagttcgttccgttcgacgcctgtaagcctagctcatttgcccgctgaagcgcattagagatgctgttaagggcctggtctgttgtttccatccaggaaagagcataatcggcattacgttcatactgctcattatcagctaactgagatgccagcttcaaagatttctgaacaccaatgggatcatcagaaggcgtattgatcttttttcctgttgaaacctgttcattcgccttttcatagcgcgagaggttctgctgtaactgagaggtgatgtttgagctaagcatttgctgagtaattcgcatatgatgatctcctttctactaaacgcccatgcgattaataatgacgtcaagaagctcatcggttgtgcttacatagcgagctgctgcattataagcatgttgaaattgaatgaggtttgacatctcttcatcaagcgagacgccacttactgacatccgattttgatctattgactttaagacagcctggtgactttccactgatcgttccgaagcttgtgactttgcgccaatttttgaaataagcataccgtaaaagtcgccaacgctagcttctgcatttatatttgaatttgccacatcgaacgaaagtgtttcgtttttcaaatcgcttattgtagtggcaatatcaccattactaactgcactattagtagaagaagcagcgatcttagctggattggcctttacttcttgattcacactgactttttcaagaaatgtatcgccagtcccactcgtatcaaacatcgccttgccttgttgcatcgtaccgttgtcatctttaactagtgaaaagcccgacgtcataagattattcataccagatccattaataagttgattaaacacttcatttagatcactttgaaaatgattcacttcacttagtgactgcttcaggccttcaagctttccagtattttgtgcattcagccctgacatttcatccattaataggtcacgtcggtcttttaactcgttcgcttcaggttttaaagcaatttctttgtttaaactatcaatctgtgaggatatgacggtaatctgatcattcaccgctgtcatttggtcattcaaacttttagatagactcgctaacccatcatttaatattttcccctgtgatagcagttcttctgaacgttctacaagaactgcacgagccgcaagactatccgggtttgaagcaagatcttcccacgctgagaagaagcgatcgaaggacgcacttagtccgttgcctggttccctcgtcatttcttcgatttgttgaagcgtttcaagcttcgtcgattcagatcctaactgaccattccgctcgcgatactggctgtccagatattcagaacgaatgcgttcgatcgattcaacacttacaccagtcccaagctgtgaggatgagctaccagtttgataaggatacgtaatggaagacgttgcttgcatatccactcgctgcctcgaatatccgggagtattcgcatttgagatattatttcctgttgtcgtaagagctgtttgttgcgtatagagacttctcttcccgacttctaatccatgaaacgtagacgtcattcaaatccgttcctttctcaacctgataactcaggctttcgtatcaaaatatcctcgcggtgtttgcaatggcttctggttgggcctgccgtaagtgatcgattgatttgatgccgttaaatggccaatcatatgatggacaaatgccatcccatcccttaacaactcttcatttacatcattcatactctgaagtttctcagctttttcttttaaatcagccgctctattttcgaccattcttttaacatgcggacttaataagcctagaacttgtttaagcgtttggtctcgtcctgcaagcttttctgtaatctgctgccgcttctcttcactaacacgaagtttttgaagaagctccttttctttgttcattacttctgtcaatcgcttcacgtctcgttctactaacgcctcttgtttttcttcagaaagaacgattaacttatcatgaagaagaatcatttcacccattacctctaaaagttcctgtcccatcgtgccgcctcctgttaaaaccactgatcaaacagcttctcagctgtcttctgactatcgacacgataagtaccttcttcaatctgcttcttgattgccgttactttcgcttcgcgctcttgttcggtcttcatgtcgtatagttctctcgctttgtttgaaatttgaagctcatcttctcgaggagcctttttcacctgctccactttcgtaacaggattatgcttctggtaagggtttacaatgggtggtgctgatggtttattaacattcatatccggtcacctcttcccgacagtttatcatactactcctattctattattcgtacccgaatttgaggattataccgttattatcggaaatttcttgaaaaaaattaaccgcttactgaattttaaagtccgttacgagaacgcgttctacctttccatcatgcagcacttgatttacttcatttttgatcgattcttcaaacgttttaagaccttcagagcctttcaaatcctcttttgtgagaccggctaacgttgagatcacgatcgcttttaattcgggattacgaacttcaagttctttatagctcttctcatgatcagctagcaagttcagctgcacaatcgcaaaatgatctgatgataaatttgttgttagtggttccatcgtaaagcttcttgcggcaagctcttccgctgttggttctttctcttcctgcgccaccactttcttcaaatcaatatcgagaaaaaacacagccgcggcagccccagccccgacaataccaagagctgttaggaagattattagaatccgtttcattctttcacctcttgttctaattttctacgttgtatggaagaataagcacttcaactcttcggttctttgctctgccttcttccgttttatttgaatcgatcggacgatattctccgtatcctgtaaaactaaataactttggatcaagcttcttattattcaatagctctgtcataaaattcaacgcgcgctcggaacttaaatgccagttcgatggatactgcgatgttttaatcgggcgatcatccgtatgaccggtaaccgtaatccgacgcggtggatccgtaacgagaagatctgaaatttgcttggccagtggtttcgcatctcctgttaacacggcttttccgctttgaaatagcgctgcttcttttatcgtaatcaaaagtccttcttccgttaacttcgtttttaaataagagtcaagatcttgatcagcgatatattcatcaatacgaccttgtaatttctgaagcttattctgatcctgttcgaacgctttttcttctgaatcgtcctcttttgactcttctttttctggctcatccgtcatgcctacaaaggaaccatcttctgggtcgagcatcgccggttcgccttctaaaatcccagttcctccacttaatacttcctgaaaggattgagacatcgcttcatactttttcacatcaaccgtgcttgccgcaaaaagaacgataaaaagagccagtagaagcgttaacatatcggcatatggaatgagccagctttcgtcgacgtgatcctcatgctcctcatgtctcttcttacgcatcagcgcctactccttctacctctgattgacttgatttcttttcagcgtcaaggtttcgttccttacttggcaagtagacaagaagcttgtcttctaccatgcggggcgatgcacctgactgaactgccagaaggccttcaagcatgatcattttaattcgagcttcagcgttggatttacgcttcagcttattcgcgaacggatgccagagaacgtaacctgtgaaaatcccaaaaagcgtggcgataaacgccgccgcaatcgacttcccaaggagctccatatcgccaaggtgactaagcgctgcgacaagcccaacaaccgccccaagaacaccgagcgtcggggcatacgtaccagcctgcgtaaagatccccacccccattctgtgacgttctttcatcgcttcaatatcttctactaaaatttcctcaatcgcttcatgtgaatgaccatcaatcaccatttggaagccgccttttagaaaatcatcatcaatgctttcaagattattttcaagcgaaaggagtccttcacgacgagcaacagttgcccattcacgaaacattggaatcagctctttttcagtcagaagcttctgattagagaagataatttttaataatgttggaaatttcttaatctcgttaaatggaaacgcgataagtagtgctgccgctgtcccaacaaaaatgatcacgagggcagcgggatttaatagagcagccggatttgcacccttgagaattaatccgcccactaggacgaaaaaaccgaggagcacaccgaacagagatgttttttccattgccttcaccctctttattttacttacttctttgcctgttccatcgcttgcttccacgtatttcgaaactcttcagctaagttctcgacttcttttaaaatgctagtgtcgttttgaatgttcgcagtgactagctgtgaaatcatatagtcatagagcgcgtccatcgattgtgagagatcgatctccatgtttaaggtcgaacgcaattcataaaggatgttttgcgctttaatgatattcgtgttcttcgcttccatattgcctttttccatcgcaatagaggacaggcgaataaatttgatacaaccgttataaagcattaacgttaattcctgaggcgatgacgttgcaaccgcattagtttgatacgtttgatatggatttttcatagccataaaaattcctcctatttacgctgatcgaaaaaggcgccgtccgtatatgcagccgacttgtacttatttgcagctgccttgccattctgcaggcgtctcatttgatcggaaaaagcagcataaagctcggaaagtttcggttgaatcgtttcttctaggacgttcagctgttgcagaagtccctgctcgtcttccgtccaattctttccttccttcaccattgcttcatctaaaagtttaatcgtctcttcgcgtcgcgtaatcatatgattaatcccctcaagctgttcagatccttgatcatccattgaaggactcacgatttcaagagactttgcgatttggtttgtcacaacatgcagttgatttaaagcatcacttcttctcattttacaccccaccaagtaagttttgttgtacccatgcactttgctgattaagctgactcatcgccgtttcaagcgccgagaattgcttccaataccgatcttcaatcgtaacgagcttatcttcccagttttccatctgttcatctaaatcttttaatctcgttgaaagaaagctactatcaacaagtgtgcccggcgtccctgctttttttcctagctgatcgatccctttgttaacggagtcataaagccgatcaccaattccttctgttccgctcgtaaacagattcatcacctgatctggcttttgttctagggcactcttaagtttcgcttcatcgataaagagctttccaccatcctgatacgaaccggtattgatccctacttgcgaaagcatgctaagttcacctgcgggaattccgctaaccggcgacatccaggcacttcgaagatcactcacaatcccccgaaccgtggcatcactttgaagcatcccgcttttcgctttctcctcccaaagttcgatctctttctcagtaagatcttctctttgcgcatctgtgagcggagggaaatcgcggtttcgcttttcagtcagcatcccctgtgctttatcaatgaactcgttgtatttctcaacaaaattcttaatcatgtcaaaaggagcctgaacatcactttggaccgaaacggtagaagtccctttttgaactaaatctagctttaggttattaatcgtcgtagtgttcgttttcaggttatcgacaacaatgccatcaaacgtcactgaaccatatttcccctgtgctgtattggccgcgccgccgagaatacggctttctactgttggatcagtaatcccaagcgtgaatgactcatctcctcccatcgctttggatgaaatgaaaaagcgtgacgttgtgtcatcaaagcttgctcgtaagccaagtgattcacctgtcattccatcagtcgcacccgcaattttttctgagagacttttaaatgtgtctgatgcagtgatggtaatggaagccgtttgccctttgctatttgtaagctgaagcgtggtgtccgcttcacctgtttgaagcactttatctgttcccttcgccgcactgcccgcttcattttgaatggcctgtcctgatgtgaacttggcgctttgtgcgagttcgttaacggtgaccgaataagaacctgggacagaggtagaagtcgttgttgcattaacagctcctgtgttagatgaaacagttttaaaagcattgtaaccagactgcaaccgcatcgatgaagccgtgcttcgcatatcagacatcattgtatttaattcacgatacgattccttctgccattcaattgtttgcttcttttgagacaatttatcgagcggaattcgctccgccatcatgagatcttttaccatctgatctgtatccatccccgtcgctaacccggaaattctcatgaacatctcctccgttcataccttctattcatactatcggcagggggagggaattgtttaaggtgtaaaaagacctaaaaaagaaccctccatagagagttcaacgacttagattttctgatcgaccataaagccaagaagctcagccgttgccgcgtagcgatcaaggaacttttttgaagggatttctttaatgatttcatctgtctttgtgtcgataatctgaacgtagtattcgtttagtttgtcatggagttggaatttgagtgaggttttggttggttcgaggtaggtgtttagggtgttgatgtgttgattgatggtgtcttttgataaaactttttcttctacctcacgcttttcgattgtcttagtcatttcagtattagttgtttgagctaatttagttggtccagaaggtgtgattgaaacgtctcttagttccatcagctaatctccaattcccgatcaatttgtgttaaaaaaggcggccttcaattgaagaccaccttgtgagtaaattaacgtagaagttgtagtacagcttgcggttgctgatttgcttgacttagcattgcttgtgaagcctggttaagaatgttgttcttagtgaagtccatcatttcttttgccatgtctacgtcgcgaacacgtgattcagccgcactaaggttttgagagcttgttcccagattgttagttgtatgctcaagtcggttttgatatgcaccaatttgagaacgaccatcacttactttttgaatcgctgcttcaattgtatctaaagaaatagcagatttagctgtatctgtcacatcaagcccaccaaggtcagttgcaatagtagttaaatcaataccatctttagcaaaattcattgtcattgtttcactagaatttgcaccaacttgaagtgtaagaagtccagcaccatcacctgcagttgcatcaagcaaattttgtttgttgaatgctgtacgagtattaattgtgccaacttctttcgtcagttcatctagttctgttttgattgctgaacgatcttcagctgtatttgtatcgtttgcagcttgaacagtcagctcacgcatacgttgaagaatagaatgagcttcattcaaaccaccttcagcagtttgcaaaaggctgataccatcttgagcattacgtgaagcctgatcaagcccgcgaatttgagcgcgcattttttcagaaattgaaaggccagctgcatcatcagctgcgttgttaatacgaagccctgaagaaagcttttccatattcttcgatgaatttgctgcgttcgtacccatctggttgtacgtgttcattgctgctaagttgtgattaataatcatccctaaatctacctccatgtaatggttttatcaagaaaatccacatccgtttggacttcctaacaccactattatcggcaggcattttaggatgtttaatacttttctgaaaaatatttaaaaaagaaccgcatccaatgatagcggttcctcttctaataaacattcaccttaaatgcgcttactcttccttctcataaagccccggaaaataagtctcaagcccattcccatccgggtcatagaacttaaaatgagcgattccagcctcttcatcaatcgaaaccccacgctctcgcagctcattcttaaacgtttccgcatacttctctgctaaatgaagcaccggataagtcccgctcgcatcagccgatggaagcttttcgccttccttcaactcaatcaaacaaatcgccgtctgaccttcaccaacgccaagcaccacggtactaccatagtcctttgtcacatgaagaccgagcatttcttcataccatttcactgccttcttaatatctcgtacacgaatgttcacttgataaacgccttcaaagaaactcatcaagcccctcctatgaactcgtttttctcctgaattcttttagatcctccaggctaaattcctgcattgcggcaagcttattttctgattgaatcgcttcatatacttcttttcgatgaatcgcgatgttcttcggtgcttctacaccaagcttcaccgaatcgccgtcgatgctaatgatttttagttctatttcatcattaatcacaatcgattcgcctttttttcgtccaagtacgagcatttactccgcctcctctgtgttcacttgctttaagagaggttctttgatgccatactcctgttttagtacaagttgttttccagtgcgttcttcggtgttaaatataagcggtgcttttaaattcattgtcgcttcttttaatgacccttgaacggtaagaatcgtgagcacgagcgcgtgggctggatcggatagatttagctgagcgagcgtgctgtcatcaaggtttacttcataatttgggtaaaaggaaaacggatccgcgaggaaaaagcaaaggccgctttcttccgttgattgtaaaaagtaaaaaggagactcatctttgtcatcggcgggtaatagacagtaagttgtaaagtgctcaaggccagggatgccactttcaaacgtgacgagacgttcttcggtgacgtccatttctccaaagcgtgcagtatgtaatttcatagcgatctcctttgttgatcagtgtgtaccttcattataaggcctatagcgcttttttccatggataatttgttgtctttttgaaatttcggtaaacttaaagtaacagacgaccgctgaaaaagaagaatcgtgtcgaagttttattcttaatcacataacgatcaacatgaaaggagaaagcgtcatgaagatcaccttttatccgctcggagaagcagctgtgaaatgctgtttccatgaagacatttcaactgctcttacgaataaaattcaatcgttttgtcaaaagcttcaccacaatcatgctggcattacggaatgggtacctgcctatgactctgtggccgtttactatgatccgtggaagctttcgtatcaagaaatcactaacgtccttcaacctatcgcgaatgaaattgacgcaaatcaccagaaaatcaatacggtgatcatcattccaactgtttacgggagcgactatggtccggaccttgaaaatctcgcagctgctaacaacctttccgcaacagaagtgatcgacttacatacgaagcgccactacctcattaatatgatcggctttttaccaggctttccttacttaagcggaattgatgaacgactcgcgatgccgcgccttgaaaacccaaggaagtctgttccagccggatcggttggtattgcggaaagtcagacgggcatttacccgctcgcttcacccggcggctggaatattatcgggcgcactccgctcaagctttttgatgctgaaaaagaagagccgtttctgtttgagcagggcgattatttgcagtttacatcgattacaaaagatgaatttaagcgcattcaacgagaaattgaggatggcacgttcgaacttgaacgcagggaggaatccgaatgacatttcgtattgatttaaacagcgaccttggggaaagctttggtacttatgtggtcggtcaggatgaacaggtgcttgagctcgtttcttccgccaatattgcatgcggctatcatgctggagacccgcatattatgaataaaacggtggaatgggcgaaagagcatcacgtaggcatcggagctcatcctggatttccggacttagttggttttggccgccgcaatatgaacattacaccagaggatacgtactctctcgttctttatcaaatcggagcactgcacgggttctgcagggcgcatgaagtcccgctacagcacgtgaaaccgcacggggcgctttacaatatggcgtcgaaggatcctgagctcgcaaacgccattgcacaggccgtaaaagattttgattcagagctgattctatttggccttgccaattcagagctcattcgcgctgcgcaggacgctgcacttccttatgcttcagaagtgtttgccgacaggacgtaccagcctgacggaacgcttacaccgcgcgttgaaaaagatgcgatgattcgtgatgagcaagcagcaatcgaacaggtgattcaaatggtgaaagaaggaacggtaacggccgttgatggctcgattattgcgattgaagcggatacggtttgcgtgcacggagacgaatcatcggcgcttgcgtttattaaggcgcttcggaaacggtttacagaagaaaatattgaaatggaaaggatcggaaaccggtgaagttattttcagttgaaaaaccaggattatatacaacctatcaagatttaggacgtgttgggtatttgaaatacggggttccggcatctggagcacttgatcgcttcgctcttcaggttggcaatattttagttggcaacgaacgaggtgcggcaggtcttgaggttacgatgcaggggccagaattaatcgcacaagaatcttttgtgatcgctgtaacgggaggcgatttatccccgatgatcaacggaaagcggataccgctctggaaatccgtccttattaaaaaaggacaggtgcttgagtttggaaagccacgcactggcgtccgcgcctacctcactgtttcaggcggatttcaatcaaatcaatatatggggagtcgctccgtttatgaaccagctggtcttggacgtccgcttcaaaagggagatgacctcgcaggtgaaccgagaaaacaaaaagcaggaaccgggctgtttttcaccgagattcctgattatgatcgtaatgttgaagtacgcgttgtgaaaggacctcatcatgaacaaatctcggataaggtcgtttcggactttttcgctatgagtcatgaggtgtcaccgcaatcaaatcgtatgggctatcgccttcaatctgagcttaaaacaaatcatgaagcgaacgttgtttcagatgcagttccaattggtggtattcagctacctggaaacggtcagccgatcatcctgcttgcagatcgtcagacaacaggtggctacacgcgggtcggaacagtgattggtcctgatttgccgctcattgcccagcttccacctggtgggaaaattcgttttaaagaagtaacggtagaagaagctcaaggtgcggcgaaacaggttgaacagaagctccgtatttgggagcgaatccatcgctaatgcaggcggaggtagctgtgaagctcgtctttcacaacctccccctgatcttgttcggtcatttgcaggtggtaatgatctccttcggcttcagcctggaaattgtaaaaacctttactatttaaatagtcgctcagatcttcaatcttttcacactgagagaacaaaattttattgcccacataatcgtcattcacataaacgttatacgtatgtgcatttttcatctcttccccttgattaaaaaacgggaatgtttccggcattctgtctccctcctttctttagggattactatcaatttgtccctccctgccgtttttatgttggtaaaacattcatatgcactagtatgttttatcctttaagcattcgggaaccttctttaacgtacactaaaggaggatgactcatggctaacacatatacgaagcaatatattaacggtgaatgggttacgggttctagtgacaaaactgtaacaaattataatccattttccggtgaggaaatttttacattaaactcagcatctgaagaagatctagataaagcgtaccaaacagcaaaagaagcacaaaaatcctgggcacagacgacaccaggcaagcgtcagcaaattcttgataaagtagcggcgctcatgacagaacgtaaagaagaaatcgttgactggcttgtgaaagaatcaggcagtacaaaaatcaaagcgaacgtcgaatgggcggcagccactcgcgttgtgaaagagtctgcctcattcccatatcgcatgaaagggcaaatcgccacttctgatacgccagggaaagaaaaccgcatttataaaagcgcgaaaggtgtgatcggtgtcattggaccgtggaactttccgctccatctttctatgcgttcggttgctccagccatcgcaactgggaacacggttgtcctaaaaccagcatctgaaacgcctgttacagcaggcttcctaatcgctgaactatttgaagaagcaggacttccaaaaggcgtgctaaacgtcgttgcaggacgaggttctgagatcggcgatgcgttcgtcacgcacccaattccgaagttgatttccttcacaggttcaacggaagtcggtcagcatatcggtgagcttgcaggtaagaacattaaggaaaccgcactagaacttggcggtaacaacgtgtttatcgttcttgatgatgcggatatcgatcaggcggctgaatcagcggcgttcggtaagttcttgcatcaaggtcaaatttgcatggcgatcaaccgtattatcgtgcatgaaagcattcacgacaagttcgttgaagcgtttaaagaaaaagtcgcttcccttcaagctggtgatccttctgatgcaaaaacagctgttggtccactgatcaacaaagatgccgttgagcgtatccaagaatctcttaacgcgtctcttgagcaaggcgcagagaaaattcttggcggcgaagttgaaggtaacgtgatgcatccggttattttaacgaacgtaacgaatgacatgcccattgcgaaagatgaaattttcggtgccgttgcgccaatcattaaatttagcacggtagacgaagcgattgaaatcgcaaacggttctccatacggccttagtggctctgtacattctcgtgacttaaaccgcggtgttcaggttgcgcatcaaatcgaaacaggtatggtacacattaatgaccagccggtaaacgatgaagcacacatggccttcggtggcgaaaaagaatcaggccttggtcgttttggcggcgaatgggctcttgataaatttacaactgtgaaatggatttccgttcagcaagaacgtcgtcaatatccatttttccaataagtagtagaaagccctcgatgcgctcgagggcttttttagtgcactccctttccctaagtaaaaatgagttacccgggaaataatgggagaatacttaaacggctatattgttgctttttattttcatttttgaaaaaatagagagagaaaaggggatggaaacatgattgaagttcgtgaagagaaggtacaggatcatgaggaaatctcaaccattttacaaaaagcgtttggtggagaagatgaagtcacgctggtcaaagaaattcggaagtctgcccactttgtccctgagctttctcttgtggcgctacataatcgacgtgatccagtcggctacattctttttagtgaaatcaccatttcaacggaaaaagaaagcctcacgtcccttgcgcttgctcctgtcgcagtcatgcctgagttacaacgggaaggaattgggagcatgctcattcaagatggtttgatgagagcgacttcgctcggataccgacacgttgtggtccttggtcacaaggagtattacccgcgattcggtttcgttcctgcttctgaaaagaacatctcggggccgtttgatgcaggagatgcgtttatggtgaaagaacttaaaaaggacgcgctgaaagagattagcggagaagttgtttatccgaaagcgttcggcgtgtaagacggcacacaaaaagccgctcttgggcggctcttctttaaaagtcaaaaattgaatcttcgttcgcatcatcgtctttcatcggttttgatggaagagattgttgaacgggtgcggcttgttggagcggcttaggggcaggtgcagaaggagtctttggacgactgcttcccgatgcctgaagtagcatgtcgcagtacgttttaatcgcaatgagctcttcacgaatgccgtttacgtctgcatcattttcttcaacgttataagtaagctgtttcatacgcgtattcatttgctgaatcagctgatcaatcgggatatctttcatatcggtaaactccttttagtgaaggatcttttatccctagtgtaccaaactacaaacgaaatgaaaaaaattaatttagaaggagattaaacaatggatactcttcatgaagtactgaaatttaatgaggaatttgttaataacaaggaatatgttccgtttgagacaactggccttccagataaaaaaatcgtcattctttcttgtatggatacgcgtcttgttgaacttcttccccgcgcgatgaatttaaaaaatggtgacgtaaaaattgtaaaaaacgctggtgctgttgtgagtcacccattcggtagtattatgcgcagtattcttgttgcggtctatgaacttcaggctgaggaagtgtgggtcattggccaccacgattgtgggatgggaaaagttaacccagatgagcttcttcataaaatggaagatagcgtaacaaaagaagtggtcgcttccatgaaacacgttggaatcgatcttcattcttggcttcaaggttttacaactgttcaagacggcgtacgcgatagcgtttcgatgatccagaatcatccactacttccaaaagaccttcctgttcacggacttgtgattgatcctgctactggaaagttagatcaagtaactgaataatgttaaaagcgcgctcctcgattgaggagcgcgcttttctactattatttcgctaaaaggtcagcaaaggcttttccgtactgtggaagatccggcgggcgacgcgcagatacaagatgaccatcaacaacaacgggctcatcaatccacgtagcgccggcattttccatgtcatcacggatgcctggcgtgctcgttactttctttccttctaacaccttagcagaaatcaagacccatccggcatggcaaatctggccgattggcttcttattttcttccatatgctgtaccatttttagtacttcagggaatcggcggattttatcgggtgcccagccacctggaacaagaatggcgtcgtagtctgcagggttaatgtcttcataagcataatcggaaacgaccggtacgccgtattttccaacatatttctctcctgctttctcaccaacgtaatgaaccgttgcaccttcttcaatgagacgataataaggataggttagctctagatcttcaaattcatgatgaacaagactaatgactttcttattttctaaacgcatacttccacctccactccttaccttataccatttttcttctatttcaaaacgattaacgttcagcatcgtaatcagaactgaatccagctcaggatagatctgcctttttaagcatgtattctctagtatggtcctgttcatctgggaatactaatgagaaggtaaaggagagataaccatggatgttggtcttttactggaatatgcctgggtgctactcgttttaatcggtcttgaaggggtgctagcagcagacaatgccctcgtcatggccattatggtcaagcaccttgatccaaaaaagcgcaaaaaagccttgttttatggacttggcggagcatttgtctttcgctttggctctctcttcatcatttcttttctcgtcgatatttggcaggtacaggcaattggcgccatttacttgctgtttctcagtttaaatcatcttgttaaaaagtttttcttaaacgatcgaaaagaaagcaaaaaggaaaagaattctcagcaaggggctggcttttggacaactgttctaaaagtagagcttgctgatattgcttttgcagttgattccattttggcggccgtcgccttagcattaacgcttccaaatacaaatttacctcgaattggtggcatggatggtggtcaattccttgtgatattaacaggaggaattgttgggctgattattatgcgattcgctgcaaattattttgtgaggcttttgcatcgtaagccagggttagaaaccgcagcgtttgcgattgtcggctgggttggtgtaaagctcgctgtctatacgcttgcgcatccaaacctcggcatcctcgcagaagattttccgaaagaaccagcgtggaaaatcacgttctggggtgtcctagttgccattgcccttggcggctggtttttatcttcagaacgtaaggaaacagaacgagaagacgagaatgaagatacgcttgaagaagaaaatgatgaagcgaatgatttttaattacgaaacaacaggtgcctaacttggcacctgctgtttttatgtattctgaaacgcttctcttatttcattcatccgctttttattaacacccatatctgagtagccggtccgagaagcggaacgaaaatgaatattttcgcttgctgtatcaatgtaaaattcgatatcatcaacgaatttaaacagctttgacttctcttccgctcgtatgtagtgtgtatcagcttctacaatttcggttcgctttcgattgctgagaattgtttttaactttgaaagtgcttcttctgccgtcccgttatacggaattggcttcatcccgtgcttctcgtcagtgctttgactcgatacgcagtttggtttatctggacagggagcaagtttcccttctttcacgcctaattgttctgaactcacttcgatcgcctccaataatctttttctattctatctataccctatcacttcaacatttgaacttattatgccttactatgtcttaaaaaagcagcacattgatgtgcaaatttctcgtttagaactatcttatagcgtgaatagtactcgtgtgatcaaaaaaacaggattttaatctttgaaggaggcaatattgtgagtagaccagtagtacgtgaatatcaaaatgatgagaaactaaaaagtgatatcgaggagctaagcaatatcggcgtctcaaaagatgacatctacgtgctttcccatgacgatgaccgcacagagcgcgttgcagacggtgttgatgcaaacacgataggcaaaaaagaaatgggacttagcagcctgaagaacgtatttagtaaaaaaggtgacgaactgcgcagcaaaatgcaggaaatcggattttcgaaagaagaatctgaacgctatgaagaagaaatggataaaggtaagatcttcatgttcgtgacggatacagataaagtaacggagtggaagtaaggaataaagaataagcaaaagccgctgattcggtgttgaatcagcggcttttttgcggtgatgcgcgggtgggtgggggtcaggctcgtggctgaccctcactgctttaaagtgttacactaacacccctattatttactgtgcctttatgaattccgtctaataggagatcactcactcttgttgtccttataaacgttcaacaattcttctaccttaattccatcaattgtcatgccttcaagctgagatttctcgattttcacacctgataagttgcaatctgtgatcgtacttccatggaggtcacatttttcaaaaagaagcggcatgtgctcttctcttcttccccctgcaaaatgatctttaggtggtaacccaatatttcgaaaaaccgcgccacccatttgtgcatcctcgattttcaggtcactaagatcaatatctcgaaatgaaattccactcatattcatatttgtaaatgtcgcttctaccatataagcatcagaaaatatcgattgagctaagttcgaattcatgaaattagcgttcgttaactccacttgatcgaataaggcactgcgaagacgcagttctttaaatacttttcgctcaaattcttccccaacgttttgctcacttaaattcttttcaaccatttcattcatctcctttttcatctttgctctagctcttcggatccgactctcaattgcagaggtggagcaagctaacatggaagcaatctctgccatcgaataccctcccatgtaatgaagaacaacagaagttcgaacatcttccttcagttcataaagcgcttgccaaacaaggtcgcttgtttctgtttctatcgtttcaagcaactgaaaaagagctttttcttgaaacgactgctccaccacttgtaccatccgctttcgttttctttttaaatccagacttaggtttgagcaatactcgttaaccagctacctaccttctctggattgtccagcgaatggcgcttcaagtaggcttttataaatgcttcctgcgcaacatcctgtgcgagatggtagtccccaagaacactataagaaacggcatatagcgcattcgcatagcgaattaccacctcccgaaacccttcttctgtctgccattctacaatcgattccgtcaacttgtttcacctcactagagctttcacttatatagacgtttctcatccatgtattccgtcaacaaaacgaaaatttcctcttattttgggccttgtcttttgtagggggacaaatgtatgtggagggggtcagagaggagccagacccccaccctaaaaaattagttcttcgctcggctccactcgcatatatttgtagggcaataaaaatatttctttcaaagggagtgctgatatgttggatcgaactttgcttttcgtagccgctatgattgctgggtttgcattacttcgtttgtctgaagcagattcattcctcgagagtcttaatccggtcttcgaagttgtgggctttctagcagcgctgctatttgcacttgtcttgatctacaaaggcatcatggccatcttacctcggaaagtgtaaccgctttccactcctgaaagaaacgaaaagcgggatcactgggatcccgctttttgacttattcttttggtgcaatcatatcttcaggacgaacgatctcatcgaactgctccgctgtcaaaagaccgctctcaagagcagattcgcgtagcgtagtgccatcttcatgcgcttttttcgcaatttttgccgcattttcataaccgatatgcgggttcagtgctgttacaagcataagcgaatttttcaagtaatcttgaatcacttcttcattcggctcaatgcctactgcacaattatcgttaaaggacttcattccgtctgcgagtaaacgcgatgactggaggaagttataaatgataactggcttaaagacgtttaattcaaagttcccctgactcgctgaaaaaccaattgttgcgtcattccccatcacttgcgctgctaccatcgtaagcgcctcgctctgcgtagggtttactttacctggcatgattgagcttcccggctcattggctggaattgtcagttcaccaataccacagcgcggtccacttgcaagccagcgcacatcgtttgcaattttcattaggtccgccgcaagcgcctttagcgtaccgtgcacgtggacaatttcatcgtggcttgtaagcgcatggaatttattttcagctgatgcgaacgtcttatccgtcattttgctaatttcttccgctaccatgtccccgaacttcggatgggcatttagtccagttccaaccgcggttccgccaatcgcaagttccttcatatatcttacactttcaagaagcatgttctcacacttcacaagcatgcgatgccagccgctaatttcctgaccgagtgtaagtggcgttgcatcttgaaggtgcgtacgtccgattttaataatatgttcattgtcctgcattttttgatagagcgtttctttcagctcaataagagcaggataaagatgatcctcaacagaaagaacggccgcaacgtgcagcgctgttgggaatgtatcattggaagattgagacttattcacgtcatcatttggatgaatacgctcttcacttccctgttcttgtaatagttcattcgcacgaaatgcgagcacttcattcatattcatgttggactgcgtgccacttccggtttgccacacaacgagtgggaagtgttcattatgatcgccattaattacttcgtccgctgccttcacaatggcttcagctttcacatcttcaagcttaccaagacgctgatttgcgagcgctgcgccctttttcaacatcgcaaatgcttttactacttcaagcggcatttgctcattgccgattttaaaattctgcttgcttcgctgcgtctgtgcaccccacattttatctgctggtactttgatttctccaattgtgtctcgttcaattcgataatccattgtgatcctccttcagagtataagctaacaggttccacttcgataaaaagaagagaagtcctttctcttcaaataaatttctaattatgacgacgctttcatcataacacactctccttttaccgggaatcaggagatgcgagcattttttcatagaaaaagccgctcatacgatgagcgacttcttttaagcattcgcaacttcttttttctgatcttgcttaatcaacaattgaagcgcaagtagggcaataaagagtccaagtccaataaggtctgttgagccttccggatagatgagcataacgcctgccgctacagctgcgatccgctcaacaatatgtgtgcgacggtaccagtaaccgatcatacctgcgccaatactgatcatacctgttaaggacgtaaatagaacccagagaaggctttgccacgtagtatcaatcatcatgagctcaggtgagagcacgaaaatgtatggaatgataaacgcggcgatcgcgagcttggcggattgcacccctgttttaagaggctctccccccgacacccctgctgccgcaaatgcagccagcgcaaccggcggtgtaatgtcagctacaattccgaaatagaacacaaacatatgcgctgaaagctcaggtacagataacacgattaaagccggagccgcaatcgtcgatgtaatcacatagtttgcggtcgtcggcgatcccattccgagaataagcgaggcaatcattgtgaagaaaagcgtgagcagcaaattttcccccgaaagagaaacgaggctattcgcaagctttaacccgagtccggtaagcgtaacgacaccaacaatcatacccgctgcagccgttgcagccgctacgcccagagccgttcgcgcgccgtttgcaagagcatcaataaaatcaccaattcccatacgcgtttctttattaatcgctcctacaataatcgcagataagattgcataaagagcggcacgcgtgacggacgtacctgacattaagaagaagataacagcgacgattggaaaaagaagataaatccgagcgagcacggcttttcggtttggcatttcatcttccgttaatcctcgtaacccaatcctctttgcttcaaaatgagtcataatccatattcctgtaaaataaagcaaggcaggaatcgtggccgctttcgcaatttcccagtacgtaatgcctccgataaattccaccataaggaacgccgcagcgcccataatcggtggcatgagctgaccacctgtcgaagccgctgcctcaacaccaccagcgaactcttttcgataaccgagtcgcttcatcattgggattgtaaacgagccagacgtaacaacgttcgcaaccgagcttccgctaattgttccctgaagcgcacttgagaagatcgctacttttgcagggccaccaacacgtttgcctgcaatgactaatgctagatcattgaaatactgcccaacccccgttttgacgagaaaagcgccaaagagaaggaagaggaaaatgaaggttgaagacaccccgagcggcgttcctaaaatcccttctgtcgtatagtacatggagcgaataatccggtcgatgcttaacccgcgatgctgtagaaatccaggcatatatgggccaaggtaagcataaagcaaaaagattgatgtgatgatcgtaattggcaagcctacaacgcggcgagttgcttctaacacaagtacaatcgcaagaaagccgacgattaaatcgagcgttgttaaacgcccaactctgaaaacaagttcttcaaagtttagcggccagtacattcccacgtacacgccaataatcgcaagaagtccatcgtaccaggctacctgaaatcttccttttgttttatcgcgcagcttctttttggaagctggaaataaaagaaaaataagtccaagcgcaaatgctaagtgaatggagcgctgtagctgggctgtaaaaacgccaaatatggccgtataaagctggaatacagagaaacctacaagcccggcaagagcgatccatccaatgatacccgtcagccttcgatgccctgcttcaggatcgaatttcgccattagttcctgcgtttgttcgtctgtcatctgatctttatcttccttcgttttcggaggctgatctttctcactcaagtacgttcactcctttcatccactgccataaactaatgttttctgattcaagatgaagccatgaccctggttcaataatccgacttaattcaatttctttatcttgaacaagaaggacgtggttagctacaacctgccccgttcttaggtcaataaacggaaacttccggttcatatctttgattttatagccatcttcatcttggacaaagcgttctccagcgtctgcatgagaaggcatcccgatcgcgaaattctcatatgccagttcatactgcacgatttcacctgattccgatacataatacgattcctgcaccggggttttgtgaacggagtgggtgtagcgaatgtcaaaattcgctggatcatcttcaaatggcacatacgcaattactttgccggactctcctttttcaagagccactacaggaaaaaacggataaagaaaaacgattaagatgagtacaatggcggtggacgtttgataaataaattgttttgttgaatcagaaggtttcatcgtaagaagacgcaggcttttcacctgcgtccgtcacatccttttttgtaaattcctacttactcgacacctttttcatcaaaatatttctttgcacctggatgaaggtcaatgccaacaccctctagtgcagaatcagctgtaatgaactccccttttgcgtgcgtaattttatcagagttatcaaagatcgctttcgttacttgatacacataatcttcatcaagatctgaacgagcgacaagcattgcaagaacggcaactgtttttacatcgctctcaaggccataagttccgcttttcaccgtatcttcagcatagtacgggtgctcttcaatcagcttatcgattttatcctgttcgattggtaggattgtcacctgcttttgtgcagataatccttcgactgcgcctgttggtgtacctgacgtaataaaggcagcgtcgattgtaccgtcttgaataccttctgttgactcatcgaacgcaaggtgttgcgcatcgatatcatccattgtaatatcatgagctgctagcacttgctccgcattcgcgtatgttccacttcctggcgccccgacggatactttctttccttttaattcatctacagaggcaatgccgctttcctcaagcgttacaatctgaattgtttcgggataaagcgttccaattgcctggatattgtctacttttccatcttcaaacattagttcaccgtttgttgcatatgctgcgatatctgtttgcgtaaacgccacgtctgcatcgccatcttggagaatctgcatgttttcaacagaagcaccagaggactgagcatttgcactttcaatatctgtttcatcttgaataatatttgcaagctcaccacctagaggaaaataagttcctcccgtaccaccagttaataaacttagctctgaaggggatccgttcgcttctccttctgaatcagcccctccacaagcaccgagtatcattgccatcgatagcacgatgacaaacaaactcatcaactttttctttcccatgccattctccccctttaataattagaaaatttcaaatttactataccatattgttcctgcaattggtacaggctgttcaagtacaacgcatcacaacaactctgtactaatacaaaaaaatccacgtttctacttgattcgttttttttcgactagaaatcttgattcaagtcctgtcgaaagaacacgaaatcgcataaaaacatggatttcaatttgtggttttttatcaatttaatcagatatcccccagttttgcagagttgcttgtagaaccatcgtctcaggggtaaaaataaatgtccatggtacagctgtgttcgcttgcaccgttagctcgtgagtaaaacgcttctcagctataagcgtattatgttcaaaataagacagcaaacggtcttcgagcttccagtcatctctgccatttacgatacagacagatgcgagtaagtcattccggtggttgaatgcaatccgaaccggaataaactgtaacttgccctcttgtatcggatgctttgcatatatctcctgatacattttacgatcgcgctccgcaatcgtacgatcccacttttcctcaaagatcagcgtcacgtttatcccccctacttttataccttttctctttcgcctctaaaactgacagatcatcaatcacatcatttaaagatagtaattcaaaaattacaatcatcttcccggtaaaatgatggcgaggatctgttgtttcatcccttgtgtcatccagatcgtgaaacaactgatcaagcttttcaatactttctaaatgcgcttcagagttctgtgttgaagggttatgaaacgctttagaaatggaacgacctgcttcaataataatacgatgatcgtcttgatcaattgtatttttcgtatcggtaaacagcatattgccaaggtgatataggattttctgtaagtattcgagcttttttagaacaactgaaaagttacgcacttcgtgaatgctgtgcctgcgatatttccactcttctcgctgatatgaaatcaatttatacgttcgttcaagatcgcgacttaatcgctggtaaacaagcgtctgtcttttggcatgcggaagatcaataataatttggtctaataaatcacctgcattccgatacaggcgcttgacggcttgattgatcatcgtatggaatttaggaggcatcacaaaatagttaacggccgttgaaacgacaatgccgattaacgtcgtactgagtctgcccacaaaagaggtcatataatcgcctgttgtatctggaatcatcgctacagctgtgagcgttgcgacgagcatcccgtcatcgagcccaagcttatgacaggcgattaacgtgaaggttgcggctaacgcaaacgtgaagggcgattgatgtaaaaaagattcaaacagcatcgcaaatccagcgccgatcgccgcggcaggaaagcgcacaagtccttttttaatggaatcagatgccgtcggttcaacggttacaatcgcggtgatgaccgcaaaaagaacaggtagtccaagcgcatcacaaatccaggcggtcagaaatgccgccagtcctgtttttaaaatacgtccaccaacaaatttaaatactttatgcttaatgtctatcattcgtatcagtccgtttctattccttcattataacgtacgctcacggtttacatgaacccattttccacttattgtgtaattaattcagataaaaggagagcggttatgaagcagtatgctggcattgacttatcagggccatcaaatacgaaagatacgtcactagcgattttcgaggggaacgctgcgcaactttcatttgtgcagctatttgaaggcgttacggatgaaaaaatctatgagcaattcagaggcaagaaagaagtaacaataggaatagatgcgccactttcctatcaaccaggtggcggcgatcgtccatccgaccgtgccctcagacagcggattgtgaaagccgggatgcgaagcggctcaattatgacaccgacgatgacgcggatggtgtatttaacattaagagggatttcgctctccagaggtcttgaagcgaatgcacatatcgtcgaggttcatcctggagctgcgattggattacgcgcgcgtttggaagccgttctcgcctacaaaacagacattaactcacgctttgagctaagaaactttctcgagagcgaagggatgaccggaattccagaagaagcgcttcagtctacgcactcttttgatgcctgcctgtccgcgtatgctgggtggaaatggcagcaagggaaatcgaaatttttctatgaagcgaagcccccgtttcacccatttgatatgagttgttaacataagaagctttaaacatacgaaaaaaccctgcgtactagttacgtagggtctcatcaaagacttttggaacgacgtcgcgaacgacaatataaaatattcctataaaaaatgctgtaattgccatcgcaaatgaaggaaacacatcccattcacggtccatgccccatccactgagcatcgctcctgaaaacgtgccaatcatatagcaaaacggaatccaccatttcattttgactatcacctcagaaatgatataccccgtttcgacaatttacgaaccttttttagagcatttcctcgatatcttcctttagttcacccggctcagtcttaggttcatagcgttttacaacctcaccattttgatttacgagaaattttgtaaagttccaaggaatatcaccgtgttcaatgccaggcgcttcctgggttaaatatttgtatagaggatgagcattttcgccgttcacattgattttagcgaacattggaaaactgacgccatagtttattgaacagaattcctcaatatcttccttcgatccaggttcctgctcgccaaactgattacagggaaaaccgagaatttcaaacggcttgtcttcaagagatgtatatagttcctgaagcccttcgtattgcggtgttaatccacatttgcttgccgtattaacaataagaagaacctttccgctatattctgaaagcggcatttctttcccttgaagcgtttctgcagtgaatgaatggacactcatgttacccctcctagtaattgtctcaccccacttttatcatagttctgaatagagtgctagcatttagcgcgctcgagcaatgattccattatgcaccttaatatagccgtgcctaacaatatccatcccgttctcataagcatagagccccatctgacggatatccataagctcacgatacgtatgattcatcatatctgccatgacgtgataataaatacgcgacttcatctggttgcgaggcgtcgtcatgatcacatacccattatccttcacaaacttccgatgccagtctagtatcgctggtttatgctcatcaggtacatgctcaagcaaaccaacgctcaacacaatatcaaactctttatgaaaatcgaggtcgcggatatcttttacaagatagctaatattcatctgatctttgtaccaaacttttggcccgccggtttgtggatttgtaccgagaaaaggatacgaatttggaaaatgaccaaaacgatccgttttacaaaaagcatcatagtcgaccatgacaacttctccacctggatacatcgcatgaagctgcatcgcctcatatccttccgcagcgccaagaaagagaatacgagggtttttcacatcaagcccttcaaaaagagcccgctttcctctcggatcccagattccatcttcaattcggtgcacatagttccaaagagacaggcgaaccatctcccctagcccatgcttcacatcgcgtagatgaaagcctttgaaactatcttttagagacgtttttaaccgctgctgttcagctggaacatcctgcatgaaaaggttatggaacgagcggttaaagtactcccaagacgttttgaccggcatatcctgctcatgctccgcttcccaatctttccgttcttttgcaagcttctttacttcaaatggccttcctacctgtttccatgacagttctgaccagtcacgaacaacattggcatttacaaaacgatccaactgttcattacgaggatttcttaaatcaacgcgatagcttggcatgagcgctgtgtactcaaagtcctgttcagaaaaagggtgttcgggcgttattgaagcaagttccaattgcgtcactccccagtttttatttattttctcacggaagcgctttcattacaaatatttcgcgaattatcagatgtatttttcttaagaaaagaacccattctggtgatataataagaagattaacaatgcaggagttggaaaataatgaagattgttgtaagtacgttaaatgcgaagtttattcacacatgtctcgcattgcgttacctaaaagcctccgctgcccctgactacgatgtacagatggcagaatatacgattaaagatcccattatgaatatcgttagtgatcttcacagtatgaaagctgatgtgattggctttagctgctacatctggaacattgaagagaccattcccgtcattgaaatgttaaaaaaagtgaatccttcccttacgattgtacttggcggaccagaagtgtcatatgatgtgtatgagtggcttgatcgcattccacaggccgactatattgttatgggagaaggagaagtgacgtttaaagaacttcttcactctattgaaacgggcagctctgttgaaaatgtaaaaggcatcgcttatcgaaaagatggagagaaccaaattaatccaccagcaccaaagcttagcctaagcgaaattccatctccgtttcgattcgaagaggaccttgctgatctcggtcgtcgcgtcacctatgttgaaacgagtcgcggctgcccgtattcctgccagttctgtttatcttcaattgaagtcggcgtgagatacttccctgtcgaacgaatgaaggaagagctgcgcttcttaatggacaatggcgcaaaaacgattaaattcgtggatagaacctttaacattagacgaaattatgcaatcgatatgttccaatttctgattgatgagcatcgccctggctgcgtcttccagtttgaaattaccgctgacattatgcgtcctgaagtactcgaacttctcaaccgcgaagctccgcccggtctctttcgctttgagatcggaattcagtctacaaatgacgcaacaaatgaactcgtcatgcggaaacaaaattttgaaaagctcgctagaacggtgacgatggtaaaagacgggggtaaaattgatcagcaccttgatttaatcgctggccttcccgaagaagattacgcttcgtttcgtaaaacgtttaacgacgttttctcatttcgtccagaagagcttcagctcggctttctaaaaatgctgcgtgggaccggcgtacgactgagcgcagagaaacacggctatctttacatggacaatgccccttatgaaattctcggcaataacgttctttcttttgatgacgttattcgcattaaacaggttgaagatgtgctcgaaaaatactggaatgatcaccgaatggatacaacgattgaataccttgcaacggaggtttttccatcgccatttgatttctttcaggcatttggtagctattgggaaggaaaaggctggtctcgcatcggccatcagcttgaagatcttttccgacggctcgctgattttattaagatgcatgcgcctcatcaccatgaacatgtatccacgctaatgaaaatcgattatttatcaaactcaaagcaaaaaccgcggaccgtttggtggagcgaccggttagaaaaagagtcagaagccgctttattgaagcttgttagcgatcaacccgctatccttggctcttcctaccaatcagtaagtctatcagagcgagagcttcataagcacactgtcattgaacttttacctcgttctataaatgggcaagcagagcaaacgattttacttgttcactatcatccaaagacgaatgaacggaacttattttatggaaaacttcctgccgattcttctattgcgatgtagactcaaaaaggcatttcgatgttttcgaaatgccttttccattgagtcaatgccccaaataaaggattttatcagttcaagacgaataggataactaaccaagccggaggataggccggtaaataatggagggatagcatgagactattagaaatggatgccctgtccctgtcgaagaagatttccagacgcgaaatttcatcgtaccatactgttcgtacgtatattgatcatttaaatacgattaatcctatcctgaattgtcttgtagaagatcgctttaatgaagcgatcgaagaagcaaaaaaagccgattatacccttacgactggagaagccaaaggccgattattcggtgttccaattagcgtcaaagaatgtttccatgtcaaaaacatggcgacaactggtggcctgagctatcgagcaggctcacgagaaaaggaagatgctgaagtggtgaaacgtcttcgggcagaaggggccatcctattaggaaaaacgaatacacctgccctttgtttttgtcaggaaaccgataacaagcactacggtcgaacgaataatccgtgggacgtgactagaaccgctgggggatcaagcggtggagaaggagctttaatcgcatcagggggcgccgcagttggacttggagctgatattggcggctcgattcgcttcccgtctcactttaatggcattgtcggctttaaatccggcaatcgccaggtatcacaggaaggaaattttccttacatcgataagcccgagcaggaacgcatgcttggcatcggcgcaatgagtaagtctgtccaggatgcaaggttaattaatgagattattgcttacgaaccgccatcagcacgaaatctcgatgattttaagcttgtctatcctgttcctcatcatcgctatccaattaatcgagaaacctttcagttgattgctagcatcagagacgcgtttgatggagaacttgctgaagaacaggcaaatcctcctttttttgaagaagcggctcatatgtggcaacaaatgatgtcagttgacggtggagccgatatggctaaactcatgtcagacaatgagaaagctagtccattcagtgagtttatgaaagaaaagctcttccgaagttcagatgtccattcttacctttcctgggcgctcatcggcacaaaactttttaaaccgaatcaaaaacaaatgaaacatattcatacatcactaaaacgtggagatgaactattagatgattacttggatggccgaattttaattatgcctgtttatcattcaccggccccgccacacggagaactatatcaagagctgttctccattcggaaaacattcttaaactacatgccatacattgcttatgcgaatgtatggggacttccttccctgaccataccaattggaatgagcaaggaaggtcttccgattggtgtacagctcgtaagtcgggttggtcatgaagaggcgctctttcagctaggtgaacagattgagcagcgcatcggtggttatcaacgctgtctgaaacacgattctaaaaaagaagaggttgaggcagaactcgtttaagttgtcgggaggattgactacgaattgtttacgaatcaacacacaaagccttatcttgcaattatgatcgctattttatttatttccacttccgctgtcattgtaaagctcgcttcagcaccagcttcagtcatagcgatgtaccgtcttgctatcgcgattctgatcatgttgccacttgtgctacgaaattatcgtgattcatttagacaaattaaaaagtcagattgggggtttggtagtcttgcgggcatcagtcttgcatttcactttatcctctggtttgagtcattaaattacacgtctgtcgcaagttcagtcgtgctcgttacactgcagccgctgtttgcctttatcggaacgtatttgttctttaaagaaaagctcacccttctagcgattgctggaggggtgacagctgtggcaggatcgattgttataagctggggtgattttcgaattagtggaatggccctatggggagatcttcttgcccttactgcctgtgcaatggttaccggctaccttctatttggacaaaacattcgcaagcgtttggaccttattccctatacgttcattgtttatggaatcgcagcactgacgcttatactttataacgttatcttacgctaccctttcttctcgtatcctacttcagactggggatacttccttttacttgccatcttccctacgttgcttgggcattcactccttaattgggcagtaaagtgggtaagcgtgaacgtgatttcaatgagcattctatttgaaccaatcggcgctagtattctcgcgtattttatcctgggcgagaagctgcacacgatgcaatgggtcggtggcgggattattattacaggtctctatctttttattagaagctacaaaaccaaaagaaaaccgaaaaaatagccaagtgcgccccttatgggcgcgcctggctatttcgacatcattcgagctaaagcgggcggtccctgtcaccgtgcctttggacacgtcttacagcacgcgccgccttctgaaatttgatcatacaagcagcacgtgcggcggaagcggattggtccgtcatctcgctctactttttctgaataatacggcatgaacgggttcgcaccgcacgtaaaacttgtgcagttaaactctttcagcaggtaatgaaagtcttctctcgatcgacttacctgctccgcattcccttcagagggaataagtgtttcatagacccaaaaaaggtaaatcgccgcattctcccaaagaatagctgcggatagtttcgttgcttttaccatcgtttctacgaatggagcaaggttctcattaatgagcttattcgcaagctctgctctaatgtccgcccgctccttttcactactcttcaacgaattcgggatcgttacctgcatcaccgccgcttgagtattcatggcaatctccagctcatccggtccggcaaggatcggtttatcccacatcgtaaaggcgtatagaatcggcgctaatgtcataaacccatatcgcttcatgaactgtgaccctgcgacaatcaccgatggaaagtggccttctgagacaagtcgttcaagtaacgcttttaactgttcggaatccaaaagttgttgagcagtgtgttctccttttccaccaaacgtaaggcgcagttgctctaacttctctttctcctctctgctaaataccagttgctcttgcacgatggaccttcctccctttaccatgtggcacacaaagcggcgtcccaaatagtggatcttcaataatgtcacattgaaggccaaatacatgttccacaagatcaacatttacaatgtcttcaggcttcccctggtcataaatgcctttatcttttactgcaataacgtgatccgcatagcgacacgccagatttaaatcgtgcaacaccatcaaaattgtccggttatcttctttgtttaattcaaatagtaaatcgagcacttctacttgatgcgcgagatcgagatacgttgtcggttcatctagcaaaataatgtccgtatcttgagcaagggtaagggcaatccacgcacgctgacgctggcctcctgaaagcgaatcaacatcccgttctgcgaactcttccatatgcgtcgccttaagtgctttttgcacagcggcttcatcatcctcagaccactgactgaaccaggattgatacggataacgaccctgtttcacgagttgcagaaccgtcagtccttcaggggcgacaggggattggggaagaatggccattttccgggcaatttctttcgttggcttatttgagatcgcctctccatccagaacgatgccacctgaatgcggctttaaaagacgggcaagacttcgtaaaagcgttgattttccgcagccattcccaccaattaaaacgctcatctctccttttgggatgagtaagttcagctgatcaatgaccgtttgttctccatatccaagcgttaaatctttcgtttgcagtgcgtacatgccgccacctccttatttatttctcgaacgatacaataaatagataaaatacggtgcgccaatcgctgccgtaaacacacctgccggaacttcaagcggtgaaaaaagcgtgcgtccaattaagtctgcgatcatgacaagcatgcttccgacaagggctgagacaggaacaagcacaccaaaagaagcgcccactaactttctcgcaatatgaggtgccattaagccaacaaagccaacgccacctgcgaatgcgacagcccctcccgcaagagccgtactgattaaaagcagaacgatgcggtcttttaaaagcatagcgcccgctcctcttgccacatcgtcgccaagctcttgtaagttcactcttctagagtaaaccatgagcaaaatcatcaggattaccacccatggtaagagcgtaagcacatcctgtccattcgttccatgaacgctccccgtaatccatatgttggcatcagacgctcgataaattggtccaacgatcattaatagcgttgttagtgcttgcagtaacgccgttaagccaattccaatcaggactaatcgaatcggtgaaatgccgtttttccaggataaaataaatacgagaaatcctgctaaaaccgctccagtgaaggatgcaagcggcatccactgaatgctaactgttagcgcattcgccttatcactaaacactgttagaaagccaattgtcgcaagcgcaccgccccaagtaataccgagaatatcaggagaagcaagcggatttcgaatcatcccctggaggatcgctcctgacacggcaagagcagctcctgctaaaatcgccatggcaatcctcgggaagcgaaactgttttacgacaagctgattcatttcatcaccatacccaaacagcgccttaaccacttgatctggtgtcataaaaatctcaccaagaccgatactaaggagcgcagttacgataaccgcaccaacgaggccagcgatcacccataatgcacggcgatcgagtaaaaaagaaatagctttcattcgaaaggaagtgtatttcgtcatagctgtttaaactcccttcgagcaatatatataaagaacggcgtaccgattacagctgttaatacgccaacaggcgcttcaagcggcaaaataacataacgtgccgcaatgtctgcagatagcagtaggattgcgcctagtatcgcgctatagggaatgacccagcggtaatccgggccagtaaaaaagcgagccacgtgcggcaccacaatgccgataaatccaattggccctgctacggctacagaaccgcctgcaagaaatacaatgaaaagtgcagcacccgcttttacaagaagcgtacgttggcctagcccttttgcgatgtcttctccgatgacgagcgtattaatttttgtactgataagaagtgcaccaattaaaccgattccaatatacgggagcacagaataaagcatggctagactacgtccttcaatagacccagcaagccaaaagagaacgtcttcaagagccttctcatttaaaacaagcatcccttgcgttaacgaggagaacatcgctgccatcgctgcaccagcaagcgtaagcttcatcggcgtaagtccttctcttccaagtgagccaagtacgtaaacgaggattgaggcgaacgctgctccaagaaacgctaaccagctaaacgtcgtaagtgaggaaacggaaaagaacgtaacggcaatcacaatgacaaaactcgcccccgcatttacgcctaaaatcgacggtgacgcgagagggttacgtgtaattgcctgcatgagcgcacccgcaacagctagacttgcaccaacagctgcgccaattaacgctcgcggaacacgattttcaataataataatatgtgcattgcttccatcaaattgcgtaaacgcccgccaagccgttgcccatgtaatactcgttagtccataaacaacgcttgcgaccatcaatatcatgacaagaagtaagccaatcacaatcccgaaccattttctatttactgaatgtaatttatgtgtcataaaggttaatccctttcttcatcatcctttataagtgtaaaaaaagaatgaaaacgtgtcaatgaatttgagaatcaatctcatttaactattgactcttgtgtgacaattcagtatgattacatcgtaaatgaaaacgattatcactaacaaggaggaaatacatatgttcaaaaaaggttggctcatcgtttgtctcgcggcatttatggttttagctgcttgtggaacgagcggaaataatgaaaatagcagctcaggtgacaaaaaggaagaggaaacaacccgtacagtcaagcacgcgatgggggaaacagaagttccagagaatcctgaaaaagttgttattttaacaaatgaaggaacggaagctttacttgctatggatgtaaaacctgtcggtgcagtgcaatcatggctcggtgatccttggtacgatcatatttcggacgacatgaaagacgttgaagttgtcggaacagaaagtgaagtaaaccttgaagcggttgccgcattaaaacctgacctcattatcggaaataagcttcgtcaggaagacatttatgatcagcttagcgcaattgctccaacggtttattccgaaacgttaaaaggtgactggcaggagaacttcgagttttatgccaaagcactaaacaaagaagataaaggcgaagaagtaatgaatgcctatagtgatcgcattgattcaatgagcgaagagcttggtgatcagctagacaaaaaggtttccgttgtacgtttcctagctggccaaacgagaatttactacaaagactctttctcaggggttattcttgagcagctcggctttgatcgtccagaatctcagcaaaaagaagatttcgctgaagaagtaacaaaagaacgcatcccagaaatggatggcgacgtcctcttctacttcacatatgaagctggagacggtgaagcaaattccactgccgaagaatggacaaatgatccgctctggaacaatctacaggttgtaaaagacggaaatgttcatgaagtaagtgatgcgatttggaatacgtctggcggagtactttctgctaacttgatgctcgatgacatcaaagacgtctttttaggtgaataggatgtaatgaaagctcggctaatgccgggctttttttgattatccttttacaaataagggaaatgattcaggagaaggttttcttttcgtaagaaagtggcaagaagacaggttctcatcaggtatactaatagaaagacatataaggaggggataaatcgatgccaaatgtctggacacatattttattcggtgaagaagctgcgatggaagccggcatatggaacacgatcaaaggtgacctgcatttctttcgacttggtgctcagggacctgaccctttcttttaccataatttctggccgtggaaaaaaaataagccggtgcaggaagttggttctgttctccatcaagatcattgcggcccgttcctcatggaaatgattgaatatggaaagcaagacgatcctatgctgcgagcatatattcttggctttgtgacgcatcatattctggatcgaaacactcacccctatatccactaccgttctggtcttgaaggcaacagacatcagcagcttgaaattattattgataccattttgatgaaagaatataaagatgtagaaacatggaaaacccccgtttatcaagaaatccaaattggaaaatcactctatcctcccattgaactgatgctttatgaatgtattcaatccctttatcctgagactgctgaacgcatgccggaggattacattaaccaatcttatcgcgatatggtgcttgcccttaaactattatttgacccgcacggttggaaaaatcagcttttaaagaaacaagtctcctccttttcttatcgaaaacaaatcggcgatgaagattatttaaatcgagaaggaacaccatggattcaccccgcagtgaaagacgaggaatcaaccgcaacttttgaagagctgcttgagcaagcgaaagaagaagcaacaaacatcctcccccttatccatgactactggcacaacgaagaaaattgtatgaccgaactgaagacacaaattggcaaccgctcttatgacacaggaaaagacagcacccttccacttgaattaaaacacttcgatcccattttgtaaggggtttcatcatataaaaaggctcagagcaggtggatgtgctgctctgagcctcatttgtggcctgggaactgacttttacgttcgaaaatcgcggaattccgcgattttctggataattccgcgatatttcatttttttccgcgaaaagtacgattaattccgcgaatttcagattttttccgcgattccatcaacccctacacatccagcccttcatttgccctaacaaccttcgcctgctctttcccttgatcgatgtttactttgttaagtaaatagatacccgctaagaaaaagacgacgagtgaaacgataccaagacggcttgatccagttacttggccaacgaaggcaaagagaaaaggaccgaaaatcgctgaaaatttagcagaaataccgtaaaatccataaaactctgcatgtctgtgatcgggaaccatgcttccaaagatggaccgacttagtgcctgagcgcctccctgaacgaagccgaccattatggcaagcagatagaaatgtgttgcggttgtcataaaataaccgagaaaaacaatcccaacgtaaatccacagtgcgagcataagcgctcgcttagggcgaatttttttggccaagtagccaaataaaaatgcgaagggaattcctacaaactgcgtaatgaggagcgctgcgattaaatcattcgcatcgatgccgatatccctgccataaatcgtcgccatttttataatggtcgatattccatcgttaaataaccagaaagcaacaaggaaaagaagaagctgtttgtagtggtttaactctttgaacgtcgtgcgaagccttttaaacccgatcgtcgcataggagccgcttaatttgggctgagtatgctccacttctttcacgtttttgaacattggaatggagaagataaaccaccatacgccaacgcttgcaaatgaaagttgcgtcgcgacaagcgtattcggaagaaaaaaccaggatggatttaagatcatcatcagattcacaagaaggagcagtccaccgccaatatacccaaacgcataacctcttgctgaaatgcggtcgatttcttctccttttgcgatttccggtaaaaacgcatcgtaaaagacgttgcttcccgagaaaccgatcgtaccaaagattaatagaattgaagcaaacaggtagcctccctcgccaacaaacgccattaaaatgcttgcgatcattcccatgtaggcaaaaaagcgcaaaaatacttttttagaattggagtaatcggcaatggcaccgagtacgggtgccagaatcgcaacaattaaaacagcgatcgattgcgaatagccccagtaagaagtagcaagactttgatcaatgttttttgcagcaacatcataatagaaaacgggtaaaaccgctgccatcattgttgtagcaaaagcagaattagcaaagtcatacatcatccagctacgaatctcttttttcctcatctctttgcccccatgatgttcgttttctttcagcatagcaggtctcggcacgtcgttcttcacactggaatattcttcataatacttttacaacgagcaggcttgccacacattgttgctgcgagtacactaacggtagagtgatgaaacggaggtcgtcctatggaccaaaatgaaattcaaaacaaagtgattgaaaactatcagcgtgatgaaaacatgatgattctcgtctttgcccagtggtgcgtcaacaatgacttgaatccagaaacgctttacgagaaagcttatcctgatcaaatcaataaccctgctctcaagcaaagcatcgaactcgtggtaccgaaagaagaatcagaacatatccctgatcaaacggtaatgggcgtcctttccctattcggtaatgatgatcttgcatttgtcgtatctgaagaaatcgaaaaacgttcaaaaccagagaaatagttgtttcatagagtttattcgataggagagagaaacttccctttaatctcaatgaaagacccggagcataggctccgggtcttcgtttagtttgcatcgcgaaataactttacgagtgcctgcgtgccactatcttcttcgccacgctcagcaagatcttcatataatttcttcgacagttcaagtcctggggttagcattcccatttgtttggcggactcaagggcaatcgtcatatcttttataaaatgctttacataaaacccaggctcgaagcgattggagatcattctgggtgccagattgcttagtgaccagcttccagcagcaccgaattcaatgctctcaaggaccgttgtcggatttaatccagctttttcagcataaacaatcgcttcagaaacaccaatcatgttgctagcgatcgcgatttggttgcacattttcgtatgttgccctgctccagctggtccttggagaacgatattttgacccattacttcaaaaataggctgaactttttcaaagacttctaattcgccacctaccataattgataactttccttctttggcaccaacgtctccccctgatacaggtgcatcaagagcgtagaggtgcttggacagagcatgctgatagatttcttcggctagcgctgggcttgaggttgtcatatcaattaaaatagaatgcgctcgtgcatgttcaagcagaccattctcacctatgtatacctcttccacatctttcggataaccgaccattgtgatgatcacgtcagccttcgcggccacatccttcacttcgtcgtaccattctgccccttcttgaatgagggcttcagccttcctttttgttcgcgttgaaataatcgttcggtaccctgccttgatcaagtttcgaaccatgctttctcccataacgccgattccaataaaaccgagtactggctttttctccatggtaaatcgcctctcttcccagaatttccttttctaacacttgtcttcatcgtacactaaaggagaggtgaattcctaatgaaaacaagtagttttgccggtatatttatatgggtagcgttcgttgtaacaaaattgatcacaaccccgatcgatacgcttcaatatgtgatgattttattaatgttcgcctacctggtactcgttccgctaacgctgaatctcgtaccgcaaaaaaagaatgttttctaccattatgccacccgtttgcaacttgtttcagctgtactagcgggcatatctttctttcttgaacaaggaatgttagcggttctactagccgttccatggttacttacaaccattttaatcgcgctttatggattcacgcgcctcctgcaaacatggaaaaaaagtacgatttttgatgtgttaatccaacttggattgatgtacattagcatcggtggactctggcttattttgcatcgatcaggtgtgcaaattcttcattttagcgatgtcatcgtactgcttacatctattcattttcactatgcggcatttatcacaccgatcacgatggcgttcattgggaaacgtctgcttgcaaaagctcctaacttaaaaccctggtttaaactgatcgccatccttgtcttatttggcccaccgtttatcgcagcaggaattacgttttcagatacattacctgttcttgagtttatttcagtcgttgaatttgttacgccgctgatcgtcttttcaattctttgcctcgtctacttagtgccaacacttgaatattcggtgcaaatgctgttgtcaatttcattcgcctctcttctgttttcaatgagctccgcgatgatctatgggtttgctcatattaacgaaacggtgattctcggcattcctttaatggtcttttttcatggattcgtgaatacattcggcttttcactctttggactacttggcgtaacagcgatgcaggagacgaagcaaatcaaaaaaaccagcctctcaatgtaaaatgtgagaggctggtttttcgcctattttatatttcttaaggcgcctgcaacctttgcaacgcgtgcaccaaggcgggaagccatcgttagttcagcttcaactggggttctggaaccatcgccacccgcaagagttgaagcggcataaggagagcctccaatgccatctgttgttagctgctcaggattctctccatatggcagcccaacatagatcaaaccaaagtgcataagcggaacaaacgttgtgagtgctgtcgtttcttgtcccccatgaatcgaagcggtacttgtaacaaccgccgtcgctttcccttctaattcaccattcatccaaagtgatcccgctgaatcaaggtattgtttcatttgagcaggcatggaaccatagcgagttggtactccccagataatcccgtcagcccagcgtaaatcatcaagcgtcgcttcgggaatactgttctgtgcttcttgtgcttcaacataaggtggttgatccgacatcgcttgtttcacgacatcaaattcaggtatcttcacgatcttcacttctacatctccagcgccttttgcaccttcagctacagactgaaccatttcgtaaatatgaccatacgcgctgtaatacggaattaaaatctttgtactcatttttccactccttttcactcggttcgtttcgtttgccatttactttgaattcatttatctctacttcaagatatacccttttcatcttaattcaaacatttaaaagggtgaaaatggataaaaaaagagaagcttttacagctcctccgcgtagtgacccaattttttcagtaatgtaatagccgtttctttctcttgttcatccaatccggcaaaaatcgattgtacttgtttctcatggttaggaaaaatacgatccattaactttctaccttcatctgtgataacggcatgtgtgatccgacgatcgttcgggcatggattacgcgttaagtacccttttccttcaagcttatcgaccacatacgtaatacttccacttgcgagtaaaattttctcaccaatttgctgtagtggctgattacctttgtgataaagcaattcgagaacggcaaattccgttggattcagtccatagctttgaatatctgttttaatatgatcggtaacagagcgattcgatctagccaggacaatgaatagctttagtgaaagatcgcgatctttttcattcataacgttcacccttaacttctaatatcttgaattcgagataattatacttaattccaattccttctgtcaactctttcaaaaaagaaggtactatttttcattaacagagtgaatatgatcgagcagctgttgaaatcctgttagtgctttcttgaattcttctttcgataaaccactatttgccgccatcgcgtcaggaataatcgatgctttatctcttaactcttccccttttgtcgttaaatgaaccatcactcgacgctcatcttcttttgaacgttctcgtttcaacagacccgcttcttccatccgttttaacagtggcgttaacgtaccggaatctaaataaagttcggcaccaagagcttttaccgttgtttcatgatgctcccaaagaacaagtaagacaagatattgcggatacgtcaggccaagctgatctaaataaggacgatacatcttcgtaatttctcttgaacaggcatatacagaaaaacagagctgattctctagttttaattgttcattatggttcatagtaaccccttctttacaataagttgtgcacaatcaacttatcccgatttagccgcgttgtcaacatgagcgtttcctaactttttacaagaagaacgagttcccctttgttgacagataaaaagtgttgcggtatatttgatcttgtaaaatttaattgtgcacaattaaaataatgaggaggaattttattatgaattcactatacacagcaaaagcatctgctcacggcggtagacagggtaaagtagaatcttcagacggtgtgatcaacatggatcttcgtatgccaaaggaacttggtggtcagggtggagaagcaacaaaccctgaacaattgtttgcagctggttatgctgcttgtttcgatagcgcgttaaacatggttgcccgcatgaaacggattaaaattaaagatacggtagtcgaagcccacgtttcgatcggaaaagaagaagacggcgcatttggccttagcgcgaaactacacgttacgatccctggcgttgatcaagcgactgccgaggaacttgtcgaagctgcgcaccaaacgtgcccttactcaagagcaacgcgtggaaatatggaagttgagctagagacaatcgcgaaataagtgaattgcgaaagagctgccgatcgtcggcagctcttttttaaggtttggccaataaaaatggaatttggctactatccactcttccacccaacagttcacctttatttctacgctaaaatcgctatactagaagtagattagtggaaggtgtgatgaatttgctcaccgtttcagaatttgatggggttcaagcggtaaaaggaacgtttcaacttgggggcgttcgaatgaatgtctatatgtaccttgttgacgaacttttaatcgactgtggcccaagtcggcttcaaaaagaaatcagtgattttctttcaaatgaacgttatacccaaataatcttaacgcatcaccatgaagatcatactgggaatgcctcaatcgtacctgcgtcgattccaatctacattcatccgaccgggatccctctttgtcgcgataagcctcatcttccactgtaccgaagagtattttggggatctagaaagccttttacgccacagggaattgagcgtcgcattaaaacgaagcatcatacatttgaattgcttcatacgccggggcatgcgcctgatcatcttgctctacttgaacagaatcagggctggctgtttactggtgatctttatgtgatgagtcatcctaaaagcatttttgcgtttgaatctataccggacgtgattcaatcccttcattatgttttacgttatgattttgacaccgttttttgttctcatgcgggcgttttgcaaaatggacggaagcgactggaagaaaagcttcattatcttcttaccatacagaaccaggttctccaaaaacacagcgatggaaagcctgcctctgtcattcagaaggaactttttcctgatcgacatgtcctcaattacttttctctatttgagaattcatccaagcatattattacgtcgatcttacataaaaacggattacaatagcaaagctcacgtctctcctccttaaagtttgagacgcgagcttttttctatatattggtcataccagtaaatgatatttctcccctgtttctttgctaaatacaaacgttcatctgcaagcttcaaacaaggcgtcatgccattttcgaatgggaaaagtgctgtgccaaagctcattgttatgctaaagcgatcaccgtccgctgtaaacgttgtattccgaatcgctagttgaatattctcaagacgttctttcgcttcttctatattagtggcatcaagtagaatggcaagttcttctcctccataccgatacgctcttccactcgttccgatttgttttttgaaaatatcaccaattttacgcaatacattatcaccaaccatatgtccaaattgatcattaaccgctttaaaataatcaatatcggaaagaacaacaagtaccggattcccttgctcagcacagtagcgtaaatcttcttggaaggacctgtgattgtagagttctgttaaaaaatcttttcgagcaatgtcctctagctgcgtgtttttcgagcgcatcattcgctctctcgaaacgatgatcccccctaataacccaataaaaattaaaaacataaagtctaaaagatatacaacaagcccttcgccggtaaacgaataaccactaaagataagaacaccggtatatcctccgccaagtaaaagagctgcaaccataccgccgataaatttccaatacacggctacatgtaaaataattaagtaagcgatgggaaacaaagaactttctgcaccaccagtaagggcaatcaaccagagaaacgcaacgtaatcaaaaaccacgctcaatttagtcatatattgatatcttcttgagttcaaaggagtacggtgaagcgcaaattcagcaatcgtcatataaacgacaccaaataaaaacaaaactaaaaaagagaggctcgttccttgtaagagaaagtagtaatatacacctgcaataacgagaaaaacccatcgaaatagggataaaatcgtttctatcgaatgatcgttttgtgttctcacattcacttcattttcaacccttttcatgttgacctttttcaataatgaaattttttccacatattctattataacgaaaatcgactagacaatcgattgttttcataactttctaaaacattccaatgcaaaaaaagaaggcttcacgtagaagccttcccgttcaaaaactgctgcatggcatcggcgacagatagccctgatattaccgcactttcgattcgcgtttttcctgtttcatcctcttcatgtaagaaagcatctcctgaaacgaaaacagcttcactcatagacatctgtaggaacggatgaggatagacgtgatctgcctgagcgtagcgccatctttttaactgccgaccactaatgaatttatttggaaggagaagatctaacctcgataatatttcatctaggataacatcatccccatgatcataataagctttcgagaaatcagccgttgcataaatggttaggattctttcctcggagattcccttagcacgactatccacaacacgctcaattccatcaggtaaatctgtgtccttgtgaccttcaggcgaaagaaaagcgagttcaccctttaacgtaataagacaaacgagcgcaggatcgaaatggatgttcctaagtgatttcattgtatgttctgaaaaaagcacatcactgctttccaataactttaccgtttgaggtgctggtggcgtcagaagtatcgcactggatgttacctgctcaccttcctcagggatgaccacatatttctcatcatcgcgaatgatgcggttcactttaaacttgtgttggagcgggacttcacttgcgagatttttcactagttgattcattccgtttgttgctttatatctcgcatgtttctgtccgaaccactttgatacccagccattcgtctcccattcatcgactagctgctgaaacgaatcggttcgaacggtaaagaattgcgccccatgatcagcgcggccaccgtcaatccttcgtgttgcgagacgaccaccgacgcttttgcttttatcaagtacaagtacttcaaatccagctttcattagctttctagccgccaaaattccagcaataccgccacctatgatggcaatatcaacttctctcattcaaataatactcggtattcgccgtatccttcttcttctagactttctttcggaacgaatttcatcgctgctgaattgatgcagtagcgcaggccattttctccgggtccatcattaaagacgtggccgagatgagaatccgcttccttacttcgtacttctgttcgaatcataaagtgactgaagtctttcttttctttgacaaaatgattgttgatcggctgtgtaaaacttggccagccgcatcctgcgtcatattgatcggttgagctaaacaacggttcacctgatacgatatccacatagatacctggttttgcattatcgtaatactcattctggaacggacgctctgtaccatttttttgtgttacttcatattgaatgtctgtaagacggctgcgaagctcgtcatcgttcttttcaaaagcccagtttttttctataaaatcagcacgacctgatccttttttgtagcgattgtagtgagcaggatttttcttatggtaatcctgatgatattcctcagcaggataaaatggtttagctggaagaatttttgtcacgatcggttttgaaaaacgaccgcttgcttctagatctttgcgtgactgttctgcaaaccgctcttgctcttcattatgggtgtagatcgctgtaatatacgtgtcaccgcgatcaaagaactgccctcctgcatctgtcggatcaatttgacgccagaacagatcaagcaatttactatatgggaaaatatttgggtcaaatgtgatttggacggcctctacgtgccctgtcgattttgaaatcacttcctcgtatgttggataaggcttttctccacctgtatagcccgatacgatgctttgaatgccaggcatttcttcaaatggttcaaccatacaccagaagcaacctccagcaaatgttgcaagctcataattcgtactcattctctatcactccaatatagaagatttatcctcacctcaagtgagggcgattgtcggtccctgctcaactaacctctggggaaaagctccctcagttcaaagtttcactatctataacatatccgaaatggacggtttattgccagaaacttgctttagcaataggtaatcagggaataatttactaaaattattgaaatctgctacaatttagttgtatgactatttggaaaaaggagacctttgactatggctacgtttcaagagaatcttcagaaatacgcagatctagcggtaaaagttggcgtaaatattcaaaaaggacaaacgcttgtcgtaagcgctcctctcacatcagctgaatttgtgcgtaatattgcagaaagtgcttatgaagctggcgcaaagaatgttcacgttgagtggaatgacgaaagcttaactcgtattaagtatgacaaggcacccgatgaagcattcaaggagtttccaacatggaaagcaaaaggatttgaggagttggctgaaaacggtgctgcattcctttcgattacatcttccaacccagaccttttaaaaggagtcgatcctgaacgaatttcgaatgctagcaaaacagcaggaaaggcaatggaaggctatcgtaactacattatgtctgatcacaatagctggtctgttgtcgctgttccttcgaaagcatgggccgaaaaggttttccctgaggcaccagaagacgaacaagaagcaaagctgtgggaagccattttccaggcgactcgtgtatcaacaggaaatccggttcaagcatggaaagaacatagcgcaaaccttgagcaaaaagtggactatttaaatgctaaacattatagcaagctccactatcgtgcgccaggcactgatcttacaattgaccttccacaggctcatcagtgggtaggtggcattagtgaaaatgtgaaaggcgatcattttgtcgcaaacatgccgacagaagaagtgttcaccattccacataaaaacggcgtaaacggcgttgtttcctcaacaaagccgctaagctatggtggaacagtgattgaagactttacgcttacatttgaagaaggtcgcatcattaaagctgaagcgaagcaaggcaatgaaacgcttcaacatcttatcgaaacagatgaaggcgcacactacctcggtgaagtagcgctcgttcctcacgattcacctatttcaaatgcgggaatcattttctttaacacgcttttcgatgaaaatgcttcgaatcaccttgcgattgggaatgcttattctttctgccttgaaggtggtaagaccatgtcgaaagaagagcttgaagcagcaggagcgaacgaaagcgtcacccacgttgactttatgattggttctgaagaaatggatattgacggaatcaaagaagatggtacaagtgaggcagttttccgaaaagggaactgggcgatctagacattaaagcagagcgacaacgctctgctttttttggtgctttaacaaaacgtttttactaggattctaatcgaaactcctttatacttgagtaaaatgataggttttaacggttataaataaaggaggttatgaaatgagtgcgaaagtatttatcatccatgaaaacgaagaatggacaaaacctctcaagcaagaacttgaggcgcttcatgtcccatacgaagactggtttcttagtgaaggaagccttgatttaagtgatgtaccgccagacggtattttctataatcgcatgagtgcttcttctcatacgcgtgatcatcgttatgctcctgaatacacggcagcagtactcgaatggttggagagccacggtcgaagagtattaaatgatagccgtgcccttgctcttgaagtaagcaaagtggcacaatatgcagccctgagaaaacatggcatcgttacaccaaaaaccattgcttccgttgggaaggatcatcttgcaaaagcagcggatgcgttttctgaaccgtttattacaaaacacaaccgagcaggtaaagggctcggcgttcagctatttaacaatcctgagacgctgaaagcttatgttaagagcgatgcttttgaagattcgattgacgggattacattgcttcaacagtacatttcttcacttgacgaatccataacgcgatgcgaattcgtaggtggtaagtttctatatgctgttcgcgttgatacgtcagaaggctttgaactttgccctgcagatgcgtgccaggttggcgatactttctgccctacaacggaggagccgaagcctaaattcgaagtcatcgaaaacttcaatcaccctgttctcgctaattacgaagctttcttaaaagcaaacggcattgccttcgcagggattgaatgcattcaaaatgaacgtggagatctctttacttatgatgtgaacacaaatacaaactacaatgcagaagcagaaagaaaagcaggggtttctggtatgaaagcgatcgctgacacgctagctcaagaactttctaacctccattctctacaaaaataaagagcgccgagtgcgctctttattttactttttaatcttcgtatcgtttttttatttggagaaagccatgcagattttccaaaaagacgtcaattaacgatggatcaaactgctttcctttctcatttttaaaatgagtaagaatatcttctagagcccacgcttttttataaggtcgatcggtggcaagagcatcaaatacatcggctaccgcaacaattcggccataaatatgaatttcctctccacttagtccctcaggataaccttttccatcccaacgttcatgatgctctttggcaatgatcgctgccgcttttagtatggttcgttttgaattttcaagaaggtgatagccgatactcgcatgtgcctgaactgcaaaatattcctcttccgaaagtttgcctggcttgtttagtatcgcatcggcaatcgctactttgccgatatcatgcattggcgaggcgactttgataaggtctgcttgttcttcgcttaaaccagatttaatagctagaagctttgcatactccgatacgcgcttgacgtgagagcctgtttcctttgaacgaacttcaccgatttctcccattttgaaaataatttctctttgtgcttcctccatctccatattcataagtaccgcttcaagtgcctgggcagtataagaggcggccaggcttatttttttaacgtcacgggtcgtaaatacaccctctttcgttaatttattaatcacttgataaactcctagcgtctggttctgcttattttttagtggaatcaccataacggacttcgtgcgatagttgtccgttatatccatgtctgcatgaaaccgatcgtcttgataggcatcttcaataacaagcggttctgccgtctgaaaaacataccccgctaaaccgcttgaagcaggtatacgaacctccttcgccctctctgccactttcgcccatagctcgtctttttgttcatcatataaccacagcatacagcgatcggcaaccgtcatatcccgccccatatctgccatcagcaacaaaaggcgatcaagattgttctcaatcgtaatacgcgatgcgtaagcaaagatgatattgagaagttcctctgattcaagctctttcttccagcggccattcatctagcaatcggcctccctttataggatcattgcaatgtgtttggggaaaatctcacagctatctcgtcctattctattaaatacttctatcatacacgtatatactatctggtggtagattaaggaagatgaaatacaactttttgtccctttataatagccaatcaatcaacagtctggacttgctataaccatcagatggtcttggtttttgataaaaacagtcttctttcctaaattcactgacataagtatataaaaacaaggcatcaggagggaagccggtgtgaagttatcgttccccttatttcaatcagcgaataaaaaggaaatgcctcttatgaaggaattgaaaggggcctgccattcatcacctcccgctcttactttaacgggtgaagaagtgaagctaacaagaatcattcgcgaacaaacagagcgagccaatcgaaataacgttacgcgcacgaaagcgtatctcgatttttatttaaagcacccagaaattcactgggctttccttgcccaccttgtttcccggaatgccgggtggacgatgactgatttaaaaggagaatatctccctcgctttttatcagcagatgatcagtacgctttcttttcctttctagaacgagggaactggctaatttttcaagatgcgtatccgcagctgctgatctatgaagaaagtcttaaggtgaaaaagccactttttcacctcctatcagcctttcacgtttcttcttttatgaaagtcgtttggaatcgcttctggaacgacaaagcctcagacatcctttcagtggccctcatcattaacgagcagcactatatcgattcacgtgtcataaatgatcagcactttaaccaaaccgtttttaacacacttccttttcaaatacaaaatgtgttcaatatgaacgttctcctcttcccaatgattcggaacggctcgattcaactcatcggagaacctgccaatcattttctttatgtgaaagaacggattgaacttggaaaacgtctttatcaacttattttttctaagcattcgattctaaatgagattttagagtggtcaacacgttactctcatactggctcacgaaaagacttctggcctgagctttttcactcactaaaagaagggcaaccagacgaaaaacgcgtcctcgaacaatgctcgctcaaaaaaggacctcgtctttatagtcctcttctatctgtatggaaagatgtacaccatgatttacctgatcgcaaggattggttcgtcaacacttctgcgctttcacttttcaaatttcccgatcctgatttttcaggaaatgctgcaaagatctactgccgatctcttcacttactagaaagtctcttatgaacctgtatttctacacaaaaaaacttccgctagggaagtttttgttaaatgatcttttgcattcgtaacaccacttcagcgattaacgctgaaccaagaaatgtcccaaccataacgaacatggctacgacaacgcttcgccagccaagcttcacaaaatcagtccatgagcgcccaattgcgataccagcatatgcaagaatcggcgttgccagagccaggatattaatattttcagtccactttacgatatactcagagccgggcatgacgggcatagatacaagaattccaataatcccgatgtaagccacgctcggaatattcacaggaagaacgtgctgaagaataaggccagctaaacaaatcacaattaaaaccgccataccaggtaaagcagcaacaggaaagacgctgtaaccaatccagttcccaatggcagcaatcagaccgaagatgattaataacaatgtccactcttgtacattttttagtaacatcttatgcccccttccccacgttatgcgatgatttttctcttgtcatgagctgatacatcttttctgttaatggaagacctataaaaatactcatgtataaccccgttgataacgacagcaaattactcgcgcctgcaaatgcaataatatcatcggaaaatgcaggaaaagcagcaacgagcgagccacttgcagctgccatcatacttccacttcctatcccagacgccatcgcaaatgaaagcggatgtagtggtgtaatcgtcgcaaggaatccggagataacgcccataaacacggccccaaaaactgtcccaaaaatataaatcgccattacgcctcgtccttcaggtgaattgaagccatatttatcaacaatcaacccaacgtttggctctcttgctacagaatgcgtcataccaatgctttctcttttcaatcccagtaaaacagcgatcggaagagcaatgaaaatcgtgcctaaattcccgaattcctggagcagcaaagcaggtcccgcctcaattaacttcggtagtgaaggaccaataatcacccctattttcgcaataagcaaggtcacacctagcacaataagcggttcagcatttagagcctgtgcttttttaatgactggggtaaaaaacaaaccaagtccaatgagcatggcatatagcatcggtaacagtaagatcacgcctggtccaaccgtaaactgaaaaacgcctatccactccgttaacgcaacaatgactaatacaagtaaatgcaatcgccaatctttccaaatccccctaagttctgccacccatatcccccatttccttttccacatgaaagctctaaagttattgttatcttaatattttgattgttaaaagtaaatggattattcttacacaccactaaaatgaggaaggatttcgaaatcgcaagcgaatacaaacacctaaactacagtcttttttcaaaattaaatttttatcaaaataaaaagccaggcatcaagcctgactttttttgcggattttattttactgatctttttttcgattaataatgctcgcgccaacaagatcccctgttacgttaagaccagtggcccccatgccaactaaagcatccacggctgttaataacgcaacggtttccattggtaaacctacttgcgcaaacacggttgcaatcataacaatacctgcacctggaacgcctgctgtaccaatcgatgcaagcgttccaacgatcacgaccatcaccatatctgtaaaactaagcggtgagccaacgacgttcgccgcaaagactgcagaaatcgcaattcgaatagcggctccgtccatattaatcgttgcgccaagtggcaagctaaagctataaagacttttcgagatgcctaatcccttagccgcattcatcgtaagaggcaaggttccagagctactttgcgtcacgaatgccgtaatcatcggcttacttgcgttacgaaagaactctttcggacttactttaaacaccagtaagaatagaacatagataccgatttgtacaatcaacgcaatatagagcactgcgatcatatttccgagcgagagaattgtatccactccctggttaccaatagttttcgcaatgattgcaaagatcccaatgggaacatattgcagaataacgttcatgattttaaatgtggcttcatttaagccttcaaccactttataaaggtgttcgccaagcgccccatgttcttccgagttccgtaacgcagcaatggcgatcccaaaagcaaaggcagtaaagataatcccaaggagattcatctcgctgaatgccgtcacaatgtttgatgggacaatgtttaacagcacgctgacgatgcctggattatccggtacatcaaatgattgatctggatctatcgataaacccgtacctggattaaacaagttcgctacggttaatccaacaataatcgctagtgcagatgttaagacgtaataaagaaacacctttccccccatgcgaccaaggttacttagtttcgtttgattgacaccaacgattaatgtaaatagaataagtggaatgataagaaacgatagcaatttaattaataagtctccaaatggtgcaagaactgctgcattttcaccaaatatgagtcctactgcaattccgagcataagtgcaaccgtaatttttataattaacgaagcgtttaaatagcctcttaagatcttcttcatagtttccccctccttcaaacactaattattcatatacatttactaggaaataagatacagcactattccttgaaagtcaaaaggttagctttatcatccaactaaattcccttatcaaactttcaatctcttattctcgttttcatgtatagagaacagcttacttggatagactgcttcttaaagtctattaaaaagttggaggatgaacatgaacaatttcgaaagtttccctgtcaccccttttgaaacgtatcttgagatgacgcaatatggaactgaggtacacttcgaatacgacaagtacgagctcttatcaggaacagttgaagatggaaaaatgtattttctcatcgattacaacacaggcttaacgtatgaagtggagggaagcatggcggtcactttgctgcagttaatggagcaaggaaagggcaaacagcttgtggaaaccattaccccgcgcttacgcccaacgaattcattctctcacatgtaaaaagtcctgctcgacggcaggactttttgctttttatagactaatagctacatatccgacacgttaactaattcagattgaatcacataccggtcaggcgcacttcctataaaatcaaatggatagcacgttgttaacgttaaggtcgcttcctttttatcgacaatgaccgttcgatcatccgcatctaccaccttcatacttacgacagcatattcatagcgttttccctcgtattcaagaaagaccgcatcaccttttcgtacatcctgtaaaccagtaaaaactgtatcacgatgcccactaagaaccgtatgacgcctttgatctggtgtcgtggtgaattggcttacatacatgccaaccccctgacttagcgtgtcttcatctgttccccaataggtcgtaaaccctttttcaatcgtaggaataactaacctgcctacttcttgtccagtatcaaacgtctttatctgatcactcattaaaacctcttgtgcgttcacggtttcttccttcgtaacctctgcttctttcgtactctgccactgcttggtttcttcagcagaaacttgttctactccctgtgtgccctgccaccattcatacccatagtagcctgccatcacgattcctacacacatgatcagaccatataatttgttcaaaatcttcacctcaccaaagaaagcgaaaaaaccgctaatgtgcggtttttatgccatattaacagctaacggaacgtcttctataaagtagtaaaccacctgcagcaacagctaaagccgctccaccaatggcaagcatcggattggtagaagctgtttcaggcatttccccgccatcttccattccttcaagtgatttagctgaatcaatcacgttttccggaacggtaatcgtatcaacttgattaaaattgtcgatcgacatttccattgattgtttcatgttcatgctttcatcttcaatcttcatatccatatcaatatccattgttaaatgcttcatgtaatacgtatctttatcaactgttactttatagttaaaatcattaatcttcatttgttccataagacctttcatagatccagagccttcttcacctgacatgctctcttggaacatcttcatggacgcttccattaacgttttgccgtccccttcgtacgttaacacaaaaccatcatccgtctcttctacgctcatctctttgccaagctcttcagcctgagctatttgtgcttctaccgacgacatgctttggagttcctctaaaccctttgtgagttcttccggcatcttaatccatcctttttcaggatcttcttgataaaaaccttcctctgtccaataagattctagcgaaatttcaccttcttcaggtgattttgttgttacgacctgatgcattgcaaaaggctttaacgtaatgtctgcttcagattggctggagatcatcatcgtttctccttcaagaggcatcgactgttccatattcgtttttgtagaatagctctccacttccgtcatcgcttcattcgactgctttaaaatgtctgttgcactcatttcctttgcagatgcgtgaaacggagctcctacaaaaacaattgctgctaccgatagagggactaacttctttaacataaaaacactccaattcatttttttggcaagagaaggctagggatgtgatcacaaatgatgtatcgtgctaccggatgtgagtctttgaatcaccagtttctttcacctattccttattttcccaaactagtaaaaatgaaacgcttttttagttttgtttttaagatcgttttctttctttaaaatgcactttaaagatcgaggaaaacagtttaaaccctccaaaaatgaatccgttcacttttgcaaattaacagaatacaaaaacaacacattgaaacccctttcataattgttttatcggctatatacttagcactatcaaatcatgatttgtttcatccgtatcattttgcacatgtaagggagttggagatctccatgtcacttgatgaaagaagcacatttctattaacgaaactcgtgaacgcaacagaattagttacggttgatcatgtcattgaccaacttgggatatcaaaacgaaccgttcattatgatctacagaagattaatgattggctaaatgaaaacaacctacctattatccaaacaaaacaaggaatgggatactacctctctgaagaggccaaacaaaccgttcctaaattgatgaaggaattaaaggaatggcagtaccactattcgcaaccggaacgtatcaccttaatcggcgtggaacttttaacaaatgataagccgatctttatgcagaattttatggaacgaactcaagttagtcgcggcacagtcgctaaggatttaaagcttgttaagaaagtcttgaacgaggaagcattaacgttacaatttgaacgatcagcaggatatgttgtggaaggtaaagaggaaaataagcggagaatattgagtcgctttctgtcagaggttctcaccaatgggcagttaaccgaaatgacgaattttctttatcctctcttaaagaacggtgatgaacacacttattcacatctcattccgatgaaacaaatcatcatgaatgcagagccgattctaaaagtagagttaacggacgataccatccatgttcttgccattcagcttgttgttcttcttcagcgtttgaaaggcgagcatcgtattcaactcgatccagatgaaaaacacgctgtttgttcaacgagagagtttgaagcggcaaagagcattgcaaaagatttagaagttcaattcaaactctcactatcaatagatgagatcggttttatcacgatgcaccttctaggctcaagaatcaattattctgaagttggcactgtgggtagtcttgaaagtaataaacttagaaaagttgttactaagatcgtaaacgaatttcaagtttacgcttgtgtcctatttgaacagcgcgatgaactagaagaagctctttttcttcatcttaaaccaacgtactaccggttaaaatatcatgttcccattacaaacgaactaacagagtcggtcaaacaggaatacccagatgtcttttcgattacgaaacgagccgtatggccgatagaattgatgatgtctcaaaaacttccagacgatgagttagcttatctagcgatgcattttggggcgtggatgcagaaggaagagcttccagaagtgacatttggaaaagccattattgtttgtgaaaaaggaattggaacatcaaatattttaagagggcagcttgaaaagcttctcacgaatgtagaaatcatcgggacagtatcaagaagacagttcatgcaaagccactacgatgtcgattatgtcttctctacatctccactagaacacgacacgttacctgtcttaaccgtcaatcccattttgacacagcagggaaaagagaaaatccttcattggatggaggaagtacaaaccacttctcatgaagaggctgtcccgaatccagatgtgatcgttgaaatcatgaaaaaacacggcacgattacaaatgagaaagaactaagaaatgaattacagcagttattcacgccattaccaaccaccttatcaatagaaaggtttgaacgacctatgttaaatgacttattacatgaagaaacgatacaatttgctaccgatacatcagattggagagaggcgattaagacagcagccatgccgcttcttgcaactgagcaaattacctcttcttatatcgatgctatgattaaaaatgtagaagatttggggccctatgtagtaattgctccaggaatcgctattcctcatgcgcgtccagaagaaggtgtgaatacagttgggatgagcttgcttcgattagatcaagaagttcctttttcatctaaagaaaagcaccaggtaaagttgctaattgtgcttgctgcagtagataacgaaacgcatttgaaagctcttgctcaactttcggagcttctatcagaagaagaaaatctagaaatgatttatcgtgcagaggaaaaagaagaaattattaaactcgtatcaaaatactcaaattaaagggagagaataaaaatgaaaaaaattcttgttgtatgtggtaatggactaggaagcagctttatcgtagaaatgaacgtaaaaagtattctaaacgagcttggaattgaagctgaggttgatcatacagatctcacaactagtaaatctgaaaatgccgattacttcttaggctctacggaaattgttgaaaacttggaagatggcaagcgaaatgtgattaagctaaataatttaatggataaaaaagaactaaggacggctattgaagcaaacttgaaaggggcataaatcatggtcgatctcataatgaaagacattctaggtacaccagcgatccttgtggggttatttgcccttatcggcctccttcttcaaaagaaggacgtcgcaaacgtcatatcaggtacattaaaaacgattatgggatttgttattctgggggcaggcgcaggtgtacttgtcgcctcccttgataactttagtagcatgtttgatcacgcatttgaaattcaaggaatcattccgaacaatgaagcgattgttgcgttagcacaggatgcatttggtgcagaaacggcgatgattatgcttttcggaatggtagccaacatcctactagcacgcatcacaccttttaagtacattttcttaacaggtcatcacacgatgttcatggcttgtcttatcgccgttattctttcaaccggtggctttagtggcgcaacaatgatcatcactggttcacttattctcggatctttgatggttctgttacctgctctattgcaaccttacacaagaaaaattacgggtagtgatgactttgcgatcggacactttggctctttcggttatttaatcgccgctgctgttggaaaagcagttgggaaaaactctaaatcgactgaagaaattaaagtacctaagtcattcaactttcttagagacacatctgtatctgtatcacttacaatggcgattcttttctttgtagtggctcttttcactggccctgctttcatagaatcagaattaagcggcggaacaaacttcttggtcttctcatttatgcaagcgttaacgtttgcagctggcgtctacatcattttggcaggggtaagaatgctcttatctgaaatcgttcccgcttttaaaggaattgcagataaaatcgtaccaaatgcaatcccagcacttgatgctccgtctgtgttcccattcgcaaacaatgcggtgatcatcggtttcttctttagctttgtcgcaggacttctcagcatgttccttctacctatcttaggtctaaaagtaattgtgccaggtcttgtgcctcacttctttaccggagcagcagctggtgtattcggtaatgcgactggcggtcgtaaaggagcagtatttggctctatggctaacggcgtgatcatcagcttcttgccagcgctacttctacctgtgcttggttcattaggctttcaaggaacgacattcggagattcagatttcggcgtagttggactccttctcggaggcttgattgaacttctatcttctaacgttctattccttatcatcgttgctgccctactaatcgttgtatttgtaggagctgccttgatcaaacgttctttagcgaaaaataatttagaagaaaaacatgatgctatttagtagaaaaagaccatcctaggtaaaaaggatggtctcttttgttattctatatcatttccagcagtcactacataaaccaactgatcggtccacttctcattctcataaatgaaccctttcctcacaccctcatacaccatgcctacactttgggctagctgactcgatggactgttatccaggttaatatgggcttcgatgcgatgaaaaccaagatcatgaaaagcaacctgaagcgctgcgctcaccgcttcttttccatatcctttacgccaatactgattatgtatcgtatagccgattcgtgtccattgaaaattcattctcgctaatgttgagaaatcaaccattccaatatgtgtgccatctgctttatgaaaaacaccaaacacgtgagctgtatcatttatggctaattcttggtgcttattcactaagtctctaaaccattcttctgtacactcactcatatccaacttcccaggatcataggcgtgttgcgaaggatgccttgcattaaattcgtgtaaccagttttggtagtcttccgtttttaatggtctgattactaatcttgctgattctttttgaagattaaactctttcaaacgaacacctctatctcttagattaataaaaacttaacctctcttatagtaacttccattttaaaaattgtttgcagactagctctcgtgatttcgatcaagcttacgattaatctcatgaagcaagtataaccctcgaagcaagcaacctacaataataccaaatccaataatgaacccaatctcatggagcgggaacaggataagtccaaccacgctgctcgctacgatcagaaaaaagagaaacatctcgcacctcctaaattcatacaaaactaatttgccatttcttacttccaatcgggaggttgtgagcaaaattaaaagatgctttaattgtttcattacaaacctaaataagtgatttgcgcctattttcatctacatccaaaccaaaaagagcagctgcctttatggcaactgctctttttcatacataattaattttacttaagaagggaatcctagtactgcttttgtttcaaggtactcttcaattccgaagtctccccactcacggccgataccagattgcttgtatccaccgaatggtgctgagaagtccatttcagcattgttgactttaatacgaccggcgcggatgcttgttgccactttgcgaagtgtttctttatcttcaccaaagacataaccagcaagaccgtaaacaacgtcgtttgcaatttcgatcgcttcatcaattgtttcatatgtgatgattgacataacaggaccaaagatctcttcttgtgcaatcaccatgtcatttttcacatctgtaaagatggttggttttgcatagtagcctttatccagaccttctggtttaccagttccacctgcaatgagtgtcgcgccttcgtcaattcccttttgaatgtaagactgcacggtatcccactgcttttcagaaacaagtggtccaacatagttgtttccattcggatcacctactgggaattcaggaagtacgtttttcacagcttcttcaaattcttcttttcgagaagctggaatgatcattcgagtcccggccgagcaaacctgacctgagtttgttgcaatatggctaaccgcagctttagctgcttcagtaatatctgcatcttctagcattacaaatggagatttgcctccaagttcaagtgctactgtcttaatcgtttctgcagcgttcttcattactttttcaccaacacctgctgaaccagtgaaagatacaaagtcgatatcagggtgtgagctaatgccgtcaccaatcgtctcgcccgttccgttcacaaggttaaatacaccttttggaacgcccactttatcaaagatttctgttaagataatcgccgcaaatggtgtaatttcagcaggttttaagacaactgtacttcctgctgcaaatgcgctcgcaattttcgttgacgactggtttgttgggaagttccatggtgtgataaggccactgacgccaactggttctttaaagattgtatgatcgccacgatcttctgagaaagaatactctttcaatgcttttgccgcttcagagaaatgctggtagcccatgttgtaatgaactttctctgaaattgagcgtggagaaccgagttcttgtgtaatcacgtcaataatttcttctttacggttggcatattcctctgcaatgtcttcaagcattttcacacgttcttctcggcttgtttgagagaaagaagggaatgccgcacgtgctgctttcactgctttatctaaatcttctttcgttccaagactaactttaccgatcacttcttctgtcgctggattgattacttcatgtgtttctgaacctgttgattcaacccattcgccattgatgtaatgttttatttggttacgcatgatgtaaaaactccttttttatgtttaatcggtttatattgatttagcttttctttgcttccacagtaactgtaaccgttaaggactatagttaaacatgccgatgcttttatgaaacttagaaagcggttgctaatctttgaatctctgctctgctagctatagactagaaagtagtaaattggagaaaggatgatacagaatgggacaaacaattaaaggaaaagttgcgtatattacaggcgcaagtagcggtattggacgtgccaccgctcttcagcttgcaagtgaaggggttcatgtgggcttgattgctagaaccgaaagcaagctaaacgaagtcgctaaggaagcagaatcttacggagttaaagcgatcgttacccccgctaacattgcagagattgaggaagtcaataaagccatcgatcacttgaaaaacgaactcggctcggcggatattctgatcaataatgccggaatgggacgttacggatcgttcttagaaattgaaccagatgactggaaggaaacattcgaagtaaatgtttatgggacgtatcatgtgacacgggctgttcttccacaaatgatcgaaaaagacagcggtgatatcatcacaatctcgtcaagtagtggtctaaaaggaacggctggctcaacctcttacagtgcttctaagtttgctatccagggcatgactgaagccctcatgcaggaagttcgtcgaaataacattcgcgtctttactcttaatccgagccttgttgcgactgaactcgtcttcggtgacaagcttgatgagcaagataaagagaaatacatgcagcctgaggaccttgccgaatatatggtaggtcaattgaagttgcacccacggattttcataaagcagtcattacagtgggcgacgaatccgttttaaactaaattcactaaataaaaggaggtaacggaacagccgttacctccttttatttgattttttactgcctccatttttcataaagtcgctttatctgttcaggacttgtacgacagcacccgccaattaatcgcgctcctgattgaaaccattctctcgatccatcgacgagcccaccgcacgtttcgctccccaaccatgcttttgactttgattcataaatttctccagagttaggatagacaataatcggcttatcggtttgagtagttaactccttaatcgctcttgtcacaaaggatggagaggcacagttgatccccattgccgcaatttgttcgttcttgttaaaatagctggaacattcttttagagcagttccatcgctaattttttcttcattttgaatggtgaaggacaaccaggcataagtagtagggaactcttttaataatcctcctaaaactctcgcttcttgaaaagagggaatggtttcaaacgctaaaacatcagcacccgcagcaatcaatgcttctattcttgggcgatgaaatgcggtaagtacctcatcgctaacattgtaatcgcctcgatactcggatccatcagctaagtacgccccataaggtccaacggaagccgcgataaaaggttttgggcgattcaacttttcttcctgctcccaaaaatcattacgtgcctttcgtgcaaggaaaaccgttttctttattaagtccactgcctctcgttcacttaaaccacgagatgttaacccttcaattgtagcctgataacttgatgtaattgcacagtctgcacctgcacggaagtaatccaagtgaacctgataaatgagctctggattttcaagtaaaacacgcgcagaccaaagtgggtcatttaagttacacccatatttttcgagctctgtcgcaagtgccccgtccaatatcaccaaattaaaatcttctaaaattgccttaataggattttgtttctgccacattacttattccccttttctttactcgttttgttaaatagtaacttccatagcacagtgcaataaacggtatcccgcagtacaatgccacgcgctgggtcggatcaaaagcaataccaatcaaggaagccaaacatagtacgaaggctagaatcggaacgacaggatagaaaggcgttcgatagccaaggtctttaatggattttccttcttttacatatctctttctaaaaagaaactgtgacgcactaatactcatccatacaatgacaacagccagacctgaaatagagacaagcaccacataaacggtatctggcgcaatgatgcttgaaagtagtgcaagagctccgcctagcatacttaaaatcacagcgttaagagggacgccatttttgttgagcatagcaaaaataggagaaatcatttgcttgtgcgaaagtgaccagagcattctcgacgaagcatataaccctgaatttgcagcggataaaatggcggaaaggataacaaaattcataatatcggctgcgtaaggaacaccaattctttcaagtaccgctacaaatgggctttctagaactccagcttctgatgctggtagaagtgctgataatataaagattgaaccgacaaaaaatagaattagccgaattaaagtggttcgaatcgcttttggtatggttaccgcaggttttgctgtttctccagctgcgattccaatgagttcagttccagagaaagcaaaattcactgccagcatcgtcattaaaatagcgaatgcgccatttgggaaaattccttcatccgtaaagttagataataaggatttgttcgccccagaatccattggaatgaatcccacgatagcagcagcacctaaaataatgaacaacacaatagccagaacttttacaagagcaaaccaaaattcggtttcagcaaaaaatttcactgttaaaacatttaaaataaaaatcacagcagcaaacaatccactccaaatccatacgctaacgaatggaaaccacctttgcatgagcataccagcagctgtaaactcggaaccaagcgcaactgtccaggttagccagtacaaccacgctaccgtatagccggttcctcctccaatgtattttgccgcatagctatgaaaggcacctgtctctggcatatggaccgctagctctcccaaacacagcataaccaggtaaacaacaagtgcaccaaccaaataagacagtattgtgccaataggaccagcttgttggatcgtgtatccagaacttaaaaacaaccccgtgccgatgacccctccaagtgagagcatcacgacatgtcttgaccgcatttccctttgaaaaccctgtttgctttccatgttatttctccttacttttccatccagaaaaacaaaaaaacgcactctaaatgagtgcgtaactgacaaaataaaaccgaaggctctcatctatcaggtttatcacccgctggagttagcacagtatccaatggacctgttgctgaggtttcaaagggccagtccctccacctctctggataagaaaatatattttaacaaaaatatcaatttactctcggtttgtcaaggtagaatagcaacgattatcgaagctttaccaaatatcctttttccactgacgactaccttgcatttgtctttggacaattgtcttcatcctatttcttttcttcattgttgaaaatcgcgtcatcgcttccctcatatctttctccatttgcttcaacacgtactcattttccattccctttccctcctcccaaaaaaagatggctccccctaagaaagtggaagccataccatgatgtaagaacgtatattcggtcggtagttcaattttagcgaacattcgttcttttcgcaaggattacttttaattgtgactatccttattcaaatatcgaaaaatccaccgtatctgccatctttttatacccttcatcattcggatgcaaatgatccccagaatcatacttcgagagaaacttttctggatgatctggatctctcaatgctttatcaaaatcaatgacagcatcaaattctccactcgttcgaatccactcattgacttcctgacgcgtcttttctccctcttttgtaaacatactagaatttttataaggggttaatgttcctccataaatagggattcccttttcgtgagttgctttaatgatttttttcattcgatcaatgattttctttgaatcatattcaggatagtgtctcaaatcattcagaccttcatgtaaaataacgcctttgacaccttcttgacttaaaacatctcgctctaatctcgccaaggcgttctgtccttttccctcttcactattaatcaaatggttggcagaaatacctgcgttcaatacagacattttcacttcggaatcttccttgttcatacggttagctagataatctggccaacgacgatttgcgtttaacgtggaatagtttccattcgcaatggagcttcccattacaacgacagcaccttctaccgattcatcaggaacaacttctaatcggtctagccagaaccaggcttcttcttttgatgtgtatgcagagccctctatatcttctgcgtgattccctttttccgacatataaaccgtttgatttgaacgccgatgccacgttgttggccctgtttcacgatctacgtacaaactaaccgttacattctgatctgcactcaccggaaagtcaatcgcatcactatactctttttctcctgcgggaatcgtcaaggcttcttcaccattaaatgtgatgggctgatccgtctcttgatcgatacttgccccttcaccagaaaccgccactctcacttcttttatagataaagggagtgcaccaaattcattggataattgaatacgcatcttttccccatccaagtgtgggcgaaggattaacctgattgtctgatccttaaatccttcatgcgagttcccatctttagcaggcgcctgcatgctcgctgtccatgatccgatccactccctcttctcagatgcatctttcgtagaagagggccaaccctttgcgctgactatacttaacaatccaaccacaagaatgatgactaatgctgttacaatacgtgtcattatttactcgcctctcgtttgcagtttcacttctttgtatttttctctaatacaagtgtttcgcatctaactactagcctcagttggtcttaatctttctgttgcctaattgttaataaacagaatacccttattcgatttaattgatgccgcttgtctcttaacgtaaaagatttgcaacccgtttgacatatcgataatcatcgattagtataaaaccatggaaaattacgttgatatttttaaagtgctgggaaatgaaacgcgtattgatatgttaatgtggcttaaaaatccaatggagcattttgaaaagccaaccgcacatctttctaagaacatgagcgaaaaaggtggcgtatgcgttggcgacattcaagaaaaggcaaacctgtcgcaatcgaccgtttcacattatttatcgatgatgcaaaaagccggactcctggagtctgagcgacatgggaagtggacctattaccgtagaaatgaatccacgattcaacaagtcgctgcttttattgaaaaagagctctaagctctcttttttttaatcaacatatcgatattactcgaattataaatatgataggagttggtcagttttgaaaatcggtatttatcttctcgctttactagccggcgccgcgctaagcgtggaaggagccatctatggggagttaggaaagtcaatcggaaaattagagagcagtttttataattttgctgtagggacgattatcatagggatcgttgtgctatttcttggaaaagggtctctatcttatacatttaaagcaccgaaatggcaactatcaggcggtttcctgggggtaatttatttaaccattcttgtaatcggcattccaattgtaggcgtaggtcttgcgatgatcagtgttatcgttggtcagatggccatgagcatgattattgaacataaaggatggttgggaagtaaagcaacaaagataaaaaaagaaaaaattatggctgttatgttaatggccgttgctcttatcttaatcttttaaggagttgttaaaacgatgtcgattcttattctactcgcctctgtaatcggcggcatttttctaagcgctcagtcttcaattaatgggacgtttagtaaaaaggctggcacatttgaaagtacgttcatcacatttatcactggagcaatgattttatttatcgtcattctattcgcaggaaatggggatcttcttaaaatacttgaagcaccgaaatggcaattaagtgccgtctggtttggagtaggctatctatttcttactattctcgctgttccacaaataggtgtcattgcagccaatatctcaaccgtgatcggtcagctatctatggggatgctaattgatcacttcggttggttcggcggcttgcaagtttcctttgatttaaaacgattgatcgccatcctattaatgcttgtcgctttgcgtttaatatatgtaggaaatatgaaggctgaaagagaagctacgactgaagtccatgaataaaacaaagaaaatcccttttctcaccagagagaaaagggattttttattaaaagaagtccatgaaatttgtttcctttgcggaacgtatgcgttgcaaccgcgctacctcttcctttgatccttctaataaaccagcttcattaagaaaaaaaggctcttggtagccagtcaatacagaagtcagcgtattaatgttacatcgtagccctcgttttggtggatgagcgcacgctgcattcgatttatctcccttaaacaccctaactccttcggcatcaatcaggtagcttccattgttccactctgcctgatcatccgtaatatggagaaagagagtctctcccgactttaacgtaaacggatactccctaagaaaattctcgacatcaacaatgcgcgccataaagtacggctcgactgttgttttcactttaggattggctaataaaaacgctagctggtctctctcattcgttagaatcgttgcgcgatcaaccatagaatcgtgctgacagagataattccacaatcctcttcttgcttccccatctaaacaaaccatttcttcaacctctaatgttcgattctgtattttgtaacaaatgtacccggctatatttccctcttcatttgtataagtggcaaaccgaacgcctttcgaataaacgcgttccttccaccaattttccgttcgaacgagcatgccattaaagcgagtcgcaaacgtttcgtaaacaggattcagaacttcaaagacgtgatcaagttcaacacgccttacttttccacttacagcaagaagaggcttaaggtcctccgctttcaactctaacttcttccagttattcaaaacttcatacccgaattttcgataaaaggaaatttgaaatggatgaagaaaagagattgtttggccttttttcttcatttcaaaaagaccatttcggagcaggcgtgctactcttccccctcttctatgttccggataggttgcgactgacgcaacgccacccatctttattttctttccggatatccaagtttcaaaatcgattaaatgtagcttcgcagccagttcgtctccttcaaattcaccccatatttcatgctcgctataccctttgattttgtcatctaactcttctttaggcactgtatattggaaggcatattctgaaagtcgtacagcatcgattacttcgtttttttctaatttacgcatgtttccgctccttaccgtttttagtaatgacaatagataatgggccgataattggaactaacccgatccatcccgctaccccatctcggtctcttaaagcaaaaattgaaagcccggtcaatacgagaaaatcaatggtcatcacatgaacaaaatttgattctaaaaaagctttttggtaaatagtcgcctctcctgcaaaaagcccatacaccattaaaccgagagctagtccgatcagaacaatagagagacctttcgattgaagaactctcctcaccttatttggtgttcgattcgatcgttctttatttttatttaaaataaagtagggaagcaaactaaaggcaccaaaagcaaaagagcctacaacaaatggccacgctggaactgatccactgtcgttccgtagaagaagaatggcaaataccgctggaaaaacgccaagtaaggaaaacatagcgagtaaacctgcgtctggatcattcatcgttaggaggtttgagagataagaaccattgccatccggtgctagaaaaacagaatataaaattaatccaagccataaaataaggaatgaaactctgctcatcatcaatcctactttctcatttatcttcttaaatcataaagtgatcgcaaaaaaatctcaaatatgtgtagaattttcaaacaattgtggtatactaattgtaacaaaacattcacaaattatcctttaattcgacacaagtttaatttgtaagcggtatcactaaaaggagttgttcactatggatgtctatatggtctatcttttcgttatcacggctacaccgttgtttctgtggcaggattataagaagcttgcattagttcacatgccgtttattgtggcaatctgggcactgctaattttctacattggtggcggtatgactccagtagcacatacactcttcattacactttttgcgattaacgttttatttgcgcacatagctgcttaccttatctttgctcgtccattccttaaggaacgtcagcttgcaaagaagatgccgcaaacagaagaataaacaacttaacttttaaacaaaaaccgttgtttcccttagagggaaacaacggttttttaattacatgttcatattgtgcatgccgaatgacataacccagattgtacctgcaacgactgccacggcaataaagaccgcatataaaatcgttccaacttgaatccgactactatcactctccgtgatgtgcataaacatcaagagttgaatcgccgcttgaatcaatgccaggatcacaacaataatcataatcgttctgaggctaaagtctgaagcaaagcctacccacaaagcaagtaaggttaagacgatcgaaagtccgaaaccaattaagtggctccatgggaagtggctatgactgtttgtctgctcgttgttggacatcttacatcaccatcccatacaagtagactgctgtgaagataaaaatccacacaacgtcaaggaagtgccagtaaagacttgaaataaagaccttccttgttgtgtcaggtgttaacccgcgctgttttaactgaatcaagataagaatgatccacgcaatacccattgtaacgtgggcaccgtgcgttccgactaatacgaagaaagcagaccagtatgcactcgttgttagtgccgcgccttcatgaatgtaatgaacaaattcataaatttcaaatcctaagaaacctagacctaatgcaagtgtaatgcctaaccagagaaacaaacctttaagagaatgatttctcatatagtgtatggcaagtccacatgtgaaactactagttagtagcaaaaacgtttcaattaacacaccacttaattcaaaaagctcttctggtcctggaccgcccgctgttcgacctaccaatactaagtaagttgcaaacaacgttgaaaatagtgcaatttcggcgccgagaaaaatccagaagcctagaatattcagtcggccagtttccgactgatattctaaaggcgtgttaggagaatattcgactgattccatgcttcacgcctcctttataaagtagtccttttttgatcttcttctatttcttctacgcttacgtagaaacctttatcataatcaaacgaacgaatgaccattgttgctagtacaccaataagtccaaggatcgacatccagtgccaggagaagaccataccgaacccggcgataaagaagaagacactcatcacaaccggcacaccagagtaacttggcatatgaattggtttataaggtttcttctcttgtgtctttccttgctttctttcctgtttcataatccagaacgcatcatgtccttttgactcaggaagatgagcgaaattataatgcggtactggagctggtgttgaccattcaagcgttcttgcatcccatggatctccagttgtttcacgtggagagtaacggaagctgtaatagatgttatagacaagaatcaggaatccgattcccattagtacgccacccattgtggcaagtacgttcaagctcatccagccgtctgcgaccccatacgtgtaaacgcgacgtggcattcctgcaagtcctaggaaatacatcgggaagaagcataagttgaagcctgctacaaaaatccagaaagtccattttcctaagcgctcgttcaaacgatgattgaacatcttcgggtaccagaaatgtaagcctgcgaaacaagcatagactgtaccagaaatgagcacatagtggaagtgggctacaagaaagtacgtattatggtattgatagtcagctgccgccatggctagcataacacccgttaccccaccaataacgaagtttgggataaaggcaagtgaccaaagcattggcgtcgtaaagcgtattcgtcctttgtacagagtgaatagccagttaaagatcttcacacctgtcggaacggcgattaacatcgttgtgatggagaagaacgagttaactgctccacctgctcccatcgtaaagaagtggtgaacccatactaggaagcttagtccggcaataacaaccatggagtaaaccattgctttataaccgaaaagcgttttacgagcaaaagtactaataatttctgagaacataccaaacgctggaagtataacaatatacacttcagggtgaccccaaatccagaagaggtttgcccaaagcattggcataccgccatccatcattgtaaagaaatgacttccgaacaaacggtcaaacgtcataagtgcaagcgctacagttagtaccggaaatgcaaagatgatgataaccattgtaattaatgaagaccatgtgaacataggcatatgcatgagcttcatggatggtactctcatttttaatatcgttactaggaagttaatccctgttaataatgtaccgataccggcaatctgtaaccctagtaaataatagttctgtcctactgatggacttagttctagaccagctaaaggaacatagcttgtccaaccagctgatggcgatcctccgataacaaaggaaatgttaaagagcattgcccccatgaagaaagtccagaaacttactgcgtttaaaaacggataagctacgtctcgtgcaccaatttgtagtggaacgacaacgttaattaaaccaattaagaacggcatcgccatgaaaataatcatgatcgttccgtgagttgtaaaaatttcgttatagtggttggcgtccaggaagcctgcatcagggaccgtcaattgcgccctcatgagcatggcatctacaccaccgcggaatagcatcagaaccgctgcgatgatatacatgataccgagtttcttatggtcaactgttgttagccattctgtccacaaccatttccactttttaaaatacgttagtgcaaaaatggcaccgatcaacgttaaagcgatcgaaacatccgcaccgtaaataagcggatccccggtgacaaaaaattcatccaatttcatggtgtcttcctcctctcttaatgcgagtgttcctcggaatctttctcagaatcatcatggttcatttctgagtgatccatctctgaggaatcatcttcatcagttgattcgccgttacgaacctttgttgcatattcagcgtccattccatgatcaacccactgaaggtgagtttctgagaatgtctgctcttctgtatgacctttcagcatcaactcattgtatttctcttgagtaagtttaggtgcatcttgcgcctcttctacccactcttcataatcttcttgagattcagccgttacggtaaatacctgttccgtaaacccttcaccagtgaagtttgcgttacgtccgcgatactcacctacttcatctgcttgcaaataaagttctgtcatcatgccggacatcgtatactcctgaccaccaagtgatggaatccagaaagatcccattgaatctgcagaagctaatttaaacaaaatcgggtgatcttcaggaatgtgaagatagttcaccgtttcaatattttcctcgggatagctaaagacccatttccaatcaactgatgttgcatgaatgacgattggatctttatgagacgttgcttccggtgcctcttctagtgcaaaaatcgtttgtacagttggcactgcaagaacaatgagaataattaccggaataacggtccaaacaatttcaagaaaaacattcccctcgatgtgaggaggctcatattcaggaccactcttacgttcacgatatttaacaaggatgagtgtaaatagcacgaacacgaccaaaacaataaacagcataaatccaatagagaaaagaattaaattcgcttgttgttctgctacaggtccttttggatcaagcacggttaagttactacagccactcaataccatcactgatagaaacatactgagtgcaaaaaatgatttcattcgcttcaccgccaggccaccttcctttcttcctatataatagttaagtagattttaaacagtaaatgacagggaacaactgttaccattggctattgtagcaggttcatcatataaatgtgacacgtgtcacaaagtgtcaaaagttgctcatgcatttatcactttttcgacacatttctttcataattcgttcatatttgtggatttttttaactttactggataaaacagcgcttgcttgttttgacatatttcgcatcgtgtttcactcgtattatcttttttgattaagatcacataatcgttgttagaattcgtgattttaaggtaaaaaaacaaaaccccactggatccagtggggttttgtacgtaccgtattaatttagcaaccatttcgtcacttgaaattttgaatggccaacagcttcaaatacaagactctcgttgatttcctcagggaagaaccttgatgtaaatacctcttcgccatcgttcacaaacacttcaacggaagaagaatcgacataaaaacggagctctttcacgctttcaatcaagcagctacgcgtttcttctctcccgtctacaaagctttttctcttaaatgttaacaatgcttttgtagaatcatatgtcatagaggcgttgtttcgaaagtttaccgaaaacgttccttttacttcttctagttgaacaagtagctcgtataccgtaccgttaaggtcactccactctttttgctcattcgacagattcgcttcttttgtcattccggtatgtcgcatcgcttctagttccacagcaggtcgctgaattagtcgctcgtcctcgtaatgaagttcccgaggaattgtcaaaatatgaatccatttatgagcaattgtaggatgatgcccttctccctgctctggtacacccatccaaccgatgaccaaccttctaccattctcatcaagcgttgtttgcggtgcataaaactcaaaaccgcggtcaagctctgtaaatcctccgtgactcatctttccactttcataatcgagttcaccagatacgtatcctgtttgataaatgttttgatacaagtaaccttctgcctctatcccttgaggagaaaagaggagaatatccttaccatctaattcaaataagtcagggcattcccacataaatcctagatcaccaatcgcttcttcccgcgaagcagtcacgtcacctttaaacgtccactccattaaattggctgactcaaataagacgactcgcccttcttcattcaagttctgcgtgccaatcaccatgtaccatttacctaaatgttgccacacttttggatcacgaaaatgcggtgtatacccctcttgtaagtgaagcaccaccccttttttctcgaagtgaatcccatcttcagatacggctacacactgataagtttctcgattgccttcttcgtccttcacattccctgtataaaatagatacattttatcttcataaacaactgcacttcctgaataacaaccattcttgtcataccagtctcctggagctaatgcgattggttgaagttcccagttcacgagatctgtcgacgtataatggccccaaaattttgccccatgatctgttttgaacggcatccattgaaagaaaacatgataaacacctttccagtgaataaatccgtttggatcatttaatagtccaacaggcggcattaagtgaaatgcggagcgataatgatctttttcaaccgtatcgcgttgttcatttatttcttttattgctaactcttttaattcatcatttcgatcgatcatataaaccacctaattcatcaaaattttgaaaaaaggggacccgcttttaatgaggatccccctttccttattatttatctagcataccgtctttgtagccaaatgcccatgtaagaccgaacgcaataccgattgaaatgacattcacgagaaggtataaaacgatctgactgtttaagaacaagagggtacctggaataaccgtaactgcaagaccagttgctttaagcttaaagagtgatgcaaggaatccaccaactgccccgccaatgagtcccataataaatggcttcatatatcgaaggtttacaccgaagattgccggctcagtaatcccaagaaaagcagataatgaagatggaagtgctagcgcttttagtttcttcgattttgttttcattccgactgcaagcgctgccccaccttgagctgcgatagcagctgaaatgattgggttaaacggattatagccaaggttttcaaataactgaatttcaaggaagttgaaaatatggtgaacacctgtaataacgatgatctgatgaaagaagccaatgattagtccacttagtccgaatggaagatcaagaatgaaaatagtaccatccatgatgtactcttctactgtatggaaaatcggtccgatcgcaaacaatgacaaagtaatcataattaacaggactagaaatggagttaaaataagatccagtgcttcaggaaccattttacgaatacgcttttctaattttgcccctagaaaaccagcaacaaatgcaggaataaccgaaccttgatagccgacgacaggtataaatccaagaaacttcagaggttctgcatttcctgccgctacttcccatgcgttcggaagagctggcgtgacaagcatcaatccgagaacgagaccaatggttggatttcctccaaacactcggaatgtcgaccatgccacaagcgctggtaagaaaataaacgctgtatcagttaggacttgagtgaatagaataaagttttccgagatgtcccctggcgttaagccgaaaagagcgaggatttcttcttgtaaaacaagaccacgtagtcccataaacaatccagttgcaactagtgccggaatgattggaacgaacacgtcaccaaatgagcggatcgcacgttgaaacgcatttccctgcttagcggactcttctttaatttcggacttcgttgaaccagttgctcctagagccgtcacttcatcataaattcggttaactgttcctgttccaaagataacttgatattggccggaattatagaaggcaccttttactttttcaacaccttctactctttcctgatcgattttttccttatcgtgcaccattattctaagtcgcgttgcacagtgagcaaccgattgaatattttcttgacctccaatggcatcaatgacttcctgagcgatctcatggtttgtagccatattattaactcccttcaaggttatcttgctcgtggtatcgattccacattctacgaaaagaatgcgagcgttttcatttacccgttcttctttgctaaacaatttagtactggtattcattcgatatgtgaacgattccacattggttaaaaagaaattgacatcgttttcactagttactatacactatctctttcgataagtctataatcaagattaattttttctttctccaaaactttccctgataactgttctaaaatgagctgggccgtcttctgtccagcatcttcattaaaatagtcgactgtggatagtgctggagtcacatgtcgtgataaatctgaagccccaatcccaaataaagcgatgtcctccgggattcgaatgttttgttctttcaaaaagccaagcgctccgatagccattcgatctgttacagcgaaaatcgcggttggtcgacgctcagattgtccaactaattgacttgctgcttcatagcctgattcaaacgtaaagttaccatattgaatccacgctttttcaactggcaaaccgtgcttttccattgcatcaagatagccctgttttcgaacaactccaacagagtggtcagtctctggtacaccaataaacccaacgttacggtgacctttttcaataagcaactcggttacactaaaagcagaatgataatcgtcgtataccacagaggttactccgctcaactcctgtccaatcgcaacaaaggggatcgaagcttcagaaatcgtatcaagtaaatcttgattccggtttgtggcaagcaaaataatgccgtcaacttgacgactttttagtagtttaatattttgtatttctttctccggctgtaattgtgtatttgttaaaagaatttgatatccgttagctgcaagttctttctcaatgccattcacaacgcgactggctgtttccgtactaattcttggcaaaataacgcctatgacaccagagcgcttcgttcgcatcgttttagcatgcgcacttgggatatatcccatttcctcaacagccttaacgacgcgctgccttgcttcatgacttacgtatccattgtcattaagtacccgtgaaactgttgtgcgagagactccagcacgttttgctacatctttaattgttggcataaccgttcctccattaatgcagtctttccttatttcatcataatcgaaataacctctaatgtctataactgggaaaatatgtaggagcgaatattttcagacaggcaacttagtttacatctcccaataagccctctatgattaaatggaatatgtattatttcgggatgctaaataaataatgttaaccgaatttaaaaacaactaaaggagggcagctatgtcagactactatgaacatgaaaaattagatgcctcggcacgcaaaaagttaattatccttgtttgtacaatattagcttttgctgttatgaatggaacgatgtttaacgtagccattcccgacattgcagcatctttcaatcttagcccttcagaagtaagctgggtcttaactggatatattcttgtgtttgcaattggatctctcatgtacggcaagttggccgatatttatccaattaaaacacttttcactataggaattagtatctttgctactggtgcttttattggctttctttctccaaactacccgactttattagccgcacgaatccttcaagcgattggtggtgcaacaatcccagctcttgcctttatcgtaccaattcgatttctacctaatgaaaaaggtagagtattcggactgatttcttctacggttgcatttgcttcaggagttggcccgatcatcggtggagttgtaggtggcactttgaattggcgttttcttttcctattttctgttgccacagtatttgcaataccactctttagaaaatggttgccgaatgaagaaaagcgatcaggctcgattgatttaccaggtgccgctttaatggctgtatcggttgcctcactgctgttctatattacaacgttcctatggtatttacttgtaatctttatcgtctttttcattcttttcctatggcggacatttacgatcacacacccgtttatcgatcctgtgatattaaagaacacgaaatatacgataaccgttctaacaagttttctaggtacatcagcgcttttcggactgatttttgtcattccgatcatgttgcgagaactaaatggtttatccactttaaagattggccttgtcttatttcctggcgccatggctgctgggttgatcgggcaaataggtggtaaaattattgaacagcgtggtgccattcttgttgttaagattgctctactcttgattgcgagtggaacacttcttatctcaacgttttcaggttacaacgcgtgggtcatcgcaccttgtttattaattgcttatcttggattcccgctaatccaaagctcaactgctgacttactatcttctattctacccgacaaccaaaacggtgtagggatgggcgttttcaatttattgaacttccttgcaggggcgtttagctcagctatttttggaagacttcttgatatgaaagacgtatcattttccatgaatcccctatcacttacaggagaaaaccttatctatagtaatctctaccttggcttaacatgtattgccttactcgctttttcaatttttacgttgaagtttttaactaaacgtgaaaaagcactatcagaatcatccgcttcataacacatattgaaaagatcggccacctgagccgatcttttttttatatcatttttgctgcatataaaccgcttgctgccgcctgtgataaggaatgcgtttcacctgaacaatctccaattaaaaagagtccgtttacatctgtttcaaaggaatcattcgttggtatttttgcttcataaaacttaccatctattccatataacaatgtttcttcatcaataggctctcctatcagcttttcgagactatccaaaaactccctaagagcacaaagatagatctttggcacttcatctattaagttaccagcttctccatcaagagaaggaacaattgaattagaactcagaatttgagacgttgtcgcctgctgtttttttaaatcttgaagacgctgaacaacgattcgatcttttcccccattgatcccacctatcacctgttgcgcaacaaagtcggcctcctctttcgaagaataaaaagaaggtacgaataaagtaaagtttaaattgtttcctgggtcatctttttctctcttattttgcccatcaggcatgacaagaccatgttgatatttccttattattctgccgttcggattcatgcaatacgtcgttgcttcaaatgcctctcttttgatatgaagcttcgtttcaaacgtatcttttaagattgtctcaagctgattccctctcatttcaacccgaatacctaaatctagacgagcaggaccaggcagaagacctagctgttcacattgccgatacatccactcacttccgctgttacccgttgatagtacaactgtcttagtttttatgttttcttttgaggtatttaccttaaagcaatcccctttttgaattgaaagcacatctgtttcaaaccgcaaatcaattcgtttcataagaacctcgtataatctttggaacacctggcgagatcgttttgtgccaaggtgtcttaccgaagtcgtcaacacctctaatcctacgttttttgcactcacctctaactctggactatgagtatgatagagctcagcctcttctccaccaaaagaacaaagaatgcggtcaacttcccacatcagcttttctgcttgaacagttcctatttttctaccgagactaccaccaaaatcattcgtataattaaacttgccttctgatttaccaagtccagcaaaacctatgtactgatcacaaacgtcacatgaacattcttgttttgaacgtgccctacagttccgttctgagagttgtttccctttatcaatcaacataattttagattctgggtatagctctgtcagctcgtatgccataaaaatcccgcttaccccagctccaatgatggttacatcatacatgaccaaaccccctacttttaagtagcatatcattgcggtaccccatcagtctctagctagagcaccctttctattggacttttcctttgaacatgaaaaaagcccctcgctgggggctttactcatcttctaaatgacgttctttttctttctcttctttctctttctcatcggtacgctgcttatcaagcttttcacgaatccgattaaattccttacttggtggcatcaggcttacaagtacatcgcctgcttcggctctcgtttgagaatcgtgagcgaaaaattctaaactgccagaaggtttcttcacaaagagcatgattgtttcttcatctcgttctttcaaataccgatcatacgtatactgctgagtaatgttcgttttccgtaaaacatagccactctctactttacgattcaaggtctcccaagttgctccttctttaaacgccacacgtccaccaatcgtatgaacaagctcttcaagatcgtcccctcgatcgtttcgtaaacttaactggaagaggttgttacgtccaatttcaggaacgaatgttgtacacacaagggcgttataagaatcgagctcagttgctgcaatcatgtactcgtaaggcgttaaatccagacgatattcggtttgttcagaaagaatttctcctctataaaacggcacgcctgcttttctcgttgtaagaagcctttgccatgatgaatccgtgattaatactgggatttttaattcttttaacgttttagaaagcgccgttgagaacgtacttcctccaacgattagaactcccggttgaccgtcacttgcaagtccgagcttctctgccgtccaacgaatggaaaatccatgaacaacaacagttgcaaatactaacgcaaatgtgagagacattaggatttttgcatcttcaaagccagcatcaagcaacacactcgcaaagtagcttgccacagttaatgcgacgattcctcgtggtgcaatccagccgacaagcgttttttcctgccaggataagtcagttccaatcgtggataaccagatcgatattggtcttaccacaaatagcataagtaggacaaatgcaaggatttgccaatgaaaaatttcaagcaaagtgtcaacggataaagaagcggttagcatgatgaagatcgttgatattaatagaactgaaatgttttctttaaaatgtctcatatcgtcaatcgatgaaatatgcatgttcgcaagcgtgatccccattgccgtaacagcaagcaatcccgtttcatgcgtaatttcatcagataccgcaaaacaaaggataacgacagcgaaaacgactggagattttaagaattcaggaacataccccttctcaaacatccaaccaatcccgcgtccacacaggaaaccaaatagcgttgcaaaaagagatcctaagaaaaagacaagaagaacggtagccgttgcttcctctacttttaaaaatttaataatttcaaatgcaaaaacagcaagaagtgctccaagcggatcgacgataattccttcccactttaatatctttgctggtcttggctttagtttggcttgtcgtagtagcggtaagataactgttggaccagttacaataaataacccgcctattacaaacgcaacgccccaggacaaccctgcaacatagtgcgctgacagtgaacctaacagccacgctagaaaagcgcctaccgttacaattcttccaaccggtcgaccaagtcccttaatttctctgaaatcaagatttagactgccttcaaataaaatgatagctactgcaatcgatacgaatggatcaaataaatctccgaatacatcttctggatgaagtaaaccaaaaatcggacctacaagcaaaccaataatagacataacgacaatggcagggaagtgaaaacgccaggcaacccattgcgaaaagatgccgagggcaccaacaagcataatattaaataaaatcgaatcgaccatggatagcctccttatgtttaacaactgctcgtgcttcattccttattctgtccttcgtactaacttcactataatcgaactgaacagaaatgtttgaaaatatgctcatcattggcgttattagtaaaataaatgagacgccttttacatgtcgtcattttatatgcaattggactgataaggcaactatctactctcttcaatcaaaaaggaaattgccaagtaaaggtgtaaatgaaatagtaccctataatttgttaaacaaatccacttccacactatattattttcttgtgacaagaataacagctaaaagaaaaaaagaagcaggtcaccctgctccccgttatttatcttggtccaattttaatttcactaatgcatctgctagagcagtattaaccggctcgtctttctgctggtttttcatatagcttgaaacatctttcttcgtcgcttttgtatttttttcttttttgcgtcgttcattaaatgtcgacagtttttcacgatggccgcacttgcatataaaggtttgggcatcaccttgtccatgaagctcaagtttctttttacactttggacaccttgcgttggttactttgcttttccctttacgatagccacattcacgatcctgacaaacaagcattttaccttttttacttttcacttcaagcattaagttcccacaatcaggacatttcgttcctgttacgttatcatgcttatatttcttcgtacttgacttgattttctgaacggtttcgttcgcataggctttcatctcttcaataaatgcctgctttgaaaggttacctttgccaattgcttcaagcttttgctcccattttgcggttaaagcaggtgattgcaattcatctggaacgatatcaagcaattgctttccttttgatgtgatcgttaaatcttttccgttcttttcaattaaaaagctattaaataacttctcaataatatccgcacgcgttgcaacggttcctagtccaccagtctcaccaagcgtttttgcaagcttgttatcttgcatgcttaaaaattgagctggcttttccatcgcagttaatagtgttccttcgttaaaacgaggcggcgggttggttttcccttccgttcttgtaagagagagcacgcgaagttcctggccctctttaagctcaggaagcacgacatccgcttcctctgtctcatatatttctttccaaccggcagaaagcactctctttcctttggcatcaaagtttgcttcaccaatcttaacctttactgtcacttgctcgtattcaaatggctcgtataatgcggctacaaaccgttttacaatcaaatcatatactttccgatccttatcactaagttcccggataacgggcgtttgctccgtcggaataatcgcatgatgatcggatacttttcgatcatcaataatatgcttccctgtttgaatcgttttaccgagtacttttcgcgctgctttctcataaggcgctacagcttctaatctttctttcaacgtgtctttcatatcagaagaaaggaagcgtgagtccgttctcggataagtaacaagtttgtgctgttcgtacaatcgctgggtagctgaaagtgtttcttttgcagaaaagccaaagcgcttatgcgcatctctttgtagttcggttaagtcatacaatccaggtgcaaacgtctttttctttgctttcttcacttcttctacatgggctgactttcctgataactgcttaagttcagaatcaattcgctctcggtcgaagacacgtgaatcgttcgattttggatcccgatacgttaacgtaaagccatccaccaccgctgccattccataataacgttcaggttggaacgacttgatttcttcctctcgcttcgcaatcatcgaaagcgtaggcgtttgcactcttccacttgaaagctgtgcattgtattttgtagtgagcgcacgcgttgcattgagaccgacataccaatctgcttcagacctcgctgcagctgcttgataaaggtttgtgtattgatttgcatcttttagatttttaaatccatctcgaatcgctttgtctgtgacggatgaaatccacaacctctttagtggttttttagctcgcgctttttcaataatccaacgtgccactaactctccttctcttcccgcatccgttgcaatcacaatttcactcacatcattacggttcatttgcgttttcacaacgctaaattgctttccacttcttttaataacgacaagttttaacggggcaggaagcatcggcaaatcttctaacttccacgtcttgtatgcctcatcataaatttcaggatcagcaagcgtcactagatgaccaagtgcccacgttacgatgtagcgatctccttcaagaaaaccatttccaccttttgtacaattcaataccctcgcgatatcacgtccaacagagggcttttctgcaagaatgagttgtttacccacaataccaatctcctcaaaattcgattatttctctatcataccagcttcaatgttacacgtgaaacattgcaaatcaattgtcctgtttaacaaacaaacaaaaaagaagatgtctcccatctcccttcggctagttgctattaagaatgccttcttcaattaaaaccgcttcaagagcatcaaccacttcagcatcgtataagacgcctgaaagacgttttaattcattcatagcatattcaggtgtataggcttttcgatatgaacggtcgtccgtcatcgcatcataggaatcgctaactccaataatttttgcaccaatcgttatctcttcatccttcagaccatccgggtaaccagaaccgttgattcgctcatgatgctgtcgtataattttacttatatcagcataatacgaatcttttaccatttcagccccatcaccagggtgtttttttataatgtcatattcctcatctgtcagtccgcctggtttattgagaatttcttcaggcacattgatttttcctacatcatgaagaactgaagcaacaattagggtatctaactcatcttttagtaacttaagttttttgcctatttttatactagtattttgaaccctaatactatgcttaaaagtatatcgatctttctcctcaactttactaacaacttctaggagaagagaaactttttgactaattaaatggaaaacggactcatttatcatccaaatcattgagacttcggaggcagcttcaaaaaacgcgatttcttttagatcttttacaaaaaagtaatcgtcttttttcaaggtaatcgatagttcttcacataccaattcaccttctagaatataaaagaattcaaaactttcagggttgttacctggatatagataaaacacagttccttcatataccacttgtttcataacctcaataccggaacctcttgctaataaactaagctttgcagattcttgcactacttcttctatacactcctgcttacgtcctacaaataagccgtccaaatttacacctctttttcccctaacgcacaatttctatatatcttattatatagtactaggcatataataaaaagcatctcaaaagagatgcttttttagttaaactcctacgatttgaatcggatcaacccatacccagcggtctgcaatctgcacatatacccaagaacattctgcttgaatgccttcttttgcagcttcttcaatcatgtctgcagtcattttgttcgttttatcgattagatcactgattagtttatcaagatcctggttgtactttgcagtaagctctgctttttttatttttacttccttttcaagattcgctatgtccgcttctgatgttccattttgtcgagccgattctagttttgcatctagctttgctgtttctagagaaagcgctgacaaaaatttatcacctttagcctgagctgcttgaatttcttcttcaattttcacatttgtttcatcaatcttttgtaaaatctcagcgtgatcgttttctgctgcgaaaacgcccgtacccataaacataaagagtgctactactgaaaataaggcgacaatgaactttttcattttaatcctccctaataaactagtatgtgtgaaaaggtagatctgggtcatacttcccactaatcaacactatacggtaaatttttctagaaatctattcatatttaccctaatgattcgacaattttggtaaattatagatataaaagactcttgaatattaatttttgctgtaaacccagcaaaatagacagccgtaaagcacggctgtcttctaatgagataagttaaagacgatagactcttgcctcataaggctttaatacaatagaatcattcacttcttcaataacaggatagttgttcaaaagcagctggttcatctccaccgtaagattagattcaaatacagctggctcgatcgatagatttgtgagaacaagaaccttgtcatccgctgttgttcttgtataagcataaatttgccgatcatcttctagtagtaaatcatagcttccgtaagtgaaaacaagattgtttttcttcagctcaatcatcttcttatagaaagatagaatcgagtgatcatcagcttcttgcttctcaacgttaatatctgtatagtttggatttactttcaaccaaggtgtcccagtagtaaagccggcgttattatcgccgttccactgcataggcgttcggctattatcacgagaagatgcccaaattactttcataatagcatcatgagctactcctgcttctcgctgaatgcggtagcgattcttatcggctacatcatcataatcttcaatagaagggtattgaacattggtcataccgatttcttgcccctggtaaataaatggcgttccttgcataaggaaatacattgctcccattgaagtggcactctctctccaatattcctgatcgttcccccaggttgacacaacacgtggcttatcgtgattctcaacaaacaaggcattccaccctttgttttcaaggcccttttgccaacgtgttagcactttttttagtgagacgatatcaagatcgggtttctcctctgcatcccataatccaagatgttcgaattgaaaaatcatgttcattttgccgtctttttcatctacccattgatcagcttcatcaatgcttacaccattcgcttctccaaccgtcatcacatcgtacttcgaatacgtttcattcttaaattcttgaaggaactcctgaattcctttttggttcatatgcatatcaaatgaagaaacatacttctcttttttagggttcggcatatcagggaaccctgagcgcttcttaatgtgactaatggcgtcgatacggaaaccatcaatgcccttatcaagccaccagttcaccgtgtcatacagcgcttcgcgaacatcaggattttcccagttcacatctggctgtttcgttgagaagacgtggagaaagtactggtctgttttcttatcatattcccatgccgatcctccgaaaatgctttcccagttatttggctccttaccattctttccatcgcgccaaatgtaccaatcacgcttcggatcttctttcgatgaacgggattcaataaaccactggtgctcatcacttgtgtggtttaaaacaagatcaatgatcaatttcatatcccgtttgtgaacttcttttaacaacaaatcaaagtcttgcattgtaccgaaatcttccataatgtcctggtaatcagaaatgtcatacccattatcatcgttaggagatttgtacattgggcaaatccaaatcacatcaatgccaagatctttaatataatctaacctctgaatgacgccttgtaagtcgccaataccatcaccgtttgaatcctggaagcttcgtggataaatttgataacctacagcttctttccaccagattcttttcatatctctacacctcatctatttagtaaagttcgtaaagtgcaaacgtttgcctaaaattcgataaaaaaagcgctttcttttttgcgtatttacttctacctacttgtagtttacttggatttgactcatttatcaatatgaatctgaaagtattttttagatcgtaacgttagatgctattgacgagcgcctaagacatctataaaatacgctaataatacgtaccaggtttcgtataattttggagatatggtccaaaggtttctaccaaactaccgtaaatggtttgactacgatgacaattctggcaatgtgaatctgtcatcctctgtctagactgagaggagcaaagcaatggataaactcatccaacgaattcaaacagctgctggcgatcgcccagccgattgtgtgattaaaaatggacttgttttagatagttacaacctcgaatttatccaagctgacgtcgcgattgtcggtggcgttattgcaggaataggaaaattcgaaggaaagcacatgattgatgcaaagggaaagtatgttgttccatctttaatagatgcccacgttcatattgaatccgcaatggttcctccatctgaatttgcaaaagccgtccttccttgtggggtaacgacgatcatcaccgaccctcatgaaatcgctaatgtctctggagctgaaggcatttcgtatatgcttcaagattctgagaatgtcccaatgaacatttactttatgctcccctccagcgttccttctacaccatttgaaaatgcgggagcgattctttcggctgaagacttaaagcctttctatgaacacaaccgcgttctcggactagctgaagtgatggattttccgtcagtcgctaatgcctccccttctatgctgcaaaaactgtacgacgcacaaaacaaaaaaatagatggtcatgcggcaggtctagatacccgtgctttgaatatttataaatcggctggcattggaaccgatcatgaatgcatcactgcggaagaagctctcgagcggataaaacgaggaatatatgtttttattcgtgagggatctgtcgcaaaaaacttaaagaaactccttcccgctgtaaccgaacgaaatgcaagacgattcatgttttgtacagacgataagcatattgacgacctgataacagagggaagcgttgaccataatattcgacttgctatccgagaagggctagatcctctcgtagcgattcagatggcctcactaaacgtagcagagtgctttggcttaacaacgaaaggagcaatcgcaccaggtcttgatgctgatttccttctcctagatgacgttgaatcattttctgttgcaaaggtttatcgagctggagagcttgttgcagaagaaggcaaaacgaagaggatcgcgaaggtaacgccttcgaaaagaataaccaattccgttcatctacctacgcttagaaaagaacacctgcatttacctgtaacggaccaagaagcaaatgtgattaaactgattccgaatcagattgtgacaaaagcaaagaagctcattgttgatcgcaacgctaacaatggttttgtctcatgtgctgaaaaggatcttatgaaacttgccgttattgaacggcatcaccgtactggaaacattggtcttggcatcgtagagggttttcagtttcaagagggagcgatcgcgacaaccgtaggacacgactcccacaacttaatcatgaccggaacaaacgatgaagacatgatgaaagcagctgaagtcattcaagaaatgcaggggggcttagcggttgtgcgaaatcaggaagtgatggcgaaattaccactccccattgcgggacttctttcaactaacgattacccgtctgttgtgagagaactggaagaaatcgatctggcgttacaagaaataggtgcgccggagcatttcaatccttttttaacactctcctttcttagtctaccggtcataccagagcttaaattaaccgacatggggctttttagtgttcaagaatttcgccatatttccattaatgagtaaagaagaaagcagcatggcgacggcgccatgctgcttttgcattaaagggagcgttttagaatatctcgaacgctttcccgatcaagttctttatatgtgccaacttctggcttaataaaggttttttcaaccatactttcgaattcagcatcatcgatctcatattctgcgagacgagacggtgcaccaagagagttccagaacgtacgaagtgctctcgctccttctacagccacttcgtaatcacttttcccttctggcgatacgccaagaacgttcacggctaactgtttcactcgagaaggatcttcttcaagtacatgttccaaccagttcgggaataaaatcgccaatccaccaccgtgaggaatatcgtaaacggctgatacagcatgttcgattcggtgtgtggcccaatcaccgccatcagtgccattgctcaatgttccgttaaaagccgtcgtactaatatacatcatcgtttcacgatgctcatatgattccagatcacttagtagctttggacctgtctgaatcgccgtacggagaagggattcaataaatccatcgatcatcggcgtattgcttgtgcggtgaaaataatgctctagggcatgcgacatgctatcaacaatgccgtaaacagtgtggttttctggaactgaaaatgtgtatgttggatcaagtacagaaaacgttggaaatacgtgcggagatccccatcctagcttttctttcgtttcccaatttgtaataaccgagacggagttcatctctgaacctgtagcagcaagggttagcactgttccaaatggtagagctgattcaattggttccttttgcgtgatcaaatcccacgctgagccttcatagtgcgaacctgcagctatcgctttcgtgcagtcaatgacactaccgccacctactgcaagtaaaaaatcaatgccttcttttttacaaatggcagagcctttttcgactgttgtgagacgaggattcggctctactccagaaagctcgtgcacttctgcatttactttcttaagttcagtcatgacatcgtcataaacgccgtttcgcttaatgcttccaccaccatataccacaagaactttcaccccataatgaagttctcctgctaattcctttattttgtctttgccaaaataaagacgggtcggattgtattgtaaaaatggtttcataaggcacctcattgtcattagtcgaagctagtgtaccatactccaatcgccaaactgtaggattgactatcggggattgatgacaatttcagactttgttttctccgcttgataagctgcttccattaacacggttagatcaagagcaagtacaaggtttttatctgtccctttatccgtttgaatgtggtcaatccactgtgaaaatggagaaggtttatccgttggtatcataacttcttcccatttatccgaaacttttttgattagttttttatcaggtattccgtagatagctgatccttttgtgccgtgtatttcaatggtaaatggagagtgaggcgttataaaatccgtttccgctactccataagaaccatcctcatacccgaatgttacgatagcctgatcctctacttctttcttcgttaaatacccgaactgagctgtaactcgttctggcattccatgaaaaagtcttgttaagtaaaccgggtgacaaccaaggtcaattaacgctcccccttgacactcctctttgttgtagaaatgatttggaagccaattagcagtcgctccattatgagcaagtcgcacgcgcgtctgcgtcagttctcccagctcacctgattcaatcaacctctgaacagcttccgtatagccatcataaacgcgcggcaatgaaacaaataactttaccccagattctttcactgcattcagtataacgatcgcttcttcttcagtagacgccagaactttttcggtaaaaatatgcttccctgcttgagctgcttgtaccattacttctttatgacggtttgtcggtgaactaacaactactgcctctatttcttgtcggttcagaagatcttctaaatcacttatgtactctacttctctcatttgagcttcttttcttccacgctcttcattctcgtcccagatcgcagcaatttcaatatcaggatgaactcgcgcttcttccgcataatcttttgcatggacgtgccagaaactaatcattccaatcttcatttttgtaaccgcctccatagttggtctaaaccagatttgtctataattgtaatggagtttgcatcgatcaatcaatcaaagtgccatatcgaaaaaaatattccattcgtacaaattaattgtttatgttataatagtagatgtgctataatttataaatttgggggtgggcgcttgtttgaggtaggcgataagattttttatcccatgtacggtgcaggtatagtcgaagcaatcgaggaaaaagaaatactgggtgaaactcagatctattatattcttaatatgccttttcgtgacattcaggtgatgattccaaaaggaaagacggaaaacctgaaaatccgtgaagtgtctgacgtcagcacaatggaccaagtacttacttcttttaacgaagaagttgacgtagaagagcccagtgcaaatagaaaccagcgttacagggataatatgaacaagcttaaaacaggagacatccacaatcatgtggaagtaatccgtgagctcgttgccctaaacaagaaacgaccactcggaactgacgataaaaaactactggaaaacgcccagcagtttctcataagcgagatcgttttgacaaaagatgttgaattagatcaagcaactgttatcttaaaagaagcgattaaacattaattttagctatacaaaaaggacagcctactgaggctgtcctttttgtataggtgaaggcgtaacacatacgctttagtttgtgctagctacaaaaccccagaccctcggccacttcacctttcaacctgaacacaaagggcgtgttcattttgaaaggcagcgtctgccgggtctaaacggggtttttccgctttactttacttccagctacaacacaccaggacctcggtcgcttcaccattcaaaccgaacacaaagaccgtgttcattttgaatggctccagcgcctgccggtcctaaacggtgtgtttccgctttagcttttccccaaagttttgttttggaaattggctatggcggtgtattcttcagttagttttcttgagattctgatgtagattgggagtagttctgagtagatttgaacgttttcttttttgggttcatggctaaatgtgtctcctacaaggtctgagacgatgcttagtgagtcgatttcgccgagtgcttttttaccgagaacgatggcaccgaggcaggagctttcatagctttctggaacggttacttcttggttaaagatgtcggccatcatttgtctccaaagagctgatcgagcaaatccacctgttgctttaatttgcttcggttcaccaattagctcttcaagtgcaagcaggacactgtataagttataaataaccccttcaagtactgcacggatcatgtgctcttttttatgatgcatcgcaagcccaaagaaacttccgcgcgcatcagaattccataatggagcacgttcgccagcaagataaggatggaaaagaagaccgtcagagccagggttcacctgctcggcaattcgagttagaatttcatacgtatcaatgccaaggcgttttgctgtttctgtttcagatgctgcaaattgatcacgtacccagcggaacgtgatgcctccgttatttacaggaccacctacaacccacttatcttctgtaagagcgtagcagaagatgcgtccttttggatctgtgacaggacggtcggttacggccctaatcgctccacttgtcccaattgttacagctacaacccctggctcaattgcattaacaccaagatttgataagacaccatcacttgccccaatgatgaagttggttgaagaagtaagtcctgtctcttcaatataaggtgcttttaaccccgacatcatatgcgttgtcgacaccggtttagacagttggtccgctgtaataccagcgattttaagcgcttcctcatcccaattaagttgctctagattaaataagcctgttgctgaggcgattgaatagtcaatcacgtattcatggaaaaagcgatagaaaacgtattctttaattgaaatgaactttgtaactgattgaaataattctgtttcatcatttttaagccaaacgagcttcgacagcggagacattggatgaataggtgttcctgttcggcgataaatttcgtgtccatccatgtcattttttattttctcagcccactgtgcacttcggttatctgcccatgtgatgcattttgtaagcggctttccgttttcatctactccaattaaactatgcattgctgagctaaatgaaacaaatttcacttgctctccacgtaactgattatcctgaattaccgtccgaatcgactctacgacagctagtagaatttgctctgggtcctgttctgccgtcgcgggtgttggtgtaaagagcgggtattccacattatgttttgaaacaggctgaccgtcatcattaaatagaacggcttttgtactcgttgtcccgatatcgacaccaatcataaattgctctttcatcgtcataagccattcctcctacttgattgatcttccactttttattatagcttctaagcacgcacgttacgaaagttgtcttgaaaacacctgtaagcgcgttcaattaaaacaaaccagtagtcattaaactatcaggaagcatgtttacgtcaacatgcttcccacatctatctatttaattgcttttttcagttgcgtgaccgccgaattcattacgaagagctgcaacgactttaccagtgaacgtatcgtcttctaatgaacgatagcgcatcattagggaaagtgcgataacaggagttgctgtttggagatcaagagctgtctctactgtccatttcccttcacctgatgagttcattacaccgcgaatttcatcaagattagcgtcttttgagaaagcctgctcggttaattccattaaccaagaacgaataacagaaccgttattccatacgcgcgccactttttcgtagtcaaaatcgtactcacttttacttagtaaatcaaaaccttctgcaatggactgcatcatgccatattctacgccattatgaaccattttcaagaagtgaccgctacccgactcaccagtgtagaggtagccatcttcaacgcaaatgtctttaaataatggctcaatggtttcaaacacagtgctatctccaccgatcatcgtacaagcgccattgcgtgcacctgacttcccaccacttgtgcctacatcaaagaaataaatgcctttttctaaaagcatttcacctctgcgctttgaatcgttatagtgggaattacctccatcaatgattatatcaccgcggtcgagaaggcccgacaattcagttgtaacatcttcagtgatatcgcctgaaggaaccatcatccaaagaatacgtggtgattctagtgattctaccacttctttaagagagtgctttcctgtaaagccctcttcattcattttctgaacctgctcgtcatttgcatcgtgtacaatcacgttatgttcatgatcacgtaagtttagagcaaggttgtatcccatcttgccaagaccaattaatccgacgttcatatgaaaaactccttatacgaatgaaatattttttcttatatactaattatacattaaatattttttgtttcaattggttgagcggaatctattttcatcttaattgtaatcggttacaatgataaaatcaggagtgatagagaggagaataaacatgcccgatacggaaacccgccactgccttccaagaatccgctcttcttattcgcaatttagcgaaaaagaacgacaggtggcggattatatattaaacaattccaataagattatccacagcacaattaatcaggttgcagaagacttgaacgtagctgatgcaaccgtctttcgtttttgtaagcgaattggtttcaaaggctttcaagcgatgaagattgccctggctgcagagattgttaatccgattcaggatattcatgaaaccatcacagaaacggattccccgaaagaggtagctgaaaaggtgcttcgatcaaacattcgaacgctagaggatacgtaccacatactggatgattcgacgattgatcaggccgttcaaattttattaagagctacacatattgaattttacggaaatggtggttcgggaattattgcgatggacgcacagcataagtttattcgaacaggattacgctctacgtcatatagcgatgcccatttgcaaatcatgtcagcctcacagctatcaagtagcgatgtggccgtcttgatttctcattctggtacgaataaagatatgcttcgcgtagctgacatcgcacgtgaaactggggcaaccacgatcgctatcacgaatcttgctacctcgccactaagtaaaaaagttgatattcctctctataccgtttcacaagaaacagactttcgctctgaagcgctcgcatctaggattgcacagctaagtcttgttgatgcactttatgtgaatattatgattgcgcgaaaagaaaaatcaaagcactcactgcaacttatgcgcgaagccatctcttcaaagcgaatttaacttaaacgactaccgcctatcctggcggtttttttatttgaatgttccttacttccaataaaattaaagcacatcgtaagacaaattaagaatcgtcgtgctaaactgtaagagttataattacagtacgtgtacaaaaggaggaacacaatgacttcaaatcgaaaaatgctacaaacttatacgctaccttccggggtagaattaaagaaccgtgtcatgcttgctccaatgaccaatttcttatcaaatgatgacggcactgtatccgcacaggaacttgcttattatgaaaagcgctctggcggtgtaggtgcagttattaccgcttgtgcttatgtggttccgcacggaaaaggcttcgctggtgaaattggagctaaccgcgatgaacagattccaggtctcaaaaaattagcagacaccattcactctgaaggtgcaaaagcgattctacaaatcttccatggcggaagaatgtgccctccagagctcgttccagatgaagaaatccttagcgcaagtgctgtcccagctgagcgagaaggttcgaaaacacctcgtgctatgacagaagatgaaattcaagaaaccattcaagctttcggtgaagcaacgcgaagagcaattgaagcggggtttgatggagtagaaattcatggtgcaaatacgtaccttctccaacagttcttttctcctcattcaaaccgaagagaagatgcatggggtggaagccttgaaaatcgcatgaaattcccattagctgtcttagaatctgtccaagcagcagtcaaaaaacacgctaatagcgctttcgttcttggttatcgcgtctcacctgaagaacgtgaaaatcctggcatcacaatggatgatacacttcaacttgttgatgagcttgcctcacgtgatttagattatgttcacgtttcgctatccgatttctatcagggttcgatgcgtgaggaagaccctacaccacgcatggaaatgatcaaagaacgaatcggtcacattgttcctgtcatcggtgtcggctctcttcatactccagatgaagtagaaaaagcacttgatacaggcgtacctctcattgcccttggtcgcgaaatgataatggaaccgaactgggtagagaaagtccaaaacggagacgaagaaaacattcgtgtaacgttacggaaagatgcacagcaagaacttgttttacctgatccgctttggaacgcgatattcagcgtacctggctggttcccaatcgaagaataaaatgaagaaagcccccacattttttgcgggggctttcttcatttcaatacagggcgtagatcttctagcttttcaaacaaatgccaaacaaaatcatcgacgccaagctcacgatgtggatgcaaatcttcaagatcaggatcattcacgtagttgtaaatgccttctttcgattcccattcaacaagcatcatcacctgcctcggcgcaatgttcccttctggagaggaatcaagcttcccaatagccacaacttttccaccatattgacgcagcggttcttctgcccttctagcatattcagcatattcttccccgtcttttacattaaatagattcagtgcgtacagcgccatgcttctccctcccactctttgttttactaactgttattggaatcccatttaacacggcggtgcctgagacagcatcacgtcgtttttcatcgcttaatagattggtattcacgcctttgttatcctttgctaccgccattttcacaccggtaagaccatgcccatagccgtggggaatgcttcctactccaggcataatgtcgtttgttagctccacaataacttcaagacgccctacttctgattgcacaacagcaagatcgccatcttgaatttcaagcctctctccgtctgatgggtgaagccataatgtacaccgatcttttcctttcataagcacaggtaggttatgcatccaagaattatttgaccgcaaatttcttcgaccaattaagagcatatcggatctgctcgcctcctccttcagtcttgttacgtcatctacaatcaatttaggagcgagctcgatcttccctgtatgcgtgagcagtacttctggaatccgtggttttaacgctcccaaatcaatgccatgcgggttctcttcaagcttctttagacttaaaccatcctgctgtttaaaatggtctccgtaaggccctgaacggagcatataatcaagcattcgctctggacctgttcgtccttctaacgcttccgatatgtcctttgggttgcgaccataaattggtgagcgatcatttttaatgtcttttttgataagatagtgtatcgatgcatcatctaatttgcttacggcatcttgatctggttcttcctctccaactaatgctgcaagctttaaaagaatttgccattcatcaagctgaccttcattcttttcaaaaacaggtggcgagtagtgagaaatattacgaaccgaaagctggtaaaaggaaaggtcatagtgtgagcgttcaaggggtgttggtgccggaaagattacgtttgcgtttctggtcgtttcatttagataacagtctacacttaccataaaatcaagatcttccattgctttttgtaatcgcttactatttggtgttgataaaacgggattacccgcgaccgtgacaaaagcgcgaatttgcccttcaccaggggtatccatttcttctgcaaggcacgcaacaggaagttcacctagcacttcaggcatatgactaaccctgcttctaaaacgatcaaaacgatagcctttcttagacgtttttccaccagcagcaggcgttgtgaacatgacgccaccttcacgatccaaattacctgtcacataatttatcacgtcaattaaccagctatttactgttccgaacgcctgtgtacatgtccccattcgtccatacacagcagcgcacgtggcagaagaaacgtctcttgcgatcgtacgaatcgtttctgcatcaagcccgcatacggctgccattttttctggagggaactcttttgccagtttctttacttccgaaaggccgtttacatgctgagcaagatgcgtttccttcgttaatccttcatcaaataaggtgtgaagaatactaaataagaaatacccatctgtgccaggtttaataaaatgatggtcattcgccagtttagcggtagctgtacgaactggatcgacaacaaccagacgcccacccctgtcctgtaaagctttaagtctcccacgcatgttaggtcccgtcattaagcttccatttgaaacgattggattcgcaccaataactagaaaatactgagtccgatcaatgtctgggatcggtatgctaaagtcgctaccgtacataaactctgctgctaactgtttgggaatttggtcaactgtgctggcagagtattgattacggcttccaagtgcacgaagaaacagaggcaaatagagcatgcctgataggttgtgcacatttggatttccaagatagacgcctacagcatcccgtccgtgcttttcaatcacaccccgaaggcctttccttacttccttaaaagctttttcatagctcactgtaaaccattccgccccttttcgaatcatcggctctcttatccggtctggatcgtgatgcaattcctttaaactaaacccttttggacataaataccctttgctaaaaggatcttgcttatctccttcaatatgcgtaacttctccattaacggtgtggatttctaacccacacgtcgcttcgcaaagtggacaggtacggtagtgaacgttctccttagccgaatccatcattgaaacctccttcatttgatttaaatataccaactggtcagtattttaattttactgaaaattccatcattattcaagggaaagaaaaagcctgatcagacgctatagaatccatttttttcgtagtgcatttgcaacagcttctgcgcgatggtttgcatttacctttcgaattgctgaactcatataatctcgagctgtaaaatcacttatattaagatgctgagccatttctttcgtactataaccatcagcagcatactgaagcacttcggtttcacgtttacttaaaggactaggggttggtggagttgttgggagcaagtaagcgagtgcgtgttgaaaatacatcatcacttcttcaataagaccttgatgaatcgtcactccttcttctctctcgtcaagaaggacgcaaccaattgcaatacgttcaatgctcagaggaataattaagacagatgttaaatcgtacgcttcgatgtattcttcggggaaaagctggtgatgctggtccatcattaaaaaagcgggtttgtccataagaagggcacgttgaatgggtggtatccgccttacgtcttcacgaatagcattcatagagaagacgccatggcgatccacgcgaaggattccttctcctatactagtaaagtaggaaaaagtgaacatgctcgcacgcatgaatggaaaatgagcaaggcactgctgaatcatgacttcacaacggtggattggatctttgatcgaaagcattcgatgaaaagagcgcatccacgcttcctcatgcatcgacataattcccccctatcttttcaggaatataacctttggacattattcgttacactaggtatgtaagcgctttctattatcgctcttttattatagaaggtgctcattgaaatcgcaaggaaaggcggtctattatgcgaaaggaaatgatcacaacgagtgtgcgtggacttaacgaagattcactaccatttcgcctctatcaaaaagctaagaaatttggcggatgggacccaagggagatcgattttactcaagatgtgaaagactggcagtttcttaccggtgatcagcaggaagaaattctaagactcgtatctcaatttcaagctggtgaagaagccgtaacgcttgatcttcttcctttaatcatggtgatcgcaaaagaaggaagattggaagaagagatgtatttaacaacctttctgtacgaagaggccaaacatacggaattttttcgagtttttctaaatgaaattggtcaaactgaagacctttcacgttttctctctgacacctatcgcaccattttttactcgatcttgccggatgcgatggagaagctacagcacgatcattcacctgaagcattagcggaagcatctaccgtctacaacatgtttgtggaaggtgttcttgctgaaaccggctatttctctttctatgaatctcttgcaaaagcaaatgtgatgccaggattaatgaaaggcatcggtttacttaaacgagatgaatcgcgtcatattggctacggaacatttttgctacagcgactgatcgctgagcatccccacctctttgatcttgttcagaacaaaatgaatcaactagctcctcatgcagcacagctaacacaagaagggatcggaggaagaacacatagtgcattcggaaatacgcttgatgcgactatggctttttcgatgaaacaactctccgttcgtatggatattcttgcacgcgcaaaaggaaaaagtatgaaagagatttatcgcaccactgaatcagatgttggcgttctttaatgtaaaggaggaaaaaagatgtcagttaacgtagaaatcaaatcatttcccctcttcatcaatggcgaatggactccctcgagaggaggcacgttgtttgacgtaatgaaccctgcaacaggcgatgtgattgcgaaagtaacaggcggtacagctgaagatgttgatcgagctgttgaagccgctactcacgcttttgaaaaggaagaatggcgggagttgcacccgaaagagcggtctaaattgttgtatacgatcgcccagaaaattatggaaaacggagaagagcttgtggcattagaagcactttcatcaggcggcacagtaagaaggcttgcttcaaatgatattattcaaatggtcgaccttttccaaacgctcggcaaattcgttctcgattatacgtattcagaaacccttccttctcccccgtttcctggccctgctcataactttatttggcgcgaaccaattggcgtatgcgcagccattacgccctggaacatgccgatgctgattgcaacgtggaagatcgctccagcacttgcgatgggaaacaccattgtcattaagcctgcaagctacacgccgcttactacgcttcgccttgctgagatcatctcagaagtcgtccctaaaggcgttattaatgttgtaactggaagcggaaaaaacgttggtgaacctcttgcaactcatcctaaagtcgacaaaatcgcattcactgggtccacagaagtagggcgccacattatgagcctcgcttctagcacggttaaaaacacgactctcgaacttggtgggaaatcaccttccattattcttgaagatgctgacctttcactcgctcttcccggtagcctattcggcgtttttcttcactcaggtcagctctgtgaaagcggaacaagattgtttgttccagataaattatatgatcaggtcattgatggtcttaaagaactttcagaaaagcttgtgtttggtaacccgattgacccagcgacggatatgggacccgtagtttctgccacacaaaaagaagctattttatcgtatatcgagaaaggaaagcaggaaggtgctcgtctcatttgcggtggtcatgaggtaaacgtgaaaggatgtgagaaaggacattttatcgctccgacgatttttgctgatgtgacaaacgacatgacaattgctcgagaagaaattttcggacccgtactatccatcattcgctatagtgacgtagatgatgcgattcagatggcgaatgatacaatttacggccttgcagcgggggtttggacaactgatgtgaataaagcctataaagttgttcgcaaactgcgtgcaggcgttgtttggattaatgactggcatatgctaaggaatgatgcgccatttggaggatacaagcaaagcgggattggtagagaaatgggcaagcattgccttgatgcgtatacgcaggtaaaacatgtgcatacctctatggttccagaagttgagcggagatcgtggtacagtcttctcttttcaaatcaatctaaataaaggagggcgaaacgtatgtctttaacctactcacaatatatgcttcgaaccgccattcatagtggcgccggcactcgcgcactcattccagaccttttcagaggacttgaggcgaagcgagttgttctcttcagtgaccgtggtcttgagcaggcagggattgttgaaaagatcaaagaaatctttgagctaacaccacatgggacaggtccagaacttgcaggagtttatcttgatattcatcaggatgcaggtagcaacgatgtgaacgctgcgcttaaatttgctagagaagtaagtgcagatggactcctcgccgttggcggcggaagcgtaatggacaccgtaaaaggagttaaatattccctgcatcacggcttaaccgatatcaaagaagcgatcccaggtggcctgctttatttatcatggccagaagcgacctatatgccaatccctcatatttccattccgacgacagctggaacaggatccgaagtatcgccaattgctgtaatctataacgaagaaataaagatgaagacaaatatcattcatcctttcattaatgcggacatggccattttagatcccgaactaacaaccggtttaccggctaaaattacagcattcactggatttgacgccttaactcatgccattgaagcgctggcatcaccaactgctactgctctaacagatgcgtatgcactgcagtcgatacgcctcatcgaatcccatcttcccaccgcagtgaaacatggagaaaatcttcatgcacgcatggaaatgttgcaggcgagcatgatgggaattacagcatttagctttgcccttaatgctattccagtgcacaattttgcacatgcatacggtgccctatttcgtattccgcatggactcgccaatgccgttttcttacccgttgtgatggaagtacttccagatctttaccttccgaaaagtaaagagcttgctgaagctctgcatttagagacatctgggaaagagaaacagacgctattaacagcagtgattgaaaaaattcgaaacatgcagcaggacattggactccctgctaattttaaggactattcaattccccccgaagcattagaggcaactgttgccgccgttaaaatggatccagccgctctcaactatccgcttcctccagaattgattaaagcagttggagaacgagtcattcatgctaaaaaagtaacagtataagcaaaagcaccgtgaaggtttccctcacggtgcttttttagtaagcaagcccaattgattctcgaatataaagatgattgcttaccgtttgaagcaaaaaagcagccacgtcttctcgtgatattcggcgtccgccttttggtaccccagttcgcgcctttcggtattccccggtcagttcatcattcgtcaatcccatcggacgagctattgtccactctacttcacttgcactaagtagatcagcagctcttccgtgatcagccaaaacgttttgcaacagctttcctgcaatgaaccctgttacacccggaatttctttgttaattcctgctgaagccatatacacaatgcgattcacaccatgaatactcatcgcatcgagaatattcgcggtcatcgtcgaaagttccgttgtttttccaagtccacttgccccaaggcaagaaacaaccgcgtcgacatcagaagacatggcttgcttcacatcagccgattgcattgcatcgccaatttcaacttgcaaattcttatgagaagtttcaagctttgaaggtgttcgaacaaatgctgttacggtatgccctgccgcaatcgcctgcctgataaatgcattcccagtagcgccagtcgctccgaatacaagtagcttcattgtattgacctctccccttctcatgcgttatatctctttcatccctttttataaggaatgtgaaacaccgtgctactttacttttttaatgaaaacgactttgagataattcccttctctgaactctttaatcgttcgaaaatcttcgggaagggtaaattcttctagaagctggtaacgaccattcgtttctttaaaggcttgatcaacgaatcctttaaattttttcatatcgtaaccgctatagttcgttgaagcgacgattatcccattatcttctgtaatggaaatcgcatcttttaaaagatctttatagtcttttgctgcgctaaacgtatgtttcttagaacgcgcaaaacttggaggatcaagaatcaccatatcgaacgataaattctttttcacagcatatttaaagtacttaaaaacatccataacaaggatgttctgttcttcataatcaattccattcacgctgaattgctcgattgttttatttaagcttcgattggcaaggtcaacgcttgtcgtgtgaactgctccaccttcaacagcaaaaacggagaaagcacccgtataagagaacgtatttagcaccgtttttcctttcgcatatttatctcgaattaatttacgaaccggacgctgatcaagaaaaacgcctaccattgctccttcatttagatacacggcaaagttcacaccgttttcttttacaatcagtggaaactccccgcgttcacctgcgacaaaatcatcatcttccacatactgccccttggcatcaaatcgcttcttctcatatattcctttaaattcaacaagctgctttaacgccccaatcacagcgtgtttaaacgaataaacgccttcactgtaccaattaatgaggtaatacccatcaaaataatcaatggtcaatccccccaggccatctccttcgccattcacaatgcgaaaagcagtggtcgtcggatcgttaaaaaaggattcgcggttgtgaagcgctgtttgaatttttctaacaaaaaaatctagatcgattgcttcgttttcgttttgcgatagcacccagccaaaacctttgttttgtcgtccataatagccttttgcaagaaatcggcccttatcatcttctaacctaagaatgaccccttcttcttttaggctgtctgcattcacgatcgcttctttaaaaataaggggataccctttttcaaattttttctgatgctttgcttgcacctgcacgcttcgttcgttcctcatcgtgtcatcctaacttttcatgttttttaatctgcttgcattatatcacgtattctttctcctccataaatcagtatcctcaggtggataaatcaatagatcggttcaaaaactaagagtgaaaggtggtgaaccatcgtgaaaacgaaatcaggaacagatattgaggaagtaaaacgccttaacgcaaattccggtctcagctataatcaagtcaaagcacagttagctaaaaaaatgatgaagaaaaacaatgagcttcattgaaaccttgaaatgagacgaatcacgtctttatcgtttacaataagctggtgctttactaacgcatcaggagggtttaaatgaacgaaaaaacaacttcaagctatttcaaaaccattcttcttttaagtgtggctgtctggcttgtagtcatgaatacaactatgtttaatgtagcactacctaacgtattaactgagtttaatctctcccctgctgatggcgcctggattgtatcaggatactcgatcatcctcgcgatttttacgattacgtacacgcgcttatcggattaccttccgatcagacggctgttaattgcagggattgtcatatttggaataggatctgttctcggtttctttgctacaacattccctcttcttcttgctgcacgccttttacaagcaacaggtgcagcagccattccaggactatcgatggtattcgcaggaaggtttattccattcgcaagacgtggaagggcgatggcgatgattgcatctgcctcatcgcttggtttcggtcttggtccagttgttggcggggttgtgacggagtatcttaattggaattacttatttacagtaacgttatttgtcgttttacttattccgattctctttcgtcgtcttcctgaagaagaagtccgaaaaggaacctttgatattgtaggtggaatcttaactggagccaccgtcacaagcttcttactctatatttcaacatttaactggttatttttagcgattggtatcattgtaggtggactgctttggcttcgaatcactcgaacaaaggctccttttattcagccttctcttttcaaaaacaaaggatatcgaaagcttctgtatatgagctatcttggcttcacgacacactttgccatcttattgctaatgccgctcatgcttcagaacgtttacgagaagggtccatctgttgttgggtatattatcttccctggcgctatgctttctgcggttgctgccatctatgttggcagactgctcgatcgttatgggaacatgaaagttatttaccttgctcatggactgctcctcatttcaaccgtgcttttctatttcctttctccacttaatgagtacatgattatggttggctatatgttcacaagcttcggtttctcaagtctttcttcaagtacgacaaatgaagtatcacgcattcttccttccgaagaaatcgcgactggaattggtatgaaacaactcactcaattcgtcggcagcgcgtccggatctgtagccggaggaatactattagagctaaacggattaacctacagcacacaatcctttcagctcacgtatgccttcttgttcatcttaatggctctatcagcagtgattatggttgtttatgcaagaaaagcgaaatcgtaaattcgtgttaaaacagaacacaatatgacccacatgaaaacccaccctaaacgactagggtgggttttcattcgacaaaaagcgcgagtgcctgtcacctcaagcccttctgccatgtaagcggaacaataaacagtagaagcacgagataaatccatataccaaatggaacatttgttactaaaaaatgaaggcctccaaatacaggaattaaaagcgcaaaaggaatcgttttccatccatcactctgtcctgcagactcgaaaggctgtgagaaaggaagcgttcctttcaacattcgaaagcaaatgacgctataaatcaaggcgactaatagtacgataaccaaatctggtatgatccggatcccaaacaaaaaaccatacaagatactaatgacaacaaataccggggcaaaaaggcggattagaaaggcttttaacgtacctttaatgatcactccgtcattttgcagaggtgtgacgtgataaatccatgagcctttgctcttgctcgaatactgaagcatgatcacaatgcctggaatcatcatcatgcttgcataaatggttaaatacattcgcccagaagtgatgctatctaaagattcaccagcagagtatccattgtaaagaaaaacaaaaggaaagatgatggcaaagcctaacgaaggatagattttaagctttaaatcacgctcattcttcaacattctttctgcaaattgataaaaagcatgctcttctttacttgttgttagaagggaagctagacggttcattcctttcgtcgttttctttttcgacggtcctgcctgatccattaatttcagtagatttttttcaaaggtaggtaatagcgaaaggtaaatccataaggcgattaaagggactagaagtgctaaagcaataaaaacatagtaataagctccgctagcaccatttaaaataacggcaaatggcgctccaaaccagaccggcggcaataacacgttccaccatgctgcttcaaaactagactgtaacccttgaaactcaaaggcacgtgcaagtacttggtaacctatgacaatagtaatcgatagtccaatttgcacgtagtttataacgtctctcaatcgttccccaccaaagaactttaatatcacataatagagtaaagccgttatcgcgacaatgaataagtcgctaaatagaaccgttacactaaataataagccaaaaataacgccaaactgaacgatgccaacgacaagagggacactcacgatcgctgctgttaaaaagaacaaatagacggtcacgtgaatcgcacgcgcagcactgatagtcctgtgatcaactggccttgtccctattaccgtctgatcacgaacgtccaacagtacagatgagaaatcagaaatcattgccgtcataattaaaaacattaacactccgaaaatcaaactcatcttaaacataaaattgtcgccaataaacaaaatgggaattaacgttaacccaatcaaagcataaaaccagagtgatttcagaaactggtttgaatcctgctttttttctccgcccctattttgactcataattgtggtaggtcgccttccatccatcgtcagcttcacttgaagaatacgcctcattgtcggataatcaatttcaaatcgctcaaacatcactcgaaacaaatcaagtatttttaacgtagtaaaattcttcatctttgatcacgctgaacgatctgcacaaaatcctcggcaagattttggtgctcattaaatcctgtcaattgattgaagatctcctccaaagacccttctttgtttttctgacgaagctgttcaaagcttccatccgcgacgattttgccatcgtttaatagaagaatgcgactgctgattttttgaacaacctccataatatgagaagaataaaagattgttttcccctgtgatgcaagttgtgaaagaatttccttaaacaccatgacactgttcgcatctagcccattaatcggttcatctagaaacagaatatcaggatcatgaagcaagctcgaaatcaataaaaccttctgtttcattccttttgagtaggaagaaatgcgcgaatcatacacgtcttcaaggtcaaataccctcataagtaaccgcgctttgtaatcggccgaatctgcgcttaacccataaagctctcctgtaaatgttaaatattctcttgcagttaaattatcataaagatccgcagcttctggtacgtacccaattcttttcttgtatgctaccccactctccttaatgttctctccaaaaatttctacttctcctgaataagatgcttctaatccaagcataattttaaccgttgtgctttttccagctccgttcgggcctatgtaaccaatgatctgtccttcataaacgtcaagatcaatctgatcgagaactagcttctcgccataccattttgttaatccttttaaagaaagtatcttgcccggtccgtggtccatgaaatcccctccgtatgtaagcttctacttctttctacgaaacttacaaaaaaaggtttcactctaaataggggtatcaaagaaaaagacgatgcttcatgcatcgcctaacctcttcttataggctctctctacctaacatagaatttgccttctctgtcagcgtatagccttttgaaagcttttcgagcatgccatccttctcgatcgatttgatggccttcacaacgtgcttttcttcccagtcgttcaacaaaccaaagttttcatcctcatgcaatccttgtattcgcaaggcatttgttgtttgtccagttaaaactttagtcatcacatgtagcggctcattctcatgcatcgaaatgaactggagtacaccttttaattccccgaaagtgagcacatttccctttatggttacatactgctcctcattacttggactgtgtgtgcttatcgagattaggttgtctaaataggcacgtacatgcgtaacctccgcttcactcacaagaggcataatcactctcggtttaaaaggttcaatggtatcggtagagatttttgaaagccatagtagcggagagcctcctctctcttcaggaagactcacctttcttaactgctcatataaagtcactgtatccggcgcttcgtttatttctaatctacttttgacgtccagcacctcgttataaaggtctacaactggttcaaacgccgagagcgcttttgctacctcatcgatcttatcaactaagcgaggtgttttttctaccatttcattaaattgacgttcaattgtcgcaatacgtttctgcgcacgttccatattgaactcttcttttagacgtacccgctcttctgatacgttataataaaccgcaaatctgcacgaatcacaacaatattcaatctccgagctcgcagcgtgaaaaatcatttctttttcatgtgagcaaatgctttcgcccctccataaccatgcatcaggaatttcgcggtaaggtcgcattacaatttctacacggtgccgccaaaaagaaagatcttcaggagagtttaacagagaaattaatggagaatgattgattttttctactgcttgaacaacttcttccttctcttttgctagttgaataaaaggatggcgttgaaaaccatcgacaatttgtttttcccaatcatgtcgagtctgttttgcgacatcagcgcaaaatagataatcgcgaagcacctgatcgaggtgatgatcaagcccttccgttgaaagatttatgtacgattcactataggtggaagagttatgaattggtataccgtgcatcggggaaaaagattgccagattaattgctcaggtttaatcaaatgtgggtataattcatcttctttatttaaaggaattggtaatacagcctcggtatcttgctcgagaaatgcctgcagtttcatgcgttcttccctagtaaaagcatccatttttcgtttcacatgatcatgaaggcgatgaagcaaccctttttgtactttttgtccaactgatcgaattcgtttattcttctttcccattggtacaaaagcaaacattggataagcgtcaaaatgatacgtatgttgttccacagtcattatgcaaaaccttctttctaccttccagttgattatccatcagtataagcctaagcttacatttcgaacaactattcgacatgcaaaaaacacattcagaagtgggatacttttgtacgacctagggtatataaaaagaaaatagaagttaaggagcacgtcctatgaagaagcggccatggtacagaagaaagcgttggattttattcagtattcttattctcatttatgtctctgttattacttatcatcgctttaagcctttgccagaaggggtttcttatgcaagtgatgttcatgaattaagtagtgatgaaatcgaattcctttatgatttaacatacgataaaaataatgaagaagtgtatgaccatagtatcttcgatgaagtaaacaaaacgattaaagaagccgataaatttctcattttagacctattcttatttaacgggtatacagatggaaaacgtaactatccgaaaattagcgaagaattgtcaaaagctgttgttgaaacgatggaaaagaaacccgaccttaacgtcattttaattagtgatgaagtaaatacaacttatggctctcaccaagcgaagcaaattaagaaaatcgaagacatgggcgctgaagtgatttttacagatttagaacggcttcgtgaccctagtttattttactcaggtctctggaggatggcgttttcctggtttggacaggatggcaaaggatggcttccaaatccaatggctccttctgcaccgaaagtaacagcaaggtcctaccttgaactcttaaatgtaaaagccaatcatagaaaaactgttatcacagaagatgcagggatgatcatgtctgccaatcctcatgatgcgagtggttttcattcaaatatcgctttcaaagtgaaaggcacaattttgaatgagctcattcaatccgagaaagctgtcgccacgtattctggaggggatgtgtcaaaattcccagacaaaccaatctctaatgcaaaagcaacagaagaagtaaaagcgcaaatcgtaaccgaaagtaaaattcaagatagcgttgtaaccgcgattgatgatgctaaggaaggcggtcttatttatattggcatgttctaccttgctgatcgagatattattgatgccatcgttgacgcgacggaacgagcagttgacgtaagactgatactcgatcctaaccaaaatgcattcggacaacaaaaaataggcttacctaatttacctataactgcggaactgacgaaacagggaaataagcacctctctatccgttggtatgatacgaacaaagagcagtttcatacaaaacttctctatgtaaaaggaaaagaagaaagcacgatcgtcggtggatcaggaaactatacctctcgaaacatggatgattacaacatggaaacaaatatccatttaaaagcatcaaacgatcagaaagtgatgcaagacgttgatcgctattttgaaagaatgtggacgaacgaagatggtacgtatacagtcgattacgaaaaatatcaaaattccctgtcttcttataagtatgtcatgtacattttacagaaattattccaggtaacaacctattaaacctaactaaataaaccccgagggaccggggtttattctttaccttgttcttcgtttatttcgcatttttttcacaatcggataaataatcggaccgtacttcatcgcttttctaatcaggtttctcataaaagataccctcctctgctacttaggactattcccgttttcctatgacataaacgaaaaaattaaagggatttcatgttatgtggtagaaatagcaactaagcttaaaactaggaggaaaatcccttttatgatcaaacaagtgagccagattgcgattcccgtgaagaaaatggaacgagctgtccagttttacaaggaaatcctggagctacagttattatttgaaactgatcaaatggccttttttgattgtaacggaatgcgtcttcttcttagcctcccggaaaaagaaaaatttgctcacgctagctctattgtttattttgaagtaaaacacattgaaaaaagttatgagcgattaaaaaaagatggcgtgttatttagtagtaagcctcatttggttgcgaaaatggatcataccgaaacctggatggctttttttgaggatagtgagcaaaatacgcatgccattatgagcgaaatttctacgaagtaaagaaaggatgccagttggcatcctttctttactgtcattaatcttcatcttttacatcaggatcttcaggaattggctcattcgcttcctcttctaatcttcgcttcattttgtcaagctgttcaaaatgagtattaaactgctctttatataacaaatgctgctcaccatcaaaaatggttcgaacgcggttttcacgaatgagcgtttcaatataagattcaggtagagataaatattctgcagtctctttaatcgtgaggtacataccgttgcctccaatgtcataatttacgtcttaagtcttatttcatttactgctctagtttctactatactgatctcaactactataagattaccatagagaatatacgggagggaacggcatgagaagtggattttatgtcattgttggtttgctagctgttggagcagtattgttaattttatatgaaaacacatcactttttgcaggaggaagcgatgagaatagcataaaagtgacggagcgaacggaggaaattaacataatcacgcacagtagtgatatgaaaatcgtccctgaagctcgaaatgatgtaaaagcagcattgaatgggaatggagaattatctttacgtaaacaaggggatacgattgaaatagaagtgaagcagaaatggtatcaatttttcaactttaatggaaaatcagatgttaccgtctacttacccgcggactttaatcaaaaccttaagcttgaagtgggttcaggaaatgttgaattaaaaggagctagtcctctcgttttaaatgatgtcgatattgagatgagctctggagatgttgaactttctaacttgcaaacgaaaagttttaaacatgatggttcatcaggacgactgatgattgatcagctctcaaccgaaaaaggaagctttgatattagttctggtgacgtgatcctaacgaaatattcggggccactaaagggagaaatgtcatccggggaaatgaaggttcaaatgaatcagttatctggagatgtgtcgtttgatttaagctcgggcgatgtggaattagatcttcccgatgatgcgaacttcacactcgatacagaagcaagcagtggcgatatttccacaactttcacgttaaaagaacaaacgataactaataacaagatttctggtgtccatggtagtggagaataccaagtaaatgtttcgctttcaagcggaaacgctcgcgtgtattaaatcgaaaaggatgatttactaacaaaatcccttccattattgccgggggaatgatggacagaagaatgcgggaaacaaagtaatactgctctcactaaaaaagctctccacgccggggagctttttcactaggaatgaggtttactttcaagtagaggtatgcgtgatttgtatttcttaattaatgtcttattccactcatctgatccatctacattcccacttttaaatacaggaggatgaatccctcgttcaattaactgctgaatggcttctactgtaataccgttcataacggccatcccgagtattgtcgaagtagaaccaaacgagatttgattcttctcattgtgcatcgtcgcatctcccgatggaacatgatgatcaatcaccaggtcaaccgtttcatacaaatactttcctgtatgatgtctggaagtttgcccaattgaagcttttcgagaagttactccaatcacataagctcctctttctttgctaagaagagctacatcgatcggaactggattacgccctgacgtcgatacaacaataacaacgtcacctcgttgaatatcttgatgagccataaactcttttgctaggtcattagttcgttctaacgcagaagaacgcaatccacccctgtgaagcattaagtcttcaattaaaataggacgaattggagcaagtcctcctgcacgataaaaaacttcttctgccatcatatgcgagtgaccacagccaaaaacatggacgatttgtccgttttcgatactcgttgcgacagcagaactagctcgctttataacgcttacttcttgttcttcaatgtcttgaagcgcttgattaatgtgatgaaagtattcgctaaacaagcggcatccccctttaacgcttaagtgtaatcataaatttataacgatctgctcgatacgaagactttacaacttctagcggtgtttcgtcggcaagtttcgtatttcgctgaatgagcaggattggtgcacccttttgaatattaaggtactcggcctcttgctgtgtcgctacagatgactccagcacctgagtagcctcttggatcttgatagcgagctgatgctcaatgtgatgatacaatgaatgttggacggtttcttctgttagtcctttgacgagattcgctgaaatgtacgtcttctcaagagccatcggaatgccatcagcaagtctaatccgttttatttcgtatactggagcgtgttcttgtatttttaactgctgcgaaatataagaaggagctggtacgatttcaaatccaacaagtttgctgctaggctccattccccgtgatttcatatcttcagtaaaacttgttaaccccatcaactgctgttcaatctttttttcggctacaaaagttccaacgcctttttggcgataaagatacccgccgttcacaagctctgtaatcgcctgtctaaccgtcatacgactaatgctaaaccgttcagcatactctcgctctgagggcaatgaatcacctggctttaattcaccacgttcaattaatccttttatccactccactaactgataataaatcggtaatggggacgtcttatcaatcatcgaacaaactcctttcagcgcacacttacaccagacaacgcttctttatcagcaataattgtaacatgagaatgcttgtttaataccgatgcaggaaaagactcgtcgacttcaccttccatcaattttttcatcgcatcgtttttcgatttacccgatacaagtagtaaaatttctttgcttttcataatcgttgcaatccccatcgtaatggcctggtatggcacttcctttatatcatcaaaaaatcgtgcgttggcttctcttgttgattgcgccagttcaacaatttgcgtcgttgcttgaaaggatgttcccggctcattaaagccaatgtgaccattactccccatgccaagaagctgtacatctatcccaccagcttcctcaatacgctcttcatagcctttacattcttctacgagatcaagggcggttccgctggggaggtgaacatttgtcgtaggaatgtcgactttttcaaataaattgttgtacataaaggcgtggtaactatttgggttttctggcgaaaaacctacatattcatcaaggttgtatgttgtcacctttttataggacgtgccgttttgttcatggtccataatcagtcgcttatatgtcccaagtggcgttcctccggtcgcaaggccgagtacaatcgccgggtttgtttgcactttgtctattagataatttgctgcaagttcactcatgtgttggtaatcattcgcttgaataattctcattctccccactccttccatttgaatatgcaagatgacctttacagaaagtcatcatcacttccccgtcttcagatcgtacgaaaagatctgcctcttttcctacagccagactgcccttacgttcaaaaactccaagctgtttggcagggttttctgatgccattttaatcgcactttcaagggagcatcttgtatactcttgaatattagtaagcgcgtctttcatttttaatacactgcccgctaaagtgccgttttctaatagcgccttaccatctttcacttctacttcctgtccacctaaatcatagcgaccatttttaagacatttcgctcgcatggcatctgttattaagatcacgcctgcatccgttttttgctgataagctaattgaatcatttccggtcgaacatgatatccgtctgcaatcacttctgttttcaattgttcattcaataatgcagctcctacaacacctggctctcgatgatgtagtcctttcattccgttataaagatgcgtaatgtgcgtagcgccacattttactgcctccatcacttgctgataagtggcatcagagtgaccaattgatgcgataacacctcgatcagtcaaataacgaataagctccagaccaccttctttttcaggcgcaagcgtcacgagtttaatcttgccttttgcaagcttattccaagcttcaaaaactcgaatgtccggtcgctgcatcgcatgcagcggctgcgcacctgctctctcactatttaaaaatggtccttctaaatgaatgccaagcacttcagcaccacctggcttttggttcttctccacatactctcctgcattcttcacagcacgctcgattgcttttgcttcctgggtaatggtcgttgctagaaagcttgttgtgccttctgcagggagtgcttgagtgatcgtatctagggcttctgccgtggcatccatcgtatccgctccattcaccccgtgaatatgaacgtcaatcatacctggaagcaaagatacattctcatgaaacgtatatactttttcaccatcacttttattacgttgcttcgccggtccaatttcagtaatgataccattctctactttaatgtaaccattctcaatcgtttctcgttcgctaaacactgttacctgatcgataacgaatcttgtctcagccaaaccaaacactcctcgcagttctgttaaatgaatactaccaccattaagtacagttgtctataccagtaatcgactcaatgttagatatgacgacataattggtatagacaactatatttagtgctgttatgatgaacaagataataaaacgttttcaaattttgaaaggggttgaacgtttatgctcggagctctacaacgcattggtaagtcattgatgcttccaattgccgtacttccggctgcagccttgctactaaggttgggacaagatgacttacttggtattccatttgtcgctgctgcaggtggagcaatatttgataatctagctcttatttttgctattggtgtggcgattggtttctcaaaagatagcaacggtgcagctggtctagcaggggcaattggttacctggttctcacacagggaactcaagctgtgaatgaagacatcaacatggcgattcttggaggaattttatctggtatcgttgcaggacttctatataatcgatttcatgatattaaactccccacctggcttggtttctttggagggagacgttttgtaccaatcgttacagccactgcaatggttatacttgcaggattatttggatttgtttggcctcctatccaagaaggcattaacgcgattggacagtggattattgatgcaggcgcacttggggtaggggtattcggattcttaaatcgactgcttattccttttgggttgcatcacgtactaaatagtttagtctggtttgttttcggtgagtataacggcgcaacaggagatctaaatcgattctttgccggagatccttcagccggaattttcatggctggcttcttcccgatcatgatgttcgggctacctgcagcgtgtattgcgatgattgctgccgctaaaaaagacagaagagctgaagtaagtggaatgttaatcggtattgcctttgcatcgttcttaacaggtattacggaaccgattgaattcgcctttatgttcttatcacctttattatatgggattcacgctcttttaacagctagctcaatggtcctcacttacgttctgggcatccaccatggatttggcttctctgccggtgccattgactttttccttaattatggactagcacagaaagcaggactattacttgttattggtttgatttacggagtcatatactttgtggtcttctacttcttaataaaaaaattaaacttaaaaacacctggtcgagaagacgaagatatggccttacaagcgaattctccttctgaaggtgacaaatacgatgtgatggctggacattttattcgtagcattggcggcattgataatatttcatccatcgataactgcactacaagactacgtttacaaatgaatgatatgtcaaaagtagatgaagcagaattaaagcgttatggggctcgaggcgtcgtcaaagtgaataatcgaaacctacaaattattgtcggaacagatgttgaatttgtggcggatgcaatgcgaggcacgcgctctaatccttctaaagagactataaactctggaacattaacaaaaacgatagcagatcaagcgtttattatgccagttaaaggaaagatcattccattgaaagaagttccagatgaagtcttttcttcaggaatgatgggggatggtttcgccattcttcctgaagacggccattttgtttcgcctgttgacggcgaagtcataagcgtattccctacaaagcatgcggtcggtatcaaatctgaaagtggagtcgaaatattgatacatgtcggcatcgatacggtcaatttaaaaggcgaagggtttaagactcatgtaaaagaaggagatacaatcaagagaggggataatctaatgactgttgatttaagtagcgtcagacgtgctgtaccatctcttgccactccagtcattttcacaaacttacaaacgttaaaaattaaaaagacaggaaacattcctcaaggcgatagcgggatcatttccattgattaatcgttagaaaatgaagaaaggcagcggaaattccgctgcctttcgttttatttattcattttatcaagaaatccgccgagcaaatcatctacgctctcttcttcctcttcttcaaccgctgagctttgctcttgttttgcctgatcccaatcaaaattcattagatcatcatcagacatcggtggtaaagcctcaacaggttctgatacttctctctggactgctctttcttcctgcaaataaagtgcctgatcaatatcaatcgagttactgttaaatgatgcaagaagagatgcagcgcgtacaggatctgataaaatttggtaaacgatgtttccaagaagcgcttctgaatgctcatgttttaaccaatccctttgggctttgcttaatcccttgggcaaaggtacagtaatcgcatcattatcgcgtctgatcgtttgcgtgacaccatctaaaacatactccgcaatgcggcttgagaagttccgtttttcttcctcttttaacttctgcagctgctttagaatatgatcaggtgtatcagaaggaaggcgaaaagtgattgcctgtcctctctgtaaccccgtcatccccgcctttttcatcaaatcaccctactagtttttgaccttgttcttttcttctttcttatcctggtgctgaggcttgctatttttacgagtgaagtcagagattagcttgtagtatgcattcgacatcatccaaatgctttctttctcatcttcaaagaaatcaatgttgtacccatcaaggttattgttcaacgtttttaggtaatctttcaatacaattgaaccgccgccaacgaaataacagatttcagattgagaattcttctgccagacgttacgaaggtgacgatattgtttcttcgcaagctccaagagaatacgatctgtaatatcatgaacgcttgtacgacttccgcggaccataatgtgattacgatcgttcttcttcgtaattatatccactacatcacgacggctatcgagttccaccccgtgcttcgagcgaatttcttcacgaatcgcttcaagcgactcagcaacgccaaggttaaagccctgcgccttatcatcgtcgacattacggtttttaatcaccgcgatatccgtagaaagaccaccaatgtcttgaattaaaatgcgcttgtcgatcaagtctttattaatgatatttaaatcgctatccataacaaggttaatgtaagctgcaaatccttcaggataaactttcacttcatcaaatttaatatttactttcttaccttgatatttcggtgttacaagaaactctacctggtgaacagaaccaagaagtcttgaacgataaccaacgtcttttccttcttttacttcacgaagtggaagacctgttccaagcgtgtaattggcatcaatcacgccgttttggtttttgaaattcgctgagttctttggatcaactgcatctaaagctagagaagcaaacagcattactagtgtttggtcttcttctgactttgcacttccaggatctaattcagtcgggttgtcactctttgttgctagattaccaactcggtagatcgcattgttatctttcaatgcaggggagtgaacgcgaatatgaataccatcaagcggatctttcgtatccaattcttcaattccaataacagggcgatcttctatatctcttgcaatcacatttggtatgtataggtcagattcgatttttccatagattccttttagtgagtcgttacctacatcgactgctgcaattcttgaattactcataaaaataatccatcctttcatatttaaaatctagtatttctactattaacttaaaattatagaatttttcaaacgaagtcaatgagtcaatctatctagtttacaattatgtttacttgtatacaataacgtatacttgtatacaaattatgtttacttgtacacgtttttgtacgcatactgttatgacggcttgtgtacacttttgtatacttgtatacgtaaaatgattacaagtgtacaaaaatgtattcatgtacacggattgtgtatacacgtatttttatttcattcagattttgttttagctactcccttacctccttattcttactctcttatttgatcagaatagagaaagagttaactagttttaagtgctatcgataagaaaaaaagactacacgaaaggtagcccttcaagaagtatttataaaaaagttacatcaagaacgcgactcctgcccaaaaccaaatttttaaacctaaagtaacaatgcctgttacgagacctgttatagcaaaacctttcttaaccgagtttttcttgccaattatcccaaaaatgatcgctaggacagccaatggataaggaattagagggaccataaagaggacaaggccaatgatgcctaacaccattgaggatacagctagaccattactgctactctctggttgaggtgctgtatttacgttaccttccaaatcaaattcccccttttgaacctgttttttttcataattgaatgtatttcattaatgaggattttattacaaaaaaagaagcatgcagcagtttttcatgccacacgctcccattttttatctattagtagtgattagctataaacaggttggccttcatttagacctagagtctgtgcaattaagtgattaatttctttaaatagctctggattttcttctaaagcgtatccatgtgatgggatcatttctttaatcttaggctcccattcttgtaggtattccgggaagcatctttcaaaaacctctaacatgacatgtacagctgtggatgcacctggtgatgcaccaagtagcgctgcaattgagccatctgaagccgtaaccacctctgtaccgaattgaagcgttcctttgccctgttcttccgtatccttaataacttgtacacgctgtccagctacaacaatatcccagtcttccttttgtgctgtaggaataaattcacgcaattcttctatgcgcttatcctcggataacatcacttgttggacaaggtatttcgttaatcccatttccttaacgccagcagccatcatcgttaatacattattaggctttacagaactaattaaatccatatttgaaccagttttaagaaatttaggcgaaaatcctgcaaatggcccaaataataggctctttttattatcaatgaaccttgtatcaagatgaggaacagacattggaggcgctcccactttcgctttgccgtaaaccttaccatgatgctgttcaatcacttcaggattattgcagaccatgaatagtccacttactggaaagccgccaatttgttttgattcgggtataccggttttttggagcaatggaaggctaccgccccctcctccaataaagacaaagtctgcggtatggatttctaagttatcattagccatatcttttacttttacttcccacaagccttctttcgtacgtttaatatcctctacgttactcttgtagtgaatgtctacattctcgcgttctaagtgctcaaacataagacgggttaacgccccgaaattcacatctgtaccagaatcgatttttgtcgcagccataggttcatcggatggacgaccttccataataagtggaatccattccttaagcttttcagggtcctcagaaagttccatgccctgaaacagaggattacctgacaacgcttccaaacgctttttcaaaaactttacgttatcttctccaaaaaccagactcatatggggtattggtctaatgaattcttgtggattgtggattaagcctttgttaacgaaataagaccagaactgtttagagagctggaactgctcgttaatcttgaccgccttgctaatatcaattgatccgtccgctttttcagacgtatagtttagttcgcatagagcagaatgacctgtccctgcattattccattcgttcgagctttcttctcctgcacttccaagtttctcaaaaactttaacattccattcaggtgctaattcttttaataaagatcccaaagttgcactcatgactccagcaccaattaagataatatcttttgtttgattcttgctcatgatacccttccttgtctcatttatttgtaataaaaagaataggcgctcatgctcaaatgtcataaaaagcaaggcgacacttaggtacacaacatgttctatcctaattataccttatcatagacaattgttataattgtagaaaaaataacagataatctgatgcgtttttactaatgtttacacattattaactagtaaaagggtgaaaataaagatggataagaaaccaaaatagaaatcagaccagttaaataggacattttagtatgcttccccttccaccttgtttacagacccagttgtttcgatatgaggctctgttaacacaaatcgactcgttctcttgcacttttcgtataatactattaaagtatatatcggttgaaaccgagtctagcttgcaatagatcagacggaaacttttttactttttaattttgggaaggtgttttcccttaaggaaagggtttagatatacatgaaagagaatttttggaaagagttgccacggccgttttttgttctggcaccaatggaagccgtgacagatgttgtttttagacatgttgtgagtgaagcagcaagacctgacgtattttttacagagtttacaaattcagaaagctactgccatccgagaggaaaagacagcttacgaggacgactgacgtttacggaagatgaacaaccaatcgtcgctcatatttggggagacaagcccgaatacttccgcgaaatgagtatcggtatggcagaaatggggtatcggggagtcgacatcaatatgggctgtcctgctcccaatgttgcaccaaaaggaaaaggatgcggactgattcgccgtcctgatgttgcagcagaaatcatccaagcagcaaaagcaggagggctgcccgtgagtgtaaaaactcgtctcggttacacagaagtggaagaatggcgccactggctgaggcaccttctggaacaggatattgtgaatctttccatccacctccgtacaaagaaagaaatgagcgatgttgatgctcactgggagctaattccagagatcaagaaacttcgtgacgaagttgcccctgatacgcttctgacgatcaacggagatattccagatcgtcagaagggacttgaacttgttgagaaatacggagtcgacggagtaatgatcggacgaggaatcttccataacccgtttgcttttgaaaaagaaaagaaagaacatacgagtgaagaattgcttgatctgctgagacttcagctcgaccttcatgataaatatgataaagaactcgagccgcgtatctacaaagcgcttcctcgcttctttaaaatttacgttcgcggctttcgcggagcaagtgaattgagaaatcaactgatgaatacaaaatctactgacgaagcacgtgctcttctcgatgagtttatagagaacaatggtttaaagggccagagtggttttacggtttcttgagtaaaatttgtttcgtttaaaacgatagtaggttctttataggagaggaaagccaatcgtgcttttctctcttttttatcgttatttaagcaaaaaaagcattggtaaacaaataagcatcccaatgccttcattactttaaccccctggcgattcagtgaatgccgcggcagttgcagatcttcttttagaacgattaaggacaatagtgtaggcagccccctctactctcaagcataatcacacccaggaaagccaacttattcatcacagcttaaaattaagcgagaaaaaggactaggaagatattctttattatcccagtcctttggaaatatttctgactagtagtttcctagtcaaaatatttcatatgtgatatctgtttcataccaccaaaaaccgtatttatttatgatacggttcccctcgattaatcttaaacgctcgatacacctgctccaccaagataagccgcatcagctgatgaggaaacgtcattttagaaaaagaaagcgtatcgtttgctcgttgaataacctcgttacttaatccaagtgatccaccaatgacgaaggcaatcttgcttttcccgtatgtcgctaactgatcaagatctcgagcaagttgctcagatgttttcatttttccgtttattgcaagagcgatcatgtgtgcatcaggtgaaatcttagacaaaatgcggtccccttctgcttttttcacctggatcatttccgtctcacttaaattttccggtgctttttcatcaggaacttcaatcacgtcgattttagcgaaaggccctaatcgctttgtgtattcttcaattccttgtttcaaatatttctctttcagctttcctaccgttacaatactgatattcaaaagttatccccacctgtgtatcattttgtaaatccacagcaaataaacaggttatccacagattttatccacatatacacatttttcatccacatatcgtgaccgaatattagttcgacaccatatatgttgcgttatttttacaatactcacattctgtggacaacttttctgtgtcatttcccactttctctagtacaggaaactgtcctgtttcatctacagcaacatcaagagccagctctacatgttcttcacaacaataaattttcatacaatcgctcctttctaaccatgtcgtttcaaaggtgtttttccaaaaggaaacaggagagtttcctcccctgttatggttacgaatgttgctgctcagctagcgtaacttcaacctcttgctttgttccttcacgatagatcgttaatttcacgcgatcgccaatttctttcttagtgtaaagaaacttacgtagatcaatggaattcttaatcttattcccgtccatcgctgtaattacatctaactcttttagacccgcaatttctccagaagatgttggaaacacgctcatcaccacaacaccataatcgaccttatcaggcagcttgagagactcgctccaatggtaagttggaatttcagatagtgattttgttccgattccaatctcaggtcttcttacttcaccgtacgattcaagatcgttgataattggctcagcgatatttattgggattgaaaacccgattccttctacgcttgattgagcaatcttcatagagttaattcctacaagttgacctgaaatattaattaacgctccaccactatttccaggattaatcgatgcatctgtttgaataacgtctgcattccaatcaatggtcccgttttggtctgtatctactggaaaggagcgctccggattactgattataccctgcgttaccgttccttctaggaagcctaaagggttaccaatcgcaatagctggctcacctggctttaacgtatcggaatcaccgaactctgcgaccattgtaaccgcctcagaagggattttaagcaccgccaggtccattagagggtcagtgcctacaagctctgctgaaacccgtttctcggcgtttaaactcacttcaagctgtcctgcaccttctaccacgtgattatttgttacaacaaaggcatctttaccctcttttttgtatataacaccagatcccgctccagcttctccgtaatcttctgcccagaaatcggttttctgcagattaataacacccactaccgcttcccctacgttttctaccgctgacgtaatatcatttgttacatcaatgctaaggttctttgtaatctgttgctgttcagcttctgattccgcttcttcttcttgaggaggagcgatatcaggtagcacccctacgtctgatagagcaggaaccgtaaatagaatgagcagtgcaccgaggattgcaccaactaatcccgccataaatgctccgccacggttccctttctgccgcattggtcggttgttttcatcgctatcataatagcccaaagtgttcaccaatcctttcaattaaaaaaggagacctttaagaccaatttcgttcaccaaactcttctctacgaatttataattttgttagaaccgtaggggaagcaggatctgtatcatataacgcaacctgctctcctactgcaaaaccattttgttcaagagtttgttggacagaaagtcttgccaggtctttcatgttattatctttacttaaatgggctaaataaatacgctttgtttgatcaccaataatgtccgacagggctgccgcggcatcttcatttgaaacgtgccccatatcacctagaatacgtctcttcacgttccatggatagcgccccatcattaacatattaatgtcatgatttgactcaaacacgagcatatctgaattgcgaatcgttcctttaatgcgatcacttacgtatccaaggtcagttgcgatactcaacttcttgccttcgtgatgaaatgcataaaacattggctcagctgcatcatgcgaaacaccaaatgattcaacatccagatcatcgaaagttttgattgtatccatatcaaaatgaaacttttgctccacgggtatttcaccaattaaacctgacatcgcatcccacgtttttgcattggcataaatgggaagcttgtagcgtcttgcgaaaataccaagtcctttaatatgatcactatgctcgtgcgtcacaagcaacccatccagatcctttggatcgagatgggctttcgcaaacagttcttcaagtttctttccacttaatccggcatcgactagaagcttgtgcttctctgtaccaacataaatggcattgcctgtgcttccacttgcaagcacactaaattcaagagacatataacgttcctctcctactcatcgcctgtaaccgtcttcggttttgaaggatcaggctgatcgctgtcatctgattccttctcctcctgttcactttcaatactttcttcagtatcactaaacactgttttttcaatcgcattaacgtaataatttttttctggatcatcattctttttattcgaaacaacaacttgccacgttggaacaaagacaaatgtatctcgctcatcttcatttgcgacagttgtataataaccaatcgacatattttcaacttcgtcatttaaaccaatatcttgttggttcaataaaaggccgatcgtttcagaagcaggatcaattttacgttctttgcctattttctgcaggcttaaataagtttgcgtataagaaacaactttatcgtcctcaagtgtgacaatcaacatgcctgattcttgactatatatcgggcgatcctcaaacgtttccacgaaataaacaatgtttgggttgttttcagcaggaccgtaatattgatacttcccaccttcgtaaacatacgtttctagaaagatcgaaaaggcagaaggcactgttggatcacttataggaaaaggcttcttaagggttgaaactaatttttctccatcaagtgtaatatcctgactcgttccttcttctagcgttttctcttcttcctctgtaaattcatgaacatctccactaataaaagacattttctctgattgcacaggaaggttcttttcataggttacgtttagattttttagctgatcttcaatcgtaacttgtttctgttgttcgatttcacttaattccgtttgctttttaaataaatcacttgccagaaagatattaaacactaggaaggttaagattaatatcgttttcgttctattccaatccaacttcttcccctcccagtgcattgctagtagattgcagcggtgtccatgtaccattcaatttcacaaaccattggggaatcagcgaaaagtcatatggctgatttgctgaacgatcaattgtataaccaactgtcatgttttgtatctcacttgttttaaagcttccttcttcaagtagggccacaacatcttcataacctggcagctgacgttcactaatttccttcgtgtattggataattttcaacatccgcttgtacgtgctaacatcattattttctaacgtcacgttaacttcatctaaatcttctgtagaagaactataaacgggataaccttctgtataaagacggaaagtgatttgatctgtatttttctgagaagatgtaacccattcgctcagcacatacttatcatcgtttaaatcagttatacgaaagccaaaatgcttgttaataaaaccatacgcatcaagaataggtgattcatttgctacaaattgacttgacgttgatggtggattcttaaagatcatgtattcattgtcgtaattaaacgttaaatctcggcttccatctgtataaagatctgaaatgttgttaaaggtgttcttttcaaccgtatcttgttcagggaaaagcgcttctttaaaatcttcttcatttgccagttcatctgtacttcctccgaatgaagcaatcgactgaccttgaatcggtaaataaaaaacaggagatttatcagaaacttgaagttctttagctcgagccatctccattttctccgcttcactactagtaatatcaaaggaagagaagacgtttgaataccattccttcactttactagaagcctcaatcgtggcacgcatgccaacttgactcgatgtgttgagaagaatgatctcattgtttttaccagaagcaatcgaaggaataataatacggtcaaacgtcgaaagaggaatatcgtcttttgatatgctcactaatttttttaacacatcatttgaaagcaaggtagggaaaataagctcaacgctatccccttctccctctaaatcttccatatcattttccaccgtaaaggatttaattttaattccagaaataaactcgctataaaagtcattaatggtgttgaatttaaaggaagtaaagtgctggttatcaatatgataaacgagctgatttggcttaaccacatcactaatattcacttcctgaataccaacaggacttgcttctgttggtgctgcttctttctcatactcaggttcgaacgtccagatctgccaggtgagaaataaactagttagaacaaggacgttcaataagattgttttaaaattctcaaactgcttctttgtcattctcacttgtcctcaacctcccttattcgtttataagggagagtaaagtagatcgttgttccatgtccccacttactctctgcccagatgtccccatggtgtgcatggatcatttccttggcaatagccaaaccaagccctgttcccccgatttgcctagaacgggctttatcgacgcggtagaaccggtcaaaaattttcgaaaggttattctttggaatacctacaccttcatcactaatgctaatccggatcttcttaccaatcgtccagcatcgtgcagtgatcgtaccgccgtcaggtgaatacttaatcgcattggataggatgttatccaacacttgcgtcattttatcttgatcgactttcgtataaattgcgacgcgaggaagctgtctgacgatgttaatattatctcgctttgacatttcaaatcgatcaaggacatgatcaaacatttctacaaaatcgacttccgtgaactctagacgatattcctttttatccattttagatagttgcagaagatcattaactaatcgaatcattcgttccgtttcattttgcgtcacacttaagaagcgaggtgcaatctcaggatcctggagcgctccttcttgaagagcttcgagataacttctcatcgttgtaagtggcgtgcgtagctcgtgtgacacattgacaacgaactcacgtcgctcctgttcaagctgttcttgttcggtaatatcatggagaacagcaattaacccgttaataggaccatcttctttatggataattgaaaaattaacgcgtaagataaacgtttgatgatcatcacttaaatcaagaatcattgaatctggtccattgtagacatcatcccacgttttctcttctgaaaactggagaattttattcaatgatgttccaaggaccgtttcacgtgaaacgctcatcatttcttctgcacgatcattcattaagataatcataccttcacgatctgtagcaataacgccatctgtcatataagcaagaacagatgtaagcttccgacgctcaccctccgtaatggcattagcctcttgaagtctacgtgttaaatcattaaaagccagagcaagttgcccgatctcatcttcgccatatacttttacttttcgtgtaaaatctccacgtgccatgacaagcgcttgtcttcgcatatccgaaattggccttgtaattgtacgagaaataataatgccaagtagcccagttaacactagcgcgatgagagcggattgagctaataagctattaacttcatctgcctgttcaaagacttgattcatatttgcttgaatgtagactgcgccgacagttgtattggtttcaccctttataggataactataagcaaaaaaacgttctccttcactgtcgatcaaaatgttttcctttgacacgccatttaaagcactattcacgtaatcgttcgttgcgcgtgttccttcaagaccgtcatcattaagtgtcccgactacctgccctaatgaattaacaacgagaatttggcgaatttcattttgcctaaaatttcttatcaagcttgtgatcgtattttcttcttcatcactcttactattcacctgatcagacacattatcagccaggagctcagcacgatctcgaattgaactcatatagttctgctgaaactgatcttctaatttgtcattaaaataaacagagataaactgaatcgcaactaaaatgaggagaacatatacaattgcaaacttaaaatggatggacttaaaaaaaccgacctttcccatctaaagtttactgctcctgttccggttcacgcatatagtaccccacaccacgtcttgtaataatccacgtcgggtggcttggattatcttctactttctctcgcaaacgacgtaccgttacgtctactgttcttacatcaccaaaataatcataaccccatacagtctgtaataagtgttcacgcgtcatcacttgtccgatatgcttcgataaataatgcagaagttcaaactctcgatgcgtcaattcaatcgattcctcgcgctttgtgacaagataagcatctggatgaatcgttagcgcccctactttaataagagagtttggagaagactctttctcaggctcctgctgacgacgacgcaaattcgccttcacacgagcaatcagttctcttgtgctaaaaggcttcgtcacatagtcatccgcgccgagttcaagtcctaacaccttatcaatttctgaatcctttgctgttagcataataatcggcatttcatattttttacgaacttctcggcaaacttccatgccgtcacgctggggtaacataatatccaaaagaatcatatcaggattctcttcctccactttagcaatggcttcatccccatcgtaagcgcaaacaactgtaaagccttccttctcaaggttaaattgcagaatatccgcaattggtttttcatcatctacaacaagaattttcttgtccattatgaacgctccttctttgatatgacaatatcaatttaccgttgatatgaaacatgcatactttcgtctattttatcatattatgtaggttttattacgatcttccctacagctcttcccttaacttctttcagagaaacgcttcgcctgttcaaaaacactagcttacctataaaaaaagaaaccttcagctctcactgaaggctcatttccttatttctttaagtaatccattggattttctaactcaccatttttatatacttcaaaatgaaggtggattccagtcgatttccctgttgtccccattacaccaattttatcacctttttgaaccgtatcaccttttgagacagagattgatgctagatgagaataggttgtcttcattccgttattatgactaaccgttacctgatttccataaccacttctcgtacctgcggctgtaacctttccattatcaacggttcgaatggttttatctgtcacaccagcaatatcgattcctttatgataagaaccccagcgttctccctgtttactagtaattgtacctccgacagctggccatccaaatgtaccggtccctttagaggaaatttctttcgttccgatcactatttctttagcaacaggttttttcgttacatcctctttcacaacctcttcctcgactacctgcccattctcatattccttagaatatgtaacaagcttctttcctttttctccatcttgctttactttctcttcgcctttaggaagcttaccgctttttttcttaatcacttcaaaatcgacttcttctgctttctcgacttcgatcgtttccaaaacagttgcaaactctttttcctgaagaaccttcagctgatcgccttttttaatttcatcatcattcgaaagattatttcgatccaaaagttcttctttctccatcttaaactcttccgcgatgtcgttaagagattgatttttttctacttcatattccgtctcttccttataaccattagccaagagcgaaacacctttttctttagacacaatttctctcggatgaacctctaccttttcaatttcaaaaggaccagagaagtcaaccgcttcaacaggatgaattccttcatctgaatcttccatgcttttaaccgtcttttcaatttcttttactttttcatcagaaagaaaaggtttagcatagctccaaagagcatccattgcttcttcttcactcgaaaaggttcccacctgctcttcatcaaacgaaagagagtagccttcaccaataaacgtgatttcctcttctagttgttcaagagcttccttgttatcataaggcggtttaaaaagtcgttcggttacgacttcaacatcattctcaactgaaagctcaataccatcgacatctttttcattcttgagttcttcaatgtttttgtctaataccgctcgactatcaaccgttccgacattttctccatctatataaacatgataaactggtttcattaaattatgaacagacgctccgactggttcgatccaaagaagcgaactgaaacttgtaataataacggaaagttgtaagaaacgacgtacattcatacttttcatgcgacttcctcctgcaatagctgaaactatcttttttactcacgtttcgcactttatcataaataggaagtcacatgggtacatgtactcaatttgtaataaaaatgtagtcttttcgtcacgatcgtggcaagtgatggtaagaacctggaaggttcttcatgagttaccacccgaactgatcaaaagagcaagctataaaatttcctcaacaaaaaacgcatacccctcaaagagagatatgcgatatatgtacgttgttaattgagaactatggtggctccggacggaatcgaaccgccgacacgtggattttcagtccactgctctaccgactgagctacagagccatgtttgttatagttgctgatagtttccatttaatagattaaatggcggtctcgacgggaatcgaacccgcgatctcctgcgtgacaggcaggcatgttaaccgctacaccacgagaccaagtagatattgttcacttacgtttgagagaaatcataccaagttatgcgtttaggttgcccctgaagggactccgataaaaatttaacaaggaagattaatcgacgcagttaaatttttggttgcaccattgatactacccttaaattctaacgtagaagtaaattcgacgtagtcagaattttaaattggttgcgggggcaggatttgaacctgcgacctttgggttatgagcccaacgagctaccgaactgctccaccccgcgacgatatgagtgtaaatatgttgcacatgctacataaatgctgtgcactgtttcttcctctacaaggttatgcttcgatgcttatccgtcgaaacaactcgatgttgattcttagatgtaacgctcgttgctccaccccgcgacgatatgagtgtaaattatctttcatttccttcttcaatatgtaaaagaaaatggtgagccatgaaggactcgaaccttcgaccctctgattaaaagtcagatgctctaccaactgagctaatggctcgtcataaatatcttgtaacgacgacaagatttatcatatcattggaattcataaaaagcaagcgatcttcaaaagaaaataaaaaaacagccatggagttagttgatttaatcttactttacccctttgcctgtttatttaatcgctctttcatcatttcacggatttcttgttttcgacgatgacgtttaatcgcaaaacgattaacctcttgaaaaatcaaagatgactccttttccgttttgagataaaatttcacaccaaagaagttacttgctctcgtatttgggtctttaggatcgttgggtttcccccaaacgacttcacctctaattcggaatggttcatcgtttaatttgatggagaactccatatccgtatgcattggtacttctagatctactgaaaaaccaataccttcgagtccaatatcatggatataaattttatgattaaattctagagcgacaggtgattctttttcaataactctcattcttgcggcaaatggaacgtcaagttgctgacgaaaaacctgccttttattacgactcatatgcacacctcatcaaagctcaccgattttaataatttaagtttatcataaaatttgtttttctgcagaattttccaatatctataccctttaaaaaaagctgacagttttaagctgtcagctctgttcattaagcaaaaacgccacgaatcatatttgtttgattgcgatcaggtccaactgagaagatcgacaatggaatgccagtaagttgtgatacgcgctcaatataatgacgtgcattaggaggtagctctcctaggtttttaacacccgtaatatcttccgtccagccaggcatttcttcataaactggttcgcattcagccaatactttaaggctggcaggaaattcttcaataatttcgcctttgtacttatatgctgtacaaattttaagcgtttcaattccagttaatacgtcaattgagttcagagaaaggtccgtaataccactcacgcgacgcgcatgacgaacaacaacgctatcgaaccaaccaacacgacgaggacgtcccgttgttgttccgtattcatttcctacttcacgaatttgatcgccaacttcgtcatgaagctcagtagggaaagggccatctccaactcttgttgtataggcttttgaaacacctacaacatgattaattttgctcggtcctactccagatccaatcgtaacgccacctgcaattgggttagatgatgtaacaaacggataagtaccctgatcaatatccagcataacgccctgagcaccttcgaaaagaacacgacggccttcatcaattgcatcattaagaacgactgaagtatctacaacatattttgcgatctgttgaccatactcatagtattcctctagaatatcttcttttttgaaaccttctacttcatacatcttttcaagaaggcggtttttatctgtaaggttacgttctaatttttcttcaaaaacttcacgatcaagtaaatcacaaatacggataccaactcgtgctgctttatccatatatgctgggccgattccttttttcgtcgttccaattttattggcacccttgtattcttcttcaacgatatcaagttttaagtgataaggaagaatgacatgtgcgcgattgcttatacgcaaattatctgtattgatattacgttcatgtaagtatgagagttcttctagaacggcttttggatcaacaaccattccatttccaataacacaaatcttatcatcataaaaaattcctgatggaatcaagtgaagtttgtacttcgtatcattaaatacaattgtgtgtccggcattgtttccaccctgatagcgagcgacaacttctgcattttccgaaaggtaatccgtaatctttcctttaccttcatcgccccactgtgttcctaccacaactactgatggcatttgagcacctccagatgcttccttgaattatttgtcagaagcatacttcttttttaaaaaacccaggctaagtgtaccaatttgatcctgataagtcaacaaacccgaacaattatataaacaatactaaatatgttcgttatttagtattgacttccccattaacataaacaaatcaagctcttttattatgcacaagattgttcatcataataaaaggccgccgcgctaacaatcacccctaaataaaaaagcctcaaaaatgaggcttttttaagcacctggtggcatgtcaccttcatcgtgacgcctctccagattaacgaacttattatattctttcacaaatgcaagctcgactgttccaacaggaccatttcgctgctttgcaataataatttcaatgatgtttttattctctgattccttatcataataatcatctcgataaaggaaggcaacaatatctgcatcctgctcaatacttccagattcacgaatatcagacatcatcggtcttttatcctgtctcgattcaacgccacgtgaaagctgtgacagcgaaatgagagggacttcaagttcacgcgcaataccttttagagatcgcgatatttcagaaacttcctgctgtctgttttcaccagatccatttccacgtatcagctgcatatagtcaatcaggatcataccaagacctttttcttgcttcaatcgcctgcacttggcacgaatgtcaccaacacgaatacctggtgtatcatcgatatagattcccgcattcgaaagacttcccattgccatcgtgagcttttgccagtcatcacctgttaacccacctgtacgaagacgctgagcatctatattaccttccgcacaaagcatacgcattaccagctgttccgcacccatctcaaggctaaagatcgccacattctcatcggttttcgttgcaacgttttgagcaatgttaagagcgaatgctgttttacctacagaaggacgtgcagctacgatgattaaatcgtttcgttggaaacctgccgtcatgcgatcaagctcagagaaccctgtagggatacctgtgatgtcttctgtattgttctgaagcgtttcaatattatcataagcagtgacaagaacatctttaatcgagataaaggctcctgtattcttacgctgagaaacttccataattgacttctcagcttccgaaagaaggttctcaatttcattctctttcgcatatccatcagatgctatatctgttgctgcgcgaatcaatcttcttaagatcgacttctcttcaacaattttggaataatactcaacgtttgcagcagttggaactgaattagctagatcacttaaataagatactccgccaatttcctcaagaatcttaagatcctgaagctccgaagttaccgtgacaagatcgacaggctctcctttttcagagagatcgatcatcacagagaaaatcttctgatgtgccgctcgataaaagtcttccggctgcagtacctctgttgctgttgtgagtgcatcgatttctaagaaaacagctccgattaccgcttgttcagcttcaatattttgaggtggcgtacgatcagcaaataaatcactcatgttgttttccccctgagcagttcgctattttccacccgtgatcacctactattgctctaccacatgtactttaacagttgctgttacatcatggtgcaatttaaggggtacatttgtgtaacccagggaacggattggttcatctagttcaattttgcgcttatcaactttaatgttgtgctttttcagttcttcagcaatatttttacttgtaatggaaccgaacaaacggccaccttcaccagatttcgtttctaattcaacctcaaggctttcgatcttttccttcaacgctttcgcttcatcaagctcttcttgcgctttcttatcgtcgctacgctgtttcgcctttagggttttcatatttgcattattcgcttctagagcaagattattcttaagcagatggttacgagcatatccatctgctacgtttttaacttcaccttttttacctttaccttttacatcttctaagaaaatcactttcatgattcatcttcgctcccttccaaatagttatcgattgtttccttaagcattgcctctgcttcttcaattgaacctgagtcaatctgcgtcgcagcgttcgttaaatgtccaccaccattaaggccttccataataatctggacattcacttcccctagcgaccttgcactaatgctaattttaccatcatttcgttttgaaataacgaaagaagcaatcacgccgctcattgataaaagcgtatctgccgcttgagcaattaatacttgatcataggtctgatccttttcccctagtgcgatcgcaatcccactccgataaatgtgggacttctctatgattttggctcttctaatatactgcgcaatgtcttcacggaggaactcttgaacaaggacagtatcagcaccatgcgccctcaaataagaagcagcatcaaatgttctagaaccggtcctaagcgtaaagcttttcgtatccacaataataccggctagaagtgcggttgcctccatgatgtccattttaagccgttttggctggtattcaaagagttccgtaacaagctccgctgtcgaagaagcataaggttccatgtagacaagaaccggatcttcaataaactcttctccacgtctatggtgatcaatgacaacgacatgatcgagcttttgcaaaagacgctcttccataacaagtgatggtttatgcgtatcgacgacaactaaaagcgtattaggcgtacaattctcaagtgcatcttcagggtctataaaacgtgcccaaagttgctcattcccttcaatctcttcgattaatcttgagacaccgctagtccgttgattttggtcaaaaacgattgaaccttcttttccatttgcctgggctactttaagaataccaatggaagcaccaattgaatccatatcagggtttttatgtcccatgataatcacttggtcactatcaaggacaagttcccgtaatgcatgggaaatgactcgtgctcttaccctcgtccgcttttcaatagggtttgtctttccaccataaaatttcactttccctgtcgtctgcttaatagcaacttgatcaccaccgcgtccaagcgcaagatcaaggctggattgagctaactgaccaagttcggtaagcgtactatgtccgctaccaactccaatacttaatgtaatcgaaacattttccttagaagtcgcttcacgaacttcatcaagaatcgaaaacttatttttttctaagtcttgaagaattttttgatttaaaacagcaaagaatttctcagatgaacttcgctttaagaagattccctgttcatctgcccagttatttagaatcgatgtgacggagctgtttaagttactgcgcacctggtcaccaagaccctgggtgacttcttcatagttatcaagataaataatcccaacaactgttttttcttcattataaagacgctgaatttctactttttcactcacatcaaagaaatagagcaatctttcttcttgcttaaaatacgttttgtattttcgatcatgaatcgttaaaatttcttcattcgcctctgattttagaaagggaataatttgttcagaaatatcattcaaagaaagtcctatcaattgctctttctccatcatgataggcaaataaggattcgtccattcgatgtgatattcctcatcatacagcaagattccaaatggcatttccatcagagcctcgtctcccaccttcttcacacggtgagacagagtcgaaacgtagtctctgagagcagcttggaataaagactcagctcgaatcgctgtataaacaagaagcgtcataaccactacgctcccaattcctaatatccagttgtaataggtgatgatgccgataaacaggatggaaatgacgaacaaggctaccacatgataaccatgccaccgtttcgttaaaaactttggcatactttcagctcctacctatgatttcattctccttcgcaattcgaaaccaagatcaatgattccaataataacaataaatgatgttagtgcgaagccaagaaacgttaacagaattggcacgacgatgggccatcctttttgatggcaaaaaaagtaaattacagcaagaccctgtacaaatatcagagcattgagtatagagtacacattaatggctgccacaaacacagccgatccttcttctaatcctaccatcataacaatagtaacaactaaataataccataaaaaactcttcggaaatgtccattctctgattggctgaaagactggtggctgaaagttgcctactctccttaaaatcggaacagaaagtagctgtgaaataagtgcaatcactacacccatgagcactaaacctgttggaattaaatagcgtaataaactaatttgctctttaagttgattaaattggctagtgtcctgaccaagcgaacgataaatcgactctgcttgttgaaaggattgattcatcatttccacgactaggtcagctggattttggccgatcactagaatacttgatacaaatgcaagcacaaggccgactacatacgctaacccgcttcctaccaatacagcaagtgcagacttacgaattgcgtataaatacccagcagttatccctccaagcgccaccgtgaacgtcataacgagagaaggaagacctgccgttaaaacccctagtacaagcgtcacagcccacatcactagcccactcttcatcccattgcgtacaaccatcaatataaacgggataggaagagcccagagcgtaagagagccgagaagtggtacataaatcgtaatcagaaacaaaacagcaaatacggccgcaagcgcagccccttcaactaactgcctaacaccttgattcttcaatagtcttctcctttttgtaaagcggagcgggcctgcttaaatccgtaggatgttggaacccatgagattgagacgctttttgtctcattcgattgggtgaaacagccgaaggatttggcccgcgcagctggatcagtaaagcggaagtgggcggttaggtccgacaagcgctggaagcctttcatttgaacacggtctttgtgttccgatgaaaggttgaagcgactcgaggacctgcccactgcagctggatcgtgtaaagcggaagtgaccgtttaggctcgacaagcactggaacctttacatttgaacacggtttttgtgttcagaggtaaaggtgaagtgctcgagagactggtcactgcagctagatcgtgtaaagcggaagtaaccgatgaaacccaataatcaattgcattctttcagtctctatcaatacagtatattcattcatttatcaacccgcttagttgaaatacaaaaaacgggtcgaaatccccttactacattgtaagaatttctgcccgtttcagcaaatgtttcattaatttgaatagtgagcattaagaaaaggctgtatcgttaacagccttttatgtactacataagagaaagcgtctcttccttcgcaccatccatctctttttgaagccactcgactaattgcatagatgcttcttgcgcatcttcgccgtcagcaataagtagaatcgaatcactttctttcacggtcagattaaacgtaataacgctcgttaaattctttccgttaatgctatgcccatttcgatagagagacacgtgactatcaaacgtcttcgcttttttgacgaatgccataagagaattcatactaagcggtgcggtaagtgttactgttgaagtttcaacgttcattattgtggttcctccttacaggattcttgtaaggattgtattccctcatcatgcatgagtgtaaaccacttattccaaaatcgcgtcatcatcttagaataactttgtatagaaaaaagcagtaggaaatcatcctactgcttttcatccttactcaccaagtacatatggtagtaaagccatttgacgagcacgtttaactgcgcgagtcaattgacgttggtatttagcgctagtacctgttacacgacgtggaagaatttttccacgctcagatacgaagcgtttaagaagatctacatctttatagtcgatgtaagtgattttgtttactgtgaagaaacaaacctttttacgacgacctctgcgtccacctggtcttgccatgggtagttacctcctttgcatttaaaattcgttctctgctttcaccgctcgaaacagagagtattagaacggcaagtcatcatctgaaatgtcgatcggcttgccatcgctcgcaaacgggtcatctccaaaattggagtgatcacggttgttatcacgattttggttctgattcccgtaaccgccggtttctctgttttggttgccgccaccgtagttgctactgttgccgcttccgccaccgccttggttagaacctttaggctcgagaaattggacgctttcagccatcacttctgtcacaaacacacgctgtccctggctattatcataagagcgagtctgaactcgtccatctacaccagcaaggctgccttttttcaagaaattggctgcattttctgcctgtctgcgccatacaacaatgttgataaaatcagcttcgcggtctccctgctgattcgtaaacgggcgattcacagcaagtgtgaagttcgccaccgctacgccactaggggtataacgcaattcagggtcttttgttaaacgtccaactaatacgacgcgattcagcatcagaacccctcctatttatagaacaattactttttagcttcttctaggttgatcgtcatgaaacgaagaacatcgtcgttgattttcatcaaacggctgaattcatcaatcgcttcagtgttactgttaatgttaagaagcatgtagatcccgctgttgaaattctcgatttcataagcaagacgcttcttacccatttctttagtttcattaatttccgcaccattgtcagtaaggattccgttgaaacgctcgacaagagctttctgtgcatcctcttcaatgtttggacggataatgtacataatttcgtagttacgcattccgttcacctccttttggtctaacggctcttaactggaattaagagcaaggagtaagtatacaaagataattactcacagctttagattataccaaattaattctttattagcaagtctatgttctaattgaacttttttcgtagaaattaatgctatacaccgattgatttacgctccaatcaactaagagtggagttttcaaaaccaattcaaaacatcaatctataagaaaagaacctaacttatacgttaaaacggaaatggatcacgtctccgtcttttacaatatactcttttccttcaagacgaacttttcctttttctttcgcgatcgccattgtcccagcttcaactaggtcatcataagcgacaatttcagcgcgaataaatccacgttcaaagtcggtatggataatacctgctgcctgaggagctttcataccaagacggaatgtccacgcacgaacttcttgctcacctgcggtgaaataagttgctaatccaagaaggtcgtaagaagcacgaattaatttgttcaaaccaggctctgaaataccaatatcctcaaggaaagcgtctttctcttccccatcaagctcagcaagctcagactcaattttcgcacaaacaacaatgacttcagcgccttcttttgaagcatattcacgaactttagcgacatattcattatctgaaggatctagaagatcatcttcatcaacgtttgctacataaagaacaggctttttcgttagtaggtgatacccatatacgattttctcttcttcttctgttagttctacacttcgagcaggctgctcttcctcaaacgcttctttcaattttgtaagaacgttaaactcagccaatgcttctttgtctttttgtttcgccattttttgaacgcgcgcaatccgcttatcaactgattcaagatcagcaagaataagctcaaggttaattgtttcaatatctgaaataggatctactttaccagacacgtgcgtaatgttctcatcatcaaaacaacgaacaacctgagagattgcgtctacttggcgaatatgagaaagaaacttatttcctagtccttctcctttacttgccccttttacaattccagcaatatcggtaaattcaaaagctgttggaatggttttctttggctttactagttcagtaagcttttgaagacgctcatcaggaacctctacaatcccaacgttcggatcgattgtacagaacggatagttcgctgactctgctcctgcctgtgtaattgcattaaataacgttgacttcccaacattcggaagccctacaataccggtggttaatgccatctcggtcactcctttaaagtatctgcctaaacaggcgatttttataaaataaagatggctaaataagccatttctagacatttttcttcaatttgatttacaaacgacataccttaccaattatagagatgagaacgtaaaaaaacaagcgtcctccatttctctgtaagtaaaatgaccgcccaaaatggacggtcaagattccgcatgctcaaggactttcttcagctttttagaaaactcttttcgtgggagcattacactgtggtcacaacctagacatttaatacgaatatccgctcccattcgaatcactttccatcggttctccccacacggatgagctttcttcatttcaacaacgtcatttaagccaaattctttatcggacataaggattccccctttatgctttttccttcacttcactctgttcatcacgttgatacatcacaacacgcggaagagcaatttcaattcctatttcatcaaaacgttgcttaaccgcttttctaatttctcgaccaatgacccagtgctccattggctgcacttccgagatgattctgagaaccacttctgaaggtcctaaattctgcacgccaagatattctggttttacaatcatagcatcgaactgttcatatagctcgtccaataaatgaatgatcactttttcagcttctggtatacgttcttcatacgcaatgttcacatccactacggcaatactattatgaattgagtaattcgtcacttgatttatgttaccattcggcagaatatgaagctctcctgtccagcttttaattttcgtaacacgcaatcctatttcttcaacaaaaccttccactccagaaatccgtacataatcccccacggaaaattgtttctcaaaaataataaaaaagcctgtaatgacgtcgcgaacgaggttctgggcaccgaaaccaactgccaaaccaacgacaccagctccggcgataagcgttcgaacatcgacatcaaactcactcaagatcatcacaagcgcaataaaataggtgacgtaggttaaaatattttcaattaagcggataagcgtcgcttctctccgttctgataatcgaagcgggcttttcaatcggatcgcgaaaatttgcgcaagggccgattttgcgatccgaagaaaaatccacgttccgatgataattgcaagaatagtaaatcctcttttgactatatttccccaaaggtcacgattggataaataatcgtacgcagaattccacattggctcgaaccaatccaagcatcatccctcccagtttttagtactatgataacaaatcataccgttttagaactgggaaaatcaagatagatgccaaaatatagaggttgagcacaccatagagagggtataaaaaagcaactagtgttgaaaaaccaaacgaagtaaaaggaatcattgtcaacacaatgagaaaggcaacgaaccataaaggaagtccaagtataccgcggaatcttgaagtaagaccaaacacaccgctaactgctgtcgtgtaaatggctaaccatagtaagacagacataattaagatcatatagtatggataacttttcaaaatcgcaaatagtggaatttcatataccagtagatcatgagcaacttggattaacgattgattgtagagaaacgaaacaccacccagaataaccccgcttccaacgctcgcaatccaaatctctccccgatgcttaatttgatggccaacagccgaaagaacagcaacgagtggtaaaatattaagtgcagtaaaggtaaatgctgcgggccaatttgactgctttgtccaattaaacaacatcgttgatggattagcatttataaacaaagtaagaacagaaagtagtagaataataagaagaggaagaataatagcattcattgataacatgccattaatatcccaaaagaataaaataacaacgagcactgcgagaattccaatacctaacgcataaggaagatgaacaacttccatcgttgccccgccacctgccaacatcacaatcgtcgtcgtaaataaatacaggataattaacaaatcataaatacccgtcaactttttcccaacaagtcgctctaaaataggaatatagtgcgttgacttcgtttcataactaattttcataaccacataacaacaaatcgagaacataaccgtaaacaatacaatggcaagtacactttcatgaccaaaaaactgccacagttcacggccagaagcgtaaccagcgccaatcatcgtgcctaatataagaaacagccatttcaatccaccgcttaacatggcattccctccttggcctactcgttatacgatcgaagtgaaatacatcgcaaaaatcatcttgtatgtatagatcacgtcagatttccgtatactgttactactattacaaaggagagaatcctatgaatcttcgagacaagttttttcaaaaaaagcctgctgcgtatcgaatccatcatgaggatactcttgctagtaaaacgcttagtgagaagctttccttacttttaccagcacgaagaacggattcaatcgtaattgtttgtattggcaccgaccgctcaacaggagatgcactcggtccacttgttggcaccaaactgcaacaactaaagccgaaagctacgatatacgggacgcttgaatcacctgtgcatgctgtcaatttaaatgaggttatggaatcaatcgcagagcgtcatccccgtccatttattattggaattgatgcttgtctcggacggcttcactcagtcggtattattactgctggagaaggtccagttaagccaggggctggtgtgaaaaaagagcttccggaagtaggaaatattcacttaactggtattgtgaatgtaagtgggtttatggaatactttgttttgcaaaatacgaggttaaatcttgttatgaaaatggctgatgtgatggcaatcagtcttcacgaatcgattgaagcttatggaagagacgttccaattgaaaaacacaaagcatcaaattggggagatgacctgattcaacttccataacaaaaagctcatgcttcggctacatagccaaacatgagctttttgaaatctacttaattaaagaatagcgggaaaaaagtacaaagccgtcacaagaatcgcagcaattaataaagcaggaagaaaattagccacacgaatttttatgataccaagcaagtttaggccaattgccataatcattatgcctccagctgatgtcacttctgcaataaaagcatcaaggaggatttgagggacgatttgattaatttgagaagcaaacaaagcgattaatccttgataaatcataacgggaatagctgaaaacaacaccccataaccaagcgtggcggtaaacataattgcggtaaaaccatcaattagtgacttcgtaaataaaatcgagtgatcatttcgcagtccgctatcaagtgcaccaagaatcgccatcgcaccaactacataaacaagagtagctgtgacaaaagcctgggcaacgctcccctcagaagcagctcctgttttcttttcaatccagctacccaatgttgcaagtttcccttcaagatcccagtactctcctagcatcccaccaataacaagactgccaatcacaataaggaattgctcgcttttcatggccatttgaaggccaatcaccgtaataacgagagcaagcccttgcataatggtcgttttcattctgtctggaattcgtctgctaactgttccgattaaagcaccaaccataatggctactccgtttacaaccgtacctaaaaacaccattccctacatctcctcagccgaagtacccctcaacaatttcttctattgcttcaattactttataaacctcatcttccgtattataaggccctacacttaaacgcactgttcccgttttgctcgtaccaatcgtctcatgaccaagcggagtacaatgcaaccctgccctcaccgctatttgataatgctgatctaggataattgcaatctcctgggcatctattccatcaatcgtaaatggaataacggcaagtcgttgttctggtccataaacgtgaacataatcgatttgattcaaccgattaactagaatctctgttagcttctgttcatgctttcttatttcatcaagacccattttttttaccgcatttaatccagctagtaaccctgcaattcctggcgtatttagtgtaccgctctcaagacgctccggcagttgatttggctgatcaattaattctgagctactccccgttccgccgtgataaagaggctttagttcgattccttcactaaccattagcacaccagtcccttgagggccaagcaagcctttatgaccaggaaaggctaatagatcaatgctcatatcactcatatggataggaacgataccagcggtttgagaggcatcaactaaaaaggtgatttctttttctcttgcaatcccaccaataacatcaattggaacaatgttaccggttaaattcgatccatgtgaaacgataatcatttttgtatttggttgaatcccctggcgaaatgcatcgctatcaaattcattgtattcccctatgttaaagtaatcgacttcaattcccacagcttttttcatgtattcaagaggacgacgaacagagttatgctcatatgaggtcgttagaacatgatctccttcaagaaaatgaaaacctttaatcgcttggtttagagccgcagttgcattagctgtaaaacaaacgcgttccgaatgattaaaaccaaaaaaatccgccagttgttcacgtgcacgaataactgtatcattagcacgtctagataaggcgtgcccacctcggcctggatttgctgcatactctgtcatcacctctgtcatagcctgaacgacttccggcggtttaggaaaagatgtagccgcttgatcaaaatatatcacgttaccaccccatcattttcgttagaataagagcatgaactaagctcatgctcttattcggtaccttcttgtaaaacctctaaaatacgattaagatcttcctctgaaaagaactcaatttctattttgccttttttctttgaccgtttaatcgagacagatgttccgaacttctcacgaagagaactttctttttccttcaagaacggatcggacttctcacctttctttgtttcacgtgaaacgctctgatttaattgcgtaattaacttttcaagctgccgaacgtttaatttctcttccaatgctcgatcagctaacgtttttcgagcttcttttttctttaatccaagaatcgctcgtccgtgtcccattgaaagtttcccatcagaaatatactcctgcacttcaggtggtaattgcagtaaacgtaaaaagttagccagatgcggtctgctttttcctaggcgctttgacaactcttcttgggtaacgtctgtttctttcatcaacttctgataagcaagagcttcttcaattggatttaaattttcgcgctgcagattttcgattaatgcgatttccatcatttttcgatccgttaactttttcacaacagcaggaattgttgtaagacctgcttcttttgaagcgcgatatcttcgttcccctactacaatttcataacccttaatactctgtcgaacgattaatggttgaagaacaccgaaagattcgatcgaagcacgcaattcttcaattgcttcatcactaaacttctttcttggttgatagggattaggacgcagttcattgatcggtatttctttcacaacctcgtcctctttttgagaagggaataaagcgttgattcccttgcccaaaccacgattagccattgtctaacacttccttcgcaagttctaaataagtttcagctcctcgagattttggatcatatacaatgactggcttaccatgacttggcgcttcactcaaacgtacattccttggaataattactcgatacactttttcttgaaaatatttcttcacctcttcaatgacttgaataccaagatttgttctggcatcgagcattgttaagagcactccttcaatttctaattctgtatttaaatgcttttgaacaagtcgcactgtgttcaataactgacttaacccttctaatgcatagtactcacactgcacagggataagcactgcattcgcagcggttagagcgtttattgttaataatcctaatgatggaggacaatctattataatataatcatactttttttcaactttattgagagccctcttcaatcttacttcccgggaaatggttggaactagttcgatttctgcacctgcaagctgaattgtcgaaggaatcacatgcaagttctcgacaattgtctgctggataacctcttccgcttccacatcatcgacaagaacattgtacacacaagtttcgatatcccctttttcgattcctacaccgctggttgcgttgccttgaggatcaatatccacaagtagaactttctttccaagataagcaagacatgcgctcatattaactgaagtcgttgtctttccaactccacctttttgattcgttatcgctacaatattcgccaagatgccaccccactctcattcacaactttactgtctttagtttatcatgtttccaatttcccggacctctttttcatttcctatccagtgcccaccttcacgttggcttgggtttttgataagaaaaaaactcatccgcctggatgagtttacttctttttcggtattcgaatggtaaattgatagtattcgtcgtggtcttcttcatctgtgtcaatcattaaaccagtctctgtaaccatatcaagcgattggcgaatggtatttactgccaatctcatatctttactaaccgattttttcctcggcttcggtttttggatcgtgccttctaacatacgagccacgcgttcttccgtctgctttacattccactgtcgttcaagaacttcactcagaactttcacttgattctcaggatttttaagtggaattaacgctcgggcgtgcctctccgtaattttcttctgtaaaagagcttgttgaacaggttcaggcaacttcaataaccttagcttgttcgctatggtagattgccctttgccaagccgctgagcaaggctctcctgtgttaaatcatgtagctcgattagttgagcgtaagccattgcttcttcgacagcagttaattcttcacgctgcaaattttcaataagcgctattgaggctgtttgtgaatcattaaattccttaacaatagcaggaattcgttcccaacccagcttcttgactgctctccagcgtctttccccggcaataatttcatacttgccttcacgttctctaaccacgatcggctgaataactccatgagtctttatcgtctgagatagttcagtaattctctcatctataaaaattgttcgaggctggaagcggttcggaataatatcctcaacaagaagttgcttcacttcctcttgttctgcttccatcgtctcgcttttttcatcgttcaaaccgaaaagacgtgaaaacgtatgcttcatcgcctaacaccacctttaatcgactccttaactgattcgctgcctaaaaacaaattccttccataggagcagcgttcatgtgaaacacttaaccgttcatatgcagtctatcttcattataaaggatttttatttggcgtgcctggctttcttggatattttttaggagtcgttttgatttttttaatcgttacgatatttcgctcacttttttcagctggtagtgttagcgtatctcgcttaacgacttctccaccaagaagcttaattgcttgctttcctgtatccagctcatcttctacatttggacccttcaacgccacaaagtagccgttagttttaacgagaggtagacataattcaccaagaacagacagccgcgctacagctcttgccgtaacaacatcatacttttcgcgatgatctttgtttttaccaaataattctgcacgatcatgataaaaagagacattttccaattgaagtttagaagaaagatgctccaagaaaccaattcgtttgttaagtgaatcgacaatcgtgatgtttaaatgaggaaaacaaatcttaatgggcaaacttggaaatccagctcctgctcccacgtcacaaatatggtagtcagaagaaaagtcaaatgagaatgcggccatgattgaatcaaagaagtgcttttcgtacacttcttccttatctgtaatagccgtcagattcattttctcattccattcaacaagaatttcatagtaggtttgaaattgttgaagttgcttagaagaaagagtaatccctttctcctctaacaactcctgaaactgttgctcgttcatagcccctccacttgtacgttattttgcaattttagcgattttaccttgttcgatatacacaagtaagatcgatacatcagctgggttaactcctgaaacgcgggaagcttgaccaatggatagaggacgaacttcgtcaagtttttgcttcgcttccgtcgcaaggccaccaatcgcataataatcaataccatcaggaattttcttttcatccatcttcttcatacgttcaacctgttgcaggcttttattaatatagccgctgtattttacttggatttcaacttgttctgcaacatcctcgggaatatcataatcagctggagcaagttgatgaatctcttgatacgttacttccggtctcttcaatagattagctgcatgcatggcttcttttaattccgtacttttctctggaagcactgcattcacttgttcgctcggcttaataacaactttctcgagacgcttcatttcttgttcaatcatttctttcttagccataaaccggtcgtagcgttctttcggaatcataccaatctcatatccaagctctgttaatcttaaatcagcattatcatgacgaagaagaagtcgatattccgcacgtgaagttaacaggcggtacggctcgttcgttccttttgtcacaagatcatcgatcataacgccaatgtatccttgtgagcgatccaaaatcaccgcttcacgctcctgtgcattccttgcagcgttaataccagacataatcccttgccctgcagcttcttcataacctgaagttccgtttaactgtcctgcagtaaagagatttttaactgtcttcgtttcaagtgaaggccataattgcgttggaacaactacatcatattcaatggcataccctgcacgcatcatttcaacattctcgagtccaggtacggttttaagaattttctgctgcaagtcttctggaagacttgtggatagaccctgcacataaacttcctttgtgttgcgtccttctggttcaaggaaaatctggtgtcgcggtttatcattaaagcgaacaattttatcttcaatcgatggacagtaacgtggtcctgttccttcaatcatacctgaatacattggagaacgatgaaggttatcgttaatcaacttatgcgtctcttctcctgtatacgttaaccaacacggtagctggtctgtaataaattcagtcgtttcatatgaaaaagcacgaggtttttcatctccaggctgaatttcagttttactataatcaattgatttattattaacacgcggcggagttcctgtcttaaaacgaaccatttcaaagcctaactcttctaaatggtgagacaagttaacggatggctgcatgttatttggtccactttcataagaaagatcaccaataatgacgcgaccacgcatgaacgtacctgtcgttaacacaacagatttcgcttcatactctgcacccgttttcgtaataacgcctttacagaccccatcttccacgatcagtttctcaaccattccttgcagaagagtgagattatcttgctcttcaattgttcttttcatttcactttgatagagcactttatcagcctgagcacgcagtgcgcgtacagcaggtcctttacccgtgtttaacatacgcatttgaatgtgcgttttatcaatattacggcccatttctccaccaagtgcatcgatttcccttacaacaattccttttgcagggcctcctacactcggattacatggcatgaaagcgacagaatccaggttaagtgtaagcatgagtgttttggcacccattcttgctgaagcaagtcctgcttccacacctgcatggcctgcgccaacgacaataacatcataagaatcggctttgtaacccattgccgtattcctcctttaatcttcttatttcccaagacaaaactgtgaaaataactgatcgatcaaactatcagaaaccgtatcaccaataatttctccaagaatctcccaggtgcgcgtaatatcaatctgcaccatatcaacgggcattcctgcctcaactgcttctaacgcgtcttcaagcgttcttcgagactgctccagtaaagcgatgtgacgagaatttgatacatatgttaaatcctgcgactcaacttcacctgcaaaaaacagttctgaaatggactgttctagttcatccacgccctgttcatgtttaagagaagttgtaatcattggatgttcttctgctaactctttcactctgtctaaatcaagtttcttatcaagatctgttttattaataataacgatgacgtccatacctttaacagcttcgaacagcttctcatcttcatgggttagctcatcattataattaagcacaagtagaataagatcggcttgcttcaaacgctcccgtgaacgctcaacaccaattcgttcgacaagatcttctgtttcacgaatacccgctgtatcgacgaggcgtaacggcacgcctcttacattaacatactcttcaataacgtcccgcgtcgttccgggtacatctgttacgatcgctttattttcatgaacgagactatttaacaaagaagactttccaacattcggtcgtccaacaataacggttgagagaccttcacgcagaattttcccctgccttgcagtaacgagaatcccttcaatctccttttctacttcttttaattgagtcgagaggagatccttcgtcatttcctctgcatcatattcaggatagtcgatgtttacctcaacatgtgcaacagtctcgagcaattgctgtctcaatgaagcaattaatgtcgataaacgtccttccatctgattcaatgcaacattcatcgcacgatctgtcttcgctcttatcaaatcaataactgcttctgcttgcgataaatcaatacgaccgttcaaaaaagctctcttagtaaattcacccggttctgcaaggcgcgctccactacgcaataccaactcaaggacgcgattcacagaaacgagtcctccgtgacagttgatttcaacaatatcttctttcgtaaatgtacgaggtcctcgcataaccgaaaccattacttcttcggcaacttgtttcgtatctggatcaatcaaatgcccatagtgaatcgtatgtgtatcaacagattcaagccgctgctttcctttgtataaccgatcggctatttttatggcctcttctccgctaagtcggacaatcgcaatcgctccttcacccattggagtcgatatcgcagcaattgtttcatattccacttacattcacctctctatccacacttcgtctttttatttaacgtctatttctattaataagtactattagtttaaccaattatccacagtggataactatcagcttaaaagcgacagactaatccacaataccttttagtgtaacccatttttataaaaaaagaaataacgatgcttatcctaacaacatcagacaaaagtataaaaaacagtcaattagcaacaaaacccttgttcctcaaaaaaacctccgggctacttgcccgaaggtttcatattacttattacgtggaacaatgaccacacggcggtgcggatcttttccatctgagtgagttgtaattccttttttatctttaagataaagatgaatcacttttcgttcaagcgacggcatcggttctagctgtatgtcctttttcgtaaccatcgctttgtctgcaagacgatccgccagtttttttagcgtatcttcacgtctttcacggtagttctcagcatcgagcaccacccggacaaatcggtcagaaaatcgatttgcggcaagatttgttaaatattgtagagaattaagagtttggccacgtttccctatcacaatcgcaattttttcaccagatagcgtaaagaaaagatcgcgatcttctcttctaccttctataccggcttcaactcccatgttgcggatgactttttctaaaaaagcccttgtttgctccatgatgtcaggtttctcgctaactttgatgcgggcgggctttcctccaaagcctaaaaatccttttttaggctcgtctaacacttcaacatcaacattctcttgaacagtcccgatttgattgagcgcatcttcgatggctttttcaatcgttttccccgttaccgtaacgcttctcacttcttcgctccccccgtattcgtatcagcggttttaatggtaggtttcgtaataaagtaagtttgcgcaatcataaagatgttacctacaacccagtataatgcaagtgctgcagggaaattaattgcaaaaacaataatcataatcggcataacgtataggagcatcttcatttgaggctgcaccgttccgccgctacccatcatgattttttgttgaatgaatgttgttatacctgcagtgagtgccaggatgatatctggctctccaaggctaaaccagaggaaagtatgcgtttcaattgcttgtgtacgcataatcgcgtgataaaaacctaatagaatcggcatttgtactaagattggtaaacaacctgcgagcgggttaaccccattctgttggaatagctgcatcgtttcttgctgaagctgctgctgcgttttctggtctttactgctatatttctcttttagcttctgcatttctggctgcagttcctgcatcgcttttgaacttctcgtttgtttgatcattaatggaagcaagagaagtcgaattaagatcgttacaataataattgagagaccataatttccttcacctgttaaatcggcgaaatacgttaaggtcatggatagtggataaacgatatattccgtccaaaatcctgtgctttctgcgttaactggctcgttaatgttacagcctgaaaggaccgcaacgagaccaattaatagaaatgcgagggttagttttttcctcacgcttcatcctccttgcaatcatatctcgacaaaatttatgtagttaaagcataccgctatttcttcttatctggaacagggtcaaaaccgccaggatgaaatggatggcatttcgaaattcttttcaccgtcaaccaggatccttttataaatccatgcttctgaaaggattcgaaactgtaatgagaacatgaaggatagaaacgacaggaaggaggagttaatggagaaatgaatttctggtagacgcgaattagcatcatagccatctttttcatttagcagcccttcctttaccagtctgtttcactccccttaatacacgcgcgcggttgagcacatgaattaagctactctttacttcttcaaaactcatctctgaagtaggttttcgagcaataacgacaaagtcatatggatatttaatttgatcggataattgatggaaggattcttttacgagtctcttcacacgatttcttgtaactgcatttccgatccgcttacttactgaaagacctagtcgaaattgaggttgatcatttcgctttaatacgtacacaacaaattgtctgtttgcagttgagtttccattcttgaaaacgttctggaactcagaattctttttaatccggtagttgctgttcaatccgcacactcccagtgttacttggataagcatattataaaccttatcttaaaaaaagaccactgatgatcagtggtctatgcagacaatacttttctacctttacggcgacgacgagcaagaactttacgtccgttagctgagctcatacgtgcacgaaaaccgtgaacttttttacgtttacgtgtgtttggttgaaacgttcttttcattctattacacctccctgaggataaactgtataaagacagtccaagtaattataagaaaagaggagggtaattgtcaagtttaattaaaatttcaagctatctctttcaaatctcaacatcaaatcatcaggtggatccaccactcagacttgtcctaaaatcattaacgaaagctctacaaacagtcatgtggataactattttcgacacttttcacttattcacatcacttatcgacagcttctacacaaaatctagtgctgtggacagtttgaatccacaagatatgtcctctgtggataaccacttgaaaaacattgcaaacaagctattcttttgttatgatatttgtgttttaactcgtgaataagattagcgaccagaaaactaatccacagtctgtggataaaagtgtggacagttattaagaggtgttattcatcgtatccacaacggtgtgaacacagtcgataattcgactttcttctatattatatgatccacttcgatactgtggacagtataattattcgtgaatattcaaatgattgtacaaaggttgtacgttggcacattaggcgactatcgtcagcgattacagcctgtttttatttgggtgaaaaatgcaggctacctattgaattaagtatcatcaatagaagtaaaccggtttgccctagttagatatttttgaacaaaaggagggacttcgttggataacatcacggatctctggcaacaggctctatccgaaatcgaaaaaaagttaagcaagccaagcttcgaaacctggcttaagtctacttccgcaaaccgaatggaaggcgacacgattattatcactgcccccaacgagttcgctagagactggcttgagtcaagatattcaagtttaataacggaaacgttgcttgagctgaccggaagtgaattacaagctaagttcattattccccaaaatcagtccgatgctgatttggatcttgaacaagctatgaaaaaaaagcctaagggaaatccagctcaagaagaacaccctcaaagcgtgcttaattcaaaatacacgtttgatacgtttgttattggatctgggaaccgctttgcgcatgctgcttctttagccgtagcggaagcaccagccaaagcatataatccgctttttatatatggaggagttgggcttggaaaaacccatttaatgcatgctattggtcattatgtgatcgagcataatccgaatgcaaaagtggtttatttatcatcggaaaagtttacaaacgaatttattaattcaattcgagataataaaaccgttaattttcgaaacaagtaccgtaacgtagatgtactactgattgatgatattcaatttctggcaggaaaagaacaaacgcaagaggagtttttccatacattcaatgctcttcatgaagaaagtaaacaaatcgttatttcaagtgatcgaccacctaaggaaatccctacactagaagatcgacttcgatcacgatttgagtgggggctaattactgatattacacctcctgacctggaaacaaggattgctattcttagaaagaaagcaaaagcagaaggtcttgatattccaaatgaagtgatgctctatatagccaatcaaattgacactaatattcgtgaacttgaaggtgctctcattcgtgtagtagcctattcttcattgattaatcaagatatgaatgcagaccttgcagctgaggcgttaaaaaacattattccatcttcaaaaccgagagtgattacgattcatgatatccaaactgtcataggagatcatttttcagtaaaactcgaagactttgcggcgaagaaaagaacaaaatctgttgcatttcctcgtcaaattgccatgtacctttcgagggaacttaccgatttctcacttccaaaaatcggagaagaatttggtggaagagatcatacaaccgtcattcacgcacatgagaagatctcgaaattagtggattctgatcaagcttttcaaaagaagctacaagatatcgtcgagcagctaaaaaacggataagtctctttttgtggatagtagttaatagagtgtgtacaattatcaacagttactaacacattatccacaggtggataacttgtccgttatgggtttgtgaacacttatccacacattcacagcccctactattaagactacgatttttttaagtaataattatataatctgggtcatttatttaggaggtaaattatgcgtttcaagatcgaaagagattatctagtatcaagcgtatctgatgtaatgaaagcagtgtcttcaagaacaactataccgattcttacggggattaaaattgtagcaagtgatgaaggcgtaacgttaacaggttctgactcagatatttcaatcgaatgtttcattccctcagaagaaaatgataaacaaattgttgaaatctctcagatgggaagtatcgtacttcaagctcggttcttttctgatatcgttaaaaagctaccaggtgatcaggttgagatcgaagtacacgatagtttaacaacaagaatccgttcaggttcttcagaattcaacttaaacggtttggatcctgaagaataccctcgtttgcctgaagtagaagcacaagaaggttttcagatccaggcagacttactaaaaaacattattaggcaaactgtatttgctgtttctacatcagaaactagaccggtgttaacaggtgtaaactggaagctagaagatggggaacttaactgtactgctacagatagtcatagacttgcacttcgcacagttaaagttgaaccgaatggtaatgacctttcgttttcaaatgtagtgattccagggaaaagcctaagtgagctttctaaaatcattgatgataacgaagaacttgttgatattacggtgactgaaaatcaaatattgttcaaatcaaatcacattcttttcttctcaagacttcttgatgggaactatccagatacaagccgattgattccaaatgaaagtaaaacaaacgtaacagtttctgcaaaagaattgttacaagcaatcgatcgtgcatcagtattagcacgagaaggaagaaataacgtagtaaaactcgcgagccttgaagagtcaacgctggagatttcatcaaattcgcctgaaattgggaaagttattgaacaagtacaatcacattcttttgatggtgaggaacttaagatttcatttagtgcaaagtacatgatggatgctttaaggtcaatggactctaacgaagtaaatattagcttcactggggctatgagaccgttcttaattaaaccaattgaaggtgctgcgattatgcagttaatcctccctgtccgaacttattaaattctaacaaggtgttacctatggccattgagaagtttttcttccagtggcttttttttttgctttttatgaaatttccactcgattattcatgcgttataataaaaaaagagttataataaactattgtcatccttcagactctatatagtaagatagagcaggaggaaaatgaggtgaacgaacatgaatgaaattaaactaattaaagaatacatcactcttggacaacttcttcaagaagcaggagtgatcaatacaggcggaatggcaaagtggttcctgtcagagtatgaggtctatgtaaacggagaattagaagaccgacgtggcagaaaactctacaaaaaggatacagttatgattcctggcgtaggagagtttgttgtatctagctgaatgggggtttcccgttgcatctaaacacattaaaagtaacgaattatcgtaattatcataagcaagaacttcagtttgaaaataacgtaaatgtttttcttggcgagaatgcgcaaggaaaaacaaatatcatggaagccatctatgtccttgctatggcgaggtctcatcgtacaccaagagataaagaattaatcaattgggacgaggaatatgctaaaatagaaggtagaattgaaaaacgaaatggtcccctctccctccaactggttatttcccaaaaaggtaagaaagccaagctaaatcaattggaacagcagaagcttagcaactatattggtgccatgaatgttgtcatgtttgcaccagaggatctcaatctggttaaaggtaatcctggcgttcgcagaaggtttattgatattgagattggccaggttcaacccgtttacctttatcatctgggacgataccttaaacttcttcagcagcgaaacagcttattgaagacgatgcgatatcaaaagaaacctgattatgtcatgcttgatattttgaccgaacaattaatagaagcagctgcgaatatctatttacgacgagtacgattcgttcaactcttgcaacaatgggctgaaccaattcattatgggattagtagaggactggaaaaactcgaaatccattataatccgaccgttgaggtatcagaaccaacggatttgtcgaaaatagtagatggatataaggaaaagtttgataaaattaaagagagagaagttgagcgtggcgtcacgctcgcgggaccgcaccgagatgatttgtcgttttttgtaaatggaaaggacgttcaaacgtatggatcccagggacaacagcgaacaactgctttatccctgaaactcgctgaaattgaattaattcatagtgaagtaggcgaatatcctttacttctactcgatgacgttctgtcagagttagatgactttagacagtctcatcttttaaatacaattcaaggaaaagttcaaacgtttgtgaccacaacgagcgttgaaggcatccatcatgaaacgcttgaaaaagcgacgacttttcaagtccaagaaggactaatcgaaaaggtgaaatgaggtgaagtgttgtttatacacttaggagaggacgttgtcgtccaatcgagagatgttgtaggaatttttgattggcaagttatggaggaagcagagatcacgagtgaatttttgcatcgccatcaaaaagacaggctagtagaagacatcggtggtgatttaacgaaatcgatcgttatcacgactgacacggtctatttgtctcctttatcttcactcacactaaaaagacgagcatacacaatctcagacagtgtggaagttacatcaaatggagaatcatcttaaaaccaggttgtctgatcatcagcaagctgaattgagtctatctttgatagagaaatgtaggtgaacaatatgacattagagcaacagtcgaataaagaaagttatgatgaaagtcagattcaggtccttgaaggacttgaggctgttcgaaagcgcccaggtatgtatatcggttcaacgagtagccgtggactgcatcaccttgtatgggaaattgtcgataacagtattgatgaagcccttgcaggatactgttcgcaaattactgtaagtattgagaaggacaatagtattacggttgaagataatggacggggaatcccggtcggaattcaagaaaaaatgggacgtcctgcagttgaagttattatgaccgtactgcatgccggcggtaagtttggcggcggcggatataaagtatctggtggactgcacggtgttggggcatctgtagtaaatgctttatcctctaagcttgaaattacagtagagcgtgaaggaaaggtttattatcagagctatacgcgcggtgtgcctgatgaagacctaaaggtgattggtgaaagtgatgtgacgggtacaacgattcacttcatcccagataacgagatttttactgaaacaacagagtatgaatttgatattcttgctcaccgccttagagagcttgcattcctaaaccgtggaatcatgattgttgcacaggacaagcgtcctgaagaaacgaaacgcaacgaataccattatgagggtggtattaagtcttacgtagaacatttgaatcgttctcgtgaagctctacacgaagaaccaatctttgtagaaggtgaacgtgaagggatttctgtggaaattgccgttcaatataacgatggatttgcaagtaacatttattcttttgcaaataacatcaatacccatgaaggcggaagtcacgaatatggctttaaaacggctcttactcgcgtaattaatgactatgcacgtaaaaatagtttgttccgtgaaactgatcccaacctgacaggtgacgatgttcgtgaaggactaacagccatcatttcgattaaacatcctgatccgcagttcgaaggtcagacgaaaacgaagcttggaaatgctgaagctcgtacaattaccgaatcaatctttggagagaagttctctactttcctttttgaaaaccccctcgttgcaaagcaaattgttgaaaaaggccttatggcttcaagagcacgtgctgcagcaaagaaagcaagggagttaacaagaagaaaaggcgcacttgaagtaagtgcacttcctggtaagttagctgattgctcttctaaagatgcatcgatctctgaaatttatatcgttgagggtgattcagccggcggatctgcaaagcaggggcgtgatcgtcacttccaggctattctgcctctgaaagggaaaattcttaatgtggagaaagcgcgtctagataaaatcctttcaaacaatgagattagagccattatcacggcactaggaacagggattggagaagatttcgatttagcaaaagcccgatatcataagttgatcatcatgacagatgccgatgttgatggtgcgcatattcgaacgctcttattaacattcttctatcgctatatgcgcccgttaattgaaaacggctatgtctatattgctcaaccacctttgtataagatttctcaagggaaaaaagtgacttacgcttataatgaccgtgagcttgatgtcatcttaaatgagattccgaaaaaccctaagcctggtattcagcgatacaaaggtcttggagagatgaacccaacgcagctatgggaaacaacgatggatcctgaatcacgtacagtgttgcaggtagaattgcaggatgctattgaagcggatgaagtgtttgatatgctcatgggtgatcgtgttgaaccgagacgaaactttattcaagacaatgctcattacgtaaagaatttagacgtttaagagacaaagggggatatcccccttttcttctgtttctattaagtggttctttaaaagatgatttagagtatcgaaaagatctttagctaaatgttatgagatgaacaagagtataattggaggttttccgtatgtctgatatggaaagatcgagagttaaagaaataaatattagtcaggaaatgcgcacctccttcatggattatgcgatgagcgttattgtaagtcgtgctcttcctgatgtgcgagatggtttaaaaccagtacatcgacgtattttatatgcgatgaacgaccttggtatgacttctgataaggcttataaaaagtctgcgcgtattgtaggagaagttattggtaagtatcacccacacggtgattcagctgtatatgacacaatggtacgtatggctcaagacttcagctatcgtaatatgctgattgacgggcatgggaactttggttctattgatggtgattcagcagctgcaatgcgttacacagaagcaagaatgtccaagattgccatggaaatggtgcgagatattaataaagatacgatcgattatcaggacaactatgatggttctgaacaagaaccaatcgttcttccagcaaggtttcctaatttacttgtaaatggtgcttcaggaattgcagtcggaatggcgacaaacatcccaccacataatctgggggaagtaattgaaggacttttagaactaagtaaaaatcctgagatgacaattcctgaactaatggaatttattcctggaccagacttcccaacagctgctgagattcttggacgtgagggaattcgcaaagcttatacaactggaagaggttcaatcattcagcgtgcaaaagctgaaattgaggaattcagcaatggcaagaaaacaatcattgtttctgagcttccttatcaggttaataaagcacgtcttgttgagaaaattgcagagctcgttcgtgataagaagattgaaggaatcaccgatctacgtgacgaatctgaccgtacaggtatgcgagtcgtgattgaagtccgtaaagatgcaaatgcaaatgttctattaaataacttatataaacaaacggcacttcaaactagctttggtattaacactcttgcattagtagatggacagcctaaagtgttaactttgaaagaatgtctagaacactatcttgagcatcaaaaggttgttattaaaagaagaacgcaatttgagttgaacaaagcggaagcaagagctcatatattagaaggtttgcgaatcgcacttgatcacttagatgaagtaatcaaattgattcgtgcttctgagacaacagatattgctagagaaggccttatgactaagttctccttaagctatgagcagtctcaagccattcttgatatgagacttcagcgtcttactggtttagaacgagataaaatcgagtctgaatatcaagagttaatgaagcgaatcgcagaattaaaagctattcttgctgatgaagagaaagttcttgaaatcatccgcgaagagctagcagaggtaaaagaaagatttgctgataaacgtcgtaccgaaatcacagttggtttcgatatgatcgaagatgaagatcttattcctaaacagaatatcgtaatcactttaactcataaaggatatattaagagattgccgatcgatacgtatcgaagtcaaaagcgtggcggtcgtggaattcaggggatgggtacgaacgacggagattttgtcgaacacttatttacaacacttacacataacaccattctgttctttacgaataaaggtaaagtatacagaatgaagggatatgaagttcctgaacttagtcgaacagcaaaagggatcccaatcattaacttgctccagatcgaaaaggatgaatatatcactgcgattattcctatagaagaattcgttgatgattggttcgtgttctttgcgacaaagcagggtgttgtaaaacgttcgccactttctgcttttgcgaatatccgaaaaggtggactcattgccatcaactttaaagaagatgatgagctaatgggagttcgtctaacaaatggatcgaaagagctaatcatgggaacaaaacaagggatggcgatacgtttccatgaagaagacgttagatctatgggccgaacagctactggtgttaagggaattacgctacaagagaatgaccaggttgttggtataggtattctagatgaaaatcaggatgtccttatcgtcacagataaaggatttggtaagagaacacctgtcgaagaatatcgcgttcaaacaagaggcggtaaagggattaagacgtgtaaccttacagagcgtaatggtgtgttaacagctctaaaaactgtcacacttgaagaagaatgtatgatcattactgagagtggtgtcattattcgtatagatgtacaggatatttctcaaactggaagaaacactcaaggtgtgagattgatccgtatctctgaaggagactctgtcgcgacggttgcgaaagttgagatcaatgaagaaggcattgaaggtgaagacatcgaagagtctgaagctactgatggaattgctgaagaaatcattgatgttgaagccgaagaagtctcagaagatgacgaaaacaatggttcaactacagaagaagattaactttttaaagaagaggagaaatcctcttctttttttgttgattactattgcaataatagatagcagatggtaagatgtaattccgtcgctttgacggtgtctccaaaaccttatcaatcggttttttaaaaaaactttaaaaaaagtgttgacgagataatacattaaatgatatattaattaagtcgccgataaacaacgacgaaaacgaaagaaacgaattgctctttgaaaactgaacgaaacgccatgtaagtagttgtttctacggaaacaaaacattgttttaaaagctagattaagctttctatcggagagtttgatcctggctcaggacgaacgctggcggcgtgcctaatacatgcaagtcgagcgaagagatgggagcttgctcccagatcttagcggcggacgggtgagtaacacgtgggcaacctgccctgcagactgggataactccgggaaaccggagctaataccgggtaatacatcgcaccgcatggtgcaatgttgaaagttggctttcgagctaacactgcaggatgggcccgcggcgcattagctagttggtaaggtaatggcttaccaaggcgacgatgcgtagccgacctgagagggtgatcggccacactgggactgagacacggcccagactcctacgggaggcagcagtagggaatcttccgcaatggacgaaagtctgacggagcaacgccgcgtgagtgacgaaggccttcgggtcgtaaagctctgttgttagggaagaacaagtaccgttcgaatagggcggtaccttgacggtacctaaccagaaagccacggctaactacgtgccagcagccgcggtaatacgtaggtggcaagcgttgtccggaattattgggcgtaaagcgcgcgcaggcggtcttttaagtctgatgtgaaagcccacggctcaaccgtggagggtcattggaaactggaggacttgagtgcagaagaggagagtggaattccacgtgtagcggtgaaatgcgtagatatgtggaggaacaccagtggcgaaggcggctctctggtctgtaactgacgctgaggcgcgaaagcgtggggagcaaacaggattagataccctggtagtccacgccgtaaacgatgagtgctaggtgttggggggttccaccctcagtgctgaagttaacacattaagcactccgcctggggagtacgaccgcaaggttgaaactcaaaggaattgacgggggcccgcacaagcagtggagcatgtggtttaattcgaagcaacgcgaagaaccttaccaggtcttgacatcctctgacaatcctggagacaggacgttccccttcgggggacagagtgacaggtggtgcatggttgtcgtcagctcgtgtcgtgagatgttgggttaagtcccgcaacgagcgcaacccttgatcttagttgccagcatttagttgggcactctaaggtgactgccggtgacaaaccggaggaaggtggggatgacgtcaaatcatcatgccccttatgacctgggctacacacgtgctacaatggacggtacaaagggcagcgacaccgcgaggtgaagcaaatcccataaagccgttctcagttcggattgcaggctgcaactcgcctgcatgaagccggaattgctagtaatcgcggatcagcatgccgcggtgaatacgttcccgggccttgtacacaccgcccgtcacaccacgagagtttgtaacacccgaagtcggtggggtaacctttatggagccagccgccgaaggtgggacaaatgattggggtgaagtcgtaacaaggtagccgtatcggaaggtgcggctggatcacctcctttctatggagaattacgaaggtaacttacgttaccaaccttacatgagcgtttcgtttagttttgaaagaatgatttattctttcaaaatgtggcttatatgatgaaacagatgtgcacctgcgtcttcgagtaacgctaacgatgttggcttcctcggtgcaaggcagcatagaagtggattcaagtagtagccttgttccttgaaaactagatagcataaacaacgacatccaataattatttttatgcaagaacttagtaataactgatgcgttacggcagcattgcctaacaaatcgaaggttaagctactaagggcgcacggtggatgccttggcactagaagcctaagaaggacgggacgaacaccgatatgcttcggggagctgtaagtacgctttgatccggagatttccgaatgggggaacccaccatctttaataggatggtatccatttctgaatacatagggaatggaaggcagacccggggaactgaaacatctcattacccggaggaagagaaagcaaatgcgatttcctgagtagcggcgagcgaaacggaatcagcccaaaccagagggcttgccctctggggttgtaggacgtctctttggagttacaaaggcacggatagacgaagcgacctggaaaggtccatcagagaaggtaacaatcctgtagtcaaaatccgctgccctccgagacggatcctgagtacggcgggacacgtgaaaccccgtcggaatctgggaggaccatctcccaaggctaaatactctctagtgaccgatagtgaaccagtaccgtgagggaaaggtgaaaagcaccccggaaggggagtgaaaaagaacctgaaaccgtgtgcctacaactagttggagcccgttaatgggtgacagcgtgccttttgtagaatgaaccggcgagttacgatcccgtgcaaggttaagctgataaggcggagccgcagcgaaagcgagtctgaatagggcgaaatagtacgtggtcgtagacccgaaaccaggtgatctacccatgtccagggtgaagttcaggtaacactgaatggaggcccgaacccacgcatgttgaaaaatgcggggatgaggtgtgggtagcggtgaaatgccaatcgaacctggagatagctggttctctccgaaatagctttagggctagcctcgcggcaagaatcttggaggtagagcactgattggactaggggtccttaccggattaccgaatccagtcaaactccgaatgccaacgatttatccgcgggagtcagactgcgagtgataagatccgtagtcgagagggaaacagcccagaccaccagctaaggtcccaaagtatacgttaagtggaaaaggatgtggcgttgcttagacaaccaggatgttggcttagaagcagccatcatttaaagagtgcgtaatagctcactggtcgagtgacgctgcgccgaaaatgtaccggggctaaacgtatcaccgaagctgtggattgtcttacgacaatggtaggagagcgttctaagggctgtgaagtcagaccgaaaggactggtggagcgcttagaagtgagaatgccggtatgagtagcgaaagacaagtgagaatcttgtccgtcgaaagcccaaggtttcctgaggaaggctcgtccgctcagggttagtcgggacctaagccgaggccgaaaggcgtaggcgatggataacaggttgatattcctgtaccacctcctttccgtttgaacgacgggggacgcagaaagatagggagagcgcgctgctggaaatgcgcgtccaagcgattaggctggtgaataggtaaatccgttcaccgtgaaggctgagtcgtgatggcgagggaaatttagtaccgaagtccttgattctacgctgccaagaaaagcctctagtgaggaaagaggtgcccgtaccgcaaaccgacacaggtaggcgaggagagaatcctaagacgatcgggagaactctcgttaaggaactcggcaaaatgaccccgtaacttcgggagaaggggtgcttcctcgggtttatagcccaggggagccgcagtgaaaagatccaagcgactgtttagcaaaaacacaggtctctgcaaagccgtaaggcgaagtataggggctgacacctgcccggtgctggaaggttaagaggaggggttatcccttacgggagaagctctgaatcgaagccccagtaaacggcggccgtaactataacggtcctaaggtagcgaaattccttgtcgggtaagttccgacccgcacgaaaggtgcaacgacttggatactgtctcaacgagagacccggtgaaattatagtacctgtgaagatgcaggttacccgcgacaggacggaaagaccccatggagctttactgtagcctgatattggattttggtacagcttgtacaggataggtaggagccatagaagtcggaccgccaggttcgatggaggcgtcggtgggatactaccctggctgtactgacattctaacccagcaccgtgatccggtgcggagacagtgtcaggtgggcagtttgactggggcggtcgcctcctaaagtgtaacggaggcgcccaaaggttccctcagaatggttggaaatcattcgcagagtgtaaaggcacaagggagcttgactgcgagacctacaagtcgagcagggacgaaagtcgggcttagtgatccggtggttccgcatggaagggccatcgctcaacggataaaagctaccctggggataacaggcttatctccccaagagtccacatcgacggggaggtttggcacctcgatgtcggctcatcgcatcctggggctgaagtaggtcccaagggttgggctgttcgcccattaaagcggtacgcgagctgggttcagaacgtcgtgagacagttcggtccctatccgtcgcgggcgcaggaaatttgagaggagctgtccttagtacgagaggaccgggatggacacaccgctggtgtaccagttgttccgccaggagcatagctgggtagctacgtgtggaagggataagtgctgaaagcatctaagcatgaagcccccctcgagatgagatttcccacagcattaagctggtaagatcccttagagatgatgaggtagataggttcggggtggaagcgtggcaacacgtggagctgacgaatactaatcgatcgagggcttaacctaaaacgaaaagcgaagtaagccgtttaaatccgacaagcgttggaagcttttgaatcagacgcgctttttgcgtcagaatcaaaaggtgaaacgatcgaggatttggcttacgtagctggacatattattggaatacgttgtgcgtgctatctagttttcagggaataccctgtaaagtctagtgacgatggcgaagaggtcacacccgttcccatgccgaacacggaagttaagctcttcagcgccgatggtagttgggggatctccccctgcaagagtaggacgtcgctgggcaaagaagaaaggcgagagaccgaatggtttctcgcttttttgtatggttttgtatattcattatttgttctatctttttgattgtgtcaatcgacttcttcgaaagctacgtaggggtgggagaagcaagaaattcgaggaagcaagtgatgtcagaccggagtggatatttgaagatccatgaggatctggcagcgcgcagctgacgaagaagttcgccgcttatcgcgccccgtatgagaacacggaagttaagctctagcgccgatggtagttgggggatctccccctgcaagagtaggacgtcgctgggcaaagatgaaaggcgagagaccaaacggtttctcgcttttttgtatggttttatgggtgagtttttactagctcaaagccctcattcatcacgttcgcggaattaatctcaaattcgcggaaatatcatgcgaaagcgcggaataaatccggttttcgcggaaatatctaaaagatcgcggaaaaagcatcgaaagatacggatttcgttaactgccttctgccatatcattattttcctctctgatctagaaagccataaagcaatttcggaatctttttagaagttacctcaagaaaatgaagaataaaaggtagatctgatgactcctgtgtatgaaacaaatccccccaccattccgtctcgtatcgacaaatcatgctcaaattatataaaaccagatagtgtaccattacttctgtaatagaattgtactggtttctttctgcagggagatacaggccgcccctatcatagaggaaaggacgctcttgtaactctactttgggctctctgtgaacttgtaaagttatgaagtcacgatgctgtcctaggatttttactgaacacaacccctgctgctgaagataagattccaaacgttcaacagtcatgtttagagaatcaagaatacttgaatgaaccgtaaatgaattgggagtaaggggggtcatatgataatttgttcgcttcccatttagtttctcaaataacggaccaatctcaggtataagggatagaagatcttccattttatacttttccccttcgacctgtttcacatgaaacattttccttgaaaagtattcaaagagtccatttttttgacccttcacctcatcttgcaaaaaagcataatggcgcttttttcgttttctagatgttactccgtgggcaagtacatgggtatccccgggataattcggatcaatcgtaatgagacaagcttttaacagttgaatcatcccatagaaaagaaggatcggttttaactcggcatcggccatttcagcatgtcgatagtagcgatctccatattcaataaagtacataaaacgatagcaggtgtcgtagctttttcgttctgcatctggaagttcaatcttagaataacattcctttaaatattgctgaacatatgaggcagagtgataagctaagttggcagagtgttgatgtccagaatatcccataggaaccctccatgtttgataattcaaacttattctatctttcttgacagtagtttaaccaattgataagctactaataaaatttcggacaattcgattagaggaggatgaaagggatgtgggaaacaaaatttgctaaagaagggttaaccttcgatgatgtgttattaacgccagctttttcagatgtactaccgagggaagtatcggtgaaaactcagttaacaaaagaccttgaattaaatgtaccaattattagcgcaggtatggatacagttacagaagcaccgatggcgatctcaatggcaagacaaggtggtctaggtattatccataagagcatgtcaatggaggagcaagctgagcatgttgatcgagtgaaacgatctgaaagtggtgttattactgatcctttcttccttacaccagagcatcaagtattcgatgctgagcacctcatgggcaagtatcgcatttcaggagttcctattgtgaatgatgagcgcaaacttgttggcatccttactaatcgtgatcttcgttttattgaagactactctattcaaattaaagacgtgatgacaaaagaaaatcttgttacagctccagtcggcacgacattaaaagaagctgagcgcgtcctacaaaaacaccgtattgaaaagcttcctctagtagatgaagacggtacgctaagaggtcttattaccattaaagatattgaaaaggttattcagtttccacagtctgctaaagatagcagaggccgcttactagtaggagctgcagtagggaatacaacagatgcattgaagcgagttgaaaagcttgttgaagccggtgtagatgtaattgttttagactctgcacatggtcacactgaaggaattatgacaaaagtaagtgaaattaaaagtgcttatccgaaccttccaattatcgcaggtaacgttgctactgcagaaggaacaaaagctctaatcgaagcaggagcagatgttgtaaaagtaggaatcggacctggttctatttgtacaactcgtgtcattgctggtgttggtgtacctcaaatcactgcagtctacgaatgtgcaacagaggcacgcaagcatggtgttagtattattgctgatggaggcattaagttctcaggagatatcgttaaggcgattgcagcaggtggtcatgccgtcatgcttggtagcatccttgcaggtgtagatgaaagcccaggcgaacgtgaaatttaccagggtcgtcaatttaaagtctatcgtggaatgggatcaattggagcgatggaaaagggaagtaaagatcgttatttccaggaaaatatgtctaagctcgttcctgaaggaattgaaggacgcgttccttataaagggcctcttactgatacaatccatcaattaatcggtgggttacgatcaggaatgggatactgtggaacaagaacactaaattcgctacgtgaggacagtcagtttgtacgaatcactggagctgggcttcgtgagagccacccacacgatgttcaagtgacgaaagaagcaccaaactactcggtctaaatagggctttagacggaagttataacagctgtgtgacaaaaacaaccgaatatattcgaaaagtagataggggactttcctctatctatttttttaattttatgtgtgatagaatagcggttatgtgagacttatttggaggtgtaggggttgaaaaaccttggtttgaaagccatgaccgtagccatggcgatggtattattactagcaggaacatttggtggaggcaatgctgcagaggctgcagaggcgcccgacatcaaagcggaagcatcaatcttaattgatgcagattctgggaagattttatatcaaaataatcctgaattaacgctctcacctgcaagtatgacaaagatgatgtcggagtatttagtacttgaagcgattagtaaaggtgaagttagttgggatgagaaagttactgtaagtgatacgattcaaaagttatctcagaaccgttctctttcaaacgtaccacttcgtgtgggtgaacagtatacagttaaggaattatatgaagcaatggcaatttattctgcaaatgctgccacaatggcccttgctgagcacgttgccgggacagaagcgaagtttgttgaaatgatgaatgccaaaggaaaagaaatgggcatgaaagaatacaagttcgtgaatagctcaggattaaataacagagatcttctaggaaatcatccggctggtgatgcggatgaagaaaatatgatgtctgcacgttcaacagggcttcttgcatatcatcttctaaaagattatccagaagtgcttgaaacaacgagtactcctgtgaaagaattccgtgaaggtacagatgatcaaattacaatgaagaactggaactggcttcttccttcacttgtctatgcaaataaatacaaagtagagggcatcgatggccttaaaacaggttcaactgatttagctggcttcgcttttactggaactgctaaacagggggatatgcgcttaatttcagtagtaatgaagactgactcttatgaggcacgcttcgaagagacctcaaaattgctgaattatggttttgatcaatttgaacaaaaaacaatcgtttctaaaggcgataaagcagatggagaatcttcagttaacgtcgtaaaaggaaaagaaaaagaagttggcgtagctgctggagaatcgtttaataccgtaactgtaaaaaacacggaagatccatttgagcttagctacgaatacgataaatctctccttaatgaagatggggaattgactgcaccaattaaagaaggagaccaagttggaacagttgtcttaaaagccacaggggaagattttggttacataacaggggacaagggttcttcagtacctcttgtagcaactgaatcagttgaaaaagcaggttggtttacccttactatgcgagcaattggtggtttcttctctggtgtgtggacaagtgtagcagatgcagtgacaggactgttttaactgataataacaagcataattggtaaaaatactcttcgataaggtaatcggggagtatttttctaaatcttttacgaaatcaccgcacatgtgataggacaagtcataaaaaaatgttacaataaaagcgtttgatagatgtcgtgtataatagacgtttctaagtatagatatgggaggaatatagatgaatcaacaaacaggtacagatcgtgtaaaacgtggtatggctgaaatgcaaaaaggcggcgttattatggacgttgtgaatgcagagcaggcgaagattgcagaagaagctggtgcagtagcagtaatggcactagaacgagtaccatctgatattcgtgcagcaggcggcgtagcacgtatggctgatcctacaattgtagaggacgttgtgaatgccgtatccattccagtaatggcaaaatgccgtattggtcatattgtagaagcacgcgttcttgaatcaatgggcgttgactacattgatgaaagtgaagttcttacgccagttgacgaagaattccaccttgataaacgtaagtacacagttccatttgtatgtggagcacgtaaccttggtgaagcactgcgccgcgtaggtgaaggtgcagcaatgcttcgtacgaaaggcgaacctggaactggtaacgttgttgaagctgtccgtcatcagcgtcttattcaatcccaaattcgtaaaatttcaagcatgtctgaagatgaattgatgactgaagcgaaaaaccttcaggcgccatttgagcttcttcttcaaattaaagagcttggacgtcttccagttgttaactttgctgctggtggtattgctactcctgcagatgcagcattaatgatggaactcggttctgacggcgtatttgttggttctggaattttcaaatcagataatcctgagaagtttgctaaagcgattgttgaagcaacaactcactatcaggattacgaattgatcgcaaacatttctaagaaccttggtatcgcaatgccaggaattgaaatttcttcacttaagccatcagaccgtatgcaagagcgcggctggtaaaatcattgtcccccacctgcgtaacgtaaggtggggttcttacttagataaagagaaggagtcgagagcagtatggtgaaagtcggggtccttggactgcaaggtgcgatcagagaacatgtgaaagcactagaaacaaaagaagcagaaattattgtcgtaaaacgtgttgaacagcttgaggatttagatggactcgtgctgcctggtggggaaagcacgacaatgcgtcgtttaattgatcaatatggatttctagagccgcttaaggcttttgcagcagagaagcctattttcggaacatgtgctggattaattcttctttcaaagcatattgaaggtgtggatggatctcatattggcgtcatggacgtaaggtctaaaagaaatgccttcggacgacagcgtgaaagttttgaagcaccgttaccaattaaaggactagaagaagactttattggtgtcttcattcgtgctccgtatattgaagaagttggagaagatgttgaagtgcttgctacctttaatgaaaaaattgtagcggcacgtcatggacgttttctcgcgtgtgctttccacccagaactaacggacgatgatcgcatgcatcagatgtttattgacatggttttggagtttaagaaagaaggacttgcaacggagtaacttttcgtgtaaattattacgtaccaagaagaagagaattctttttctgcaaatgacgaatgataaacgaaaacgttgacgggaaatagtaatagatgttcaatgccaagagagtcgatgtgtggtgtgaatcgatcattgaaccctgtgaatccatccctgagtaggaagctgaatgaagtaagctttctcggagcagaccgttattctgttaagaggcagacaattgtctgcaatcagggtggcaacgcgggtagctctcgtccctttataggggatgagggcttttttgtattcaaaaaccttactttcactctaaataggtttccttaacgcgtttatcattcattaataaaggaggaaaaagcatgatcgatttaaagtatttgcgtaaaaattttgaagaagtaaaagtaaagctatcaaagcgtggggaagatctagtcggtcttgatcgttttgaggagcttgatcagcgcagaagagagcttatcgctgaaacagagcagttaaaggggcagcgtaatgaagcttctaaaaacgtagcggtatttaaacgtgagaagaaagatgccgatcaccttattaaagaaatgcgtgaagttggcgataagattaaaacaattgatgaagaacttcgcactgttgagacaaagcttgaacaaattcttcttcaaatcccaaacatccctcatgatagcgtacctgtaggtgagacggaagatgataacatcgaaatccgtacatggggagagaaaaatgattttgcttttgaagcaaagcctcactgggatatcgcaaccgatcttaatattattaacttcgaacgtgcagcaaaagtaaccggaagccgatttgctttctataaaggtgctggagcgcgtctagaacgttctttgattaactttatgatggatctgcatgaatctgagcatggctatgaagagattcttcctccataccttgtgaatcgtgagagcatgactggtactggtcagcttcctaaatttgaagaggatgcttttaaaattcgtgaagaagattacttcttaatcccaacagcggaagtaccggtaacaaacttccaccgtgatgaaattatggacggagaagatcttccactagcttatacagcttacagtgcttgcttccgttctgaagctggatctgcagggcgtgatactcgtggactgattcgtcagcaccagtttaataaagtagagctcgttcgctttgtgaagcctgaagattcttatgacgagctagaaaagcttaccgggcacgcagaaaaggtgctacaactgttagagcttccttaccgcgttatgagcatgtgtaccgctgatcttggctttactgcagcaaagaaatacgatattgaagtttggatcccaagctatggcacgtatcgagaaatctcttcttgtagtaactttgaagatttccaggcgcgtcgtgcaggcattcgcttccgtcgtgaaaagaatggaaagccagaattccttcatacgttaaacggctctggccttgcgatcgggagaactgttgccgcaatcttagagaattaccaacaagaagatggctcagttattgtccctgaagtactacgtccatatatgggtgggcgtgaagtgattaaataaaagtgataaagagcagattcatctctgctctttatttttagataagaatcgtgtatagtaaaagaagctaattttcgacgaagttcttcataaatcatcaatttacatacgtgaaaaaactttttaaaaagttttgagatatcgttgacattattttaagatgatgatattatattacttgtcgcagttagttaataactttttcacacggaggaatacccaagtctggctgaagggatcggtcttgaaaaccgacaggggcttagtcgcccgcgggggttcgaatccctcttcctcctccatttactaattaataaccaacgcgcatataatttggagattatatttcgaccgctgtcatcgccgacagcggtttttctatgtgcaattatagtaagataagaaaaaagctatccaattggatagcttttttagattatcgatttagtgaagggatttgctgaaacttctgttcaatacgctttaagatcagttcaacagaagaaggatcattcacaaggtcatattcattgatattcaagcgaagaataggacaagcattgaagctgtcgatccagttcgtgtagcgttcgtacatttcttcccaataagcagttggcgtttgttgctccatcggacggcctcgctctttaatgcgatccacgacgtcgtcaaaggaaccttcaaggtaaatcatgagatctggatgtgggaagaaaggcgtcattaccatggattggaaaaggtttgtgtaggtgtcatagtcaacagccgacatcgtccctttttcatagtgcatttttgcgaaaatgccggtatcttcataaatagaacggtcttggacgaagccgccaccatattcaaacattctcttctgttctttgaagcgttctgcaaggaaataaatttgcaaatgaaagctccaacgggagaagtcattgtagaatttctctaaatacggattgttatccactttttcaagagaagtgcgaaattgcaaagcatttgcaagcgagcttgtaatcgttgacttcccgacacctaccgtcccggcaattgtaatgacggcgtcctgtgggatgttgtatttttctctcaggttcatttaacagggtctccttctttcaatgttttttcgagggattggaagatggtgtgcaaatcttcttgattggacacaaaatccatctcatcaccattgaaacggagcacagggatatctgggtgctgtgcttcaaattcatgcataaaccgttcataatcagatgaaagacgttcaaggtaagcaggatcgatgcttttttcaatttgtctgcctctttgagaaattcgattaagcagtgtttcaaggctagcatttaaataaataatgacgtttggttcaggcattccctcggttagaatgtcatagatcttcatatatttagaaaagtgttggtcactaagtgtttgttgcgcaaaaatcttatttttaaaaatgtggtaatcagaaataaccggaagcttctttgataaatgatgcttctccatttcttctaattgcttgtatcgatggctgagaaaaaacatctcggtttggaagctccactcttcaatgttgtcgtaaaacttccctagaaacggattctcttctacgatttcttgaaaaatttcaaattgataatgagcagcaatagctcgagatagggaggtctttccaactccgatggggccttcgacggcaataaatggggtctgattcattacgtatcctcctccgtcgtttcctatagcagaccttacatatcttttaatagacaaagattattgtagcatacaccaggattggttgacagggttaaaaccggcaagatataggtaaaaatagcctctctgtttgatgctaaaatcgattgggaaagtaggaaataaaaggagtgagatgatgaactcgaatcaaatcataattctactttttatcggttatttagtctacacaattgataacaaacaaaaaaactttcctgcccctctcgttttattgctgatcggaatcagtctttcttttcttccattcttcagttcggtacatatcacgaaagacattatctttgaatggtttcttccggccttactttttatttccgcttatcaatttccatttgctcatcttaaaaagcacgctgggattatcgcggcattaagtacactaggcttattattaagtgctcttctactcggaagcttactttatgttttaagcggaccattcctttccctttcgtttgtgggggcgctattaattgcatcaatactaacgcctaccgatccggtgtctgtggtctccatcttaaaacaggcatcaaaagatccgaaaatagctgatgtagttgaaggggaatcaatggtgaacgatggcaccagtatcgtgcttttcactgtgtttgctggcatgtaccttggtggtgagagcttttccattagttcgtttctttatgactttgctcttgtgtcaattggaggagttgcgattggggccatatttagttggatggtgtgtcgtgcgatttcgttcactcatcagcggcaatatcaggtgatgttaagtatcgttctcgcttacggtagtttttatgtggcagaaaaccttggtgtatcaggtgttctctccgtcgttgcagcgggaattatgctttcatatgaactggacggttatattaaagaatctcattatcgagaatacctcaatagcttctgggaagtcgtggagccgagtattcttgccttaatttttctactaattggtattgaaacgaccaactatctagacttcgatcattggatctttgttgggctcgtttttctcgcttcgattatcgtgaggttccttgtccttgctgggattatcaaatcgttctcagcgtggcgaagtgaatttaattggaaagacatctcccttgttacatggtctggcattcgtggaaccatgtcagtggcgcttcttctaagtttggaatcggaatatggatctggtgatagtacgctcatctcactcacttttggtgccgtgctgttatcacttatttttcaaagcgtaacaatctatcccatgtctagctattttgagaaaaaggcgagataagtgctgtgaggtaatcgttttctatcttttgctgttttatgaagcgaaacatagcctttctgagctaaatcagcactcgattagggggaattccgcgatacttccgttttttccgcgaaaagctcatttatttccgcgatattcgggatatatccgcgaaaatggaattaattccgcgaacgagcagggagggctccgtttctaaacgctcgtctccgcttttcgtgtctagcctgcagagggcaagtcctcgagtcgcttcagcattccatccgaacacaaagaacgtgtccatatggaatgcttccagcgcttgtcggacttaaacgcccacttccgcttttcgtgtctagctgcgcgggccaaatcctccggctgtttcgctcattcgaatgagacaaaaagcgtctcaatctcatgagctccaacatcctgcggatttaaacgggcccgctccgcttttcatatctagctgcagtgggcagacactcggtcacttcaccttttcatccgaacacaaaaaccgtgttcaaatgaaaaggctccagtgcctgctgtgtctaaacgcccacttccgcttttcataagatccagctacgactcgcagaaactccgatatttcactctttcaccagaacacaaaaatcgtgttctagttcaagagttccaatatctccttttctaaacgctcgtctccgcttttcatttaatgcgttatggctttagcagatgttcttgaaaggaaatggaaaaagctatacgtttaagctgagtgacaaactatttttggagggatgattgtgcaggagcaaatgttgaatcaaaatcaacaggaaacggctgatttttttccggtacgtgatgtcgattatttggagatttatgttggaaatgcgaaacaggcgagtcattatttttgtaaggcgtttggatttaagcccgttgcttattcaggacttgagacaggagatcgtgaaaaggtttcttacgtattgcaacagaataatatccgccttgttttatcaggttcactgtcgaatgatcacccaattgcggagtttgttaaattgcacggggatggcgtgaaagatattgctcttactgtagaaaatgttgataacgcttacaaagaagctgctgagcgaggtgcgattgagctaagcccacctaaagaatacaaagatgagaacggtgttgtaaaaatggccgttatcggcacgtatggtgatacgattcatacgttagttgaacgtaaaaactactccggactttttctaccgggatacaaaaagtttgaaggaacaattccgtcgaaggaaacaggcttgctgggcattgaccactgcgttggaaacgtagaatcaatggaagagtgggtttcttattatgagaatgtgatgggctttaagcaaatgattcattttgatgatgaagacattagcacggagtattctgcattaatgtcgaaagtgatgcacaacgggggacgcattaaattcccgattaatgagccagcaaatgggaaacggaaatcgcaaattcaagagtaccttgattattacaatggtcctggcgttcagcatattgccgtcttaacgaatgatattgttgataccgttgcaaaacttcgtgatggtggtgttgagtttcttgaaacgccagatgaatattatgatgtgctcactgagcgagtaggtgagattgatgaagagattagtaaacttcgtgagttgaaaattctggtggatcgtgatgatgaagggtatctgttgcaaattttcacaaagcctgttgtcgatcgaccaacattatttattgagattattcagcgtaaaggtgcaaaagggtttggggaaggtaacttcaaagctttattccaggcgattgagcgagagcaggaacgtagaggcaacttatagaagttagcttcaacctactatgagaaggagttgcctcactcatgaaagttcaacccaatacattagcctggaaagaggcttataaattattaattggatctgtccttcctcgtccaattgctttcgtctccacgataaataaagtgggtgaagtaaacctggcgccttttagcttttttacgggcatttgcgctgatcctatgatggtttgttttgcgccaatgcgaaaaacgggggaaggcgataaaaaggatacgctcttaaacatagaggagtccggggaatttgtgattaatatcgttggtgaaaaaattgctgagcaaatgaacgaatgcgcaacaccgtttccaaaaggaacagatgagtttcttaaatctgggcttacaaaagttaacagtgagatggttggccctccgagagtggaagagagtgacgtgcagctcgaatgtgttcttgatcagatcgtggagttcggtgatcatgaaggatcaggtagcctcgttattggcaaagtagtgatggtgcacgtacgtgatgcattatatcgggatgggaagatagatacagcgatgctccagccggtaggacgactcgctggtcaagagtatacgagagcggtagcggatacctttacattaattcgaaaaacatctcctgatggaaagagctgagacgtttgaagttcgttactttcgaagtagatgggaaaagacaggcgggtatttacaaagactcacgcattatcggattacatgacgcttctaacggaattattccagcagatctcatgaggatcattatcgattatcctcagtatcaaccgctcatggagcaatgccacaatggtaattatgcattggaggatgtcacgctatatgcgcctcttcctcgtccaacgagcatcagagatttctacgcctttgaacagcatgtcatcactgcaagggggaaaagagggcttgatgttgtgcctgagtggtacgagattccagttttctatttttcaaatcatcttgctgtgaaagggccagaagatgttatcctacgtcccaaagcatgtgaaaagctagactatgaactagaaattgcctgcgtcattgggaaagaagggcgcaatattaaagcaagtcaggcgaaagactacattttcggttttatgatcatgaatgactggagcgcacgtgacctgcaagcacaagaaatgaaagtaggcttagggccagcaaaaggaaaagattttgctacttctttcggtccatttcttgttacggctgatgagttctctcttgaacaaggaaagcttgatttgcatatggaagcgttcgtaaatggcgagcgttattcctcgggaaatgcgaaagagatgtattattcctttggtgagctcatcgaacaggcttcgcgtaatgtgaccttatatcctggtgaagtaatcgggtcaggtacggttggcagcggatgtattcttgaacaatcgggacgtgaattccttatgcctggtgacagagttgatttgtctattgcccatctaggcacactttcaaatgtcgttggagaggaggatgaacatggtttactatcggacgatgggtgagataccatctaagcgtcacacaacttttaaaagagaagacggttccttataccgtgaacaagtaatggggacgaaggggttttcaggaatccaatcgatcttgtaccaccaccattttccaacagccgtaacagaagcaacttttataaaaaagacaacacctgtgtatgagacagaatctgcgctacgtcatcgtcatttccgaacggcacaatgtgacaaaaagggtgatgcggttgtcgagcggtgttatttcctggggaatgaggatgtaatcctcggtgtggtaaacccaacagaaccgatggactatttttaccgaaatggtgacggagatgagcttttctttatccaccatgggtcagggaagattgagtcaatgtttggggaactctcttataaaccgggcgattatatcgttataccgattggaacgatataccgcgttatcccagaaggaaatgacaatcgttggctcgttatagaagcaaatagcgcgattacgacaccgagaagatatcgtaacgaatatggtcagctgatggagcacagtcctttctgcgaacgtgacattgatggtcctgaacgcctattatcccatgatgaaaaaggttcgtatgaagtagtgacgaaaacacgtggtggattgcatcgtcatatgttcgatcatcatccgcttgatgttgttggctgggacggctatctctatccatggaagttcaacattaatgattttgagccgattacaggacgagtgcatcagcctccgctagtccatcaaacctttgaagggcataactttgttgtctgctccttcgtaccaaggctttacgactatcatccagatgctattccagcaccatattttcatagcaatgttgatagtgatgaagtgctttactacgtagaaggcaacttcatgagccgaaaaggcatcgaggaagcttcgattacacttcatccttcaggcataccacacggtccacacccggggaaaattgaagcaagcatcggcaaaaaagaaacgctcgagcttgcagtgatgatcgatacgttccgaccgctcaaagtcatcgaacaggtgcagcagtatgaagatgaaaattatatgaagagctgggttacagaataactaattggggaaatgtacggacatcgcgcggtctatcgatcgcgcgataattattttgcacgatgcttttgctttaatcgattttgttgtataatgttagtcattcggccccgtagctcaggggatagagcaacggtttcctaaaccgcaggtcggaggttcgattcctctcggggccaccatttaaatccttatgctgtaagggttttttattcttactcagattttttacaattaaatgggcacaaaatgggcacaaactattcacatttattcaaaataaaatacataagatgctatatagatactaatatctaataagaaataaatgacaattgttaacgtatattatatactaaatattaaggagggatgatgtttatggaactatttatggaactattggaaaataggatggaaaatgaagagattactgtcaatgacgtagcaagttactttattgagaaatcctacacccaaccgccatataacattacacacctcaaactacaaaaacttgtttactatgctttaggttggtattcagctttggaagatggagaaattctgtttgaccaggaaattcaagcttggaagtatggtccggtgtccccttgcttgtatgaagagtataaaaaatacggctctggaaccattcctaaagttgtgtttaataaagagaagtttaacaagaaacaattaaaaattctcgattctgtttggaaagtatatgggaagtacggacctatagaacttatggagcgtactcactcggaagagccttggttaaaacattatgatcctaacaaagaaaataacaaaattgactttcaagatattcaatcctatttctctgatctgaaggaaaataacaagaaggaccattcgtcgtaagggtccttcttattttataggagaaaaagatgcaagaaaaaaataacattaaaaatattatgaagtatttttattcatttggtcttattatttttgtctttctcataatcattatattatcctcttttttgcagtccttaacattccttcaattaaataatgatttaattgctcatctacttgaattaagaagaaaatttacattagagcacattaacactggattaatttattctattaatttaggattcttaaagacatttacgattatattatcagtttctgtaacattgtttatttttgctgttaaagaaagaaaattaacttcaccctcttctatatttctggaaaataaaatcgatttttttgatatccatataggtggattagtactctcccttttattgaatattgaactatattttaaatacactgcccaagacaatacatacaatgtatttatagaaaaccatatatttatacttttttggttactgagtttaggctttaatattattacgagtattagtctagtccccacattattcaaaaaatttgatccaaagttattatataatcacacgctaaattcgctgtttgcaaaatatgatgacgatttagtaaacattaaagataaaggctatttaccgtttaacaactctgtaatgtcaacttatagagtaatcttagaaagcatttttcaaacactgagccacttctatcaaaataaacaaagcgaagaattaaaagaaagtttaagtaatttatcacataaaatatataatggtgggaataagtatttagaagtatttatagacgtaattgacttacaagatagagacaaacacgagctagccaaaagattaaagtatttttatgagttacgattagaagagaacgtgaattctagattgaataaaatacaagaaaaaatatttaacttagatgaaaaaataagaatgcttgtaattgaaattaaccagagtattagtaacaaaaatgacgttataaaaattaacaaaagtaaacggttgaatatatctaatcgtaagattaaaaaattacttacattagaacaatacggtaacattgaaaacaatttacttgagttaattaaatataaaaaagaattaaggaatattaagagaaaacaaaggtcaatattaaaattcgaactcaaaagtgcaaaacaaaaattgttacagttagaagacgaaataatacattatcaacataacgtaattaattatcaagctactttaggaaagttacaaactttaataaatgttgttcataaagatattattgttaatatacagaatttctcaacagaactatacaaaaatgactttgtatattttggtaaaaaagctttggcagttttgttcaatttatatgaaattaaagataatagctatagtttaatgaactcgtacaaaataaatattactgagttggtaactaaactagatataaaggacagaacaatattaactgctctactcgatcaagcagaacataagtttatcaatgatgacgacgaaatcgtaaaaagtttttatttggagttaatgattaaaacaatagaaatagaagaaataaatgcgttaactatatctgtattaagttataaaaagttactcatagacagttcaataatgcaagaatacgaagaatttaattcattaaatgagttcggctctgagagtaatactagttctactaatatttttgatgtaacaaagtcattcgattttgaagaaacatattgggtaagaggtagtcaatctcaaaagccaactggaatttcgtcttccgataaagaagataacgaatcagatgttgtagatcttatggaaacagcagaggtaaacaaagggcgaatatcccatattcagatgttcttattggcagcagtaaaaagtatagagatatctaagtatccttctaccggtttcttagtaaagtttttagttactaattttaagtctcaagaaattaataaagcaatagatataatgtttaataacaaattatttataaaaactaacaaggaaactaataccttcggtgacaatataaatgtctacattaaaacctatcatttcaataaggcaaccttccaatactgttttaataggttgattatcttaatatatgctcaacaaaaattaacatctgaagatagattcaatatctctgagaaatatggggcaatagatctactcaacattaaacagtacttaagtgattgtaaatataatacatatctattttcaaaaatattactaactaaagacctttatgggttattagcactaaaaaacaaaaaaatcattgaacaattagagcaggttctttgtgttgaaggattagatgaattagaagtaggtcaaggagaatttgtaagaacaaaaagttctgtagcgaaaaggttcaggtgatatgcaataaaaatcaggaataatctaattattcctgattaaatatttgttcaattttactagcggcatcacgatctttagaccttaatgcgtgtgcatacttgtttaatgtcataataccatctgcgtgcccggctctatggattacagtctttatatctacattatttgcaagaagtaaagtaatattagtatgtctaatcgtgtgaaaagattttactggaaagtttctctttcgtaagaatttcttaaattcattatttaccgtgctcgggtgcataggttttccgttccactgtgtaaacaaccgatcgtgatcttgccataactcattctgagatttaatctgctcctcttgtagatctttcaacttttttaacaatgaaatttctaattctgagattgatattgttctttttgatgattttgattttggaacatcggtataaattccaagtccaggtctgtataagcttgtttgctgcacgtgtattacactttctgcgaaatcaatatgtgaccattctaggccaagtaattcacctttacgtaggccagtagtaaaagctaacgtataaagagctgcatatttgaaattttcatttgatagagctctcaaaattaacgtagtttcttcttctgtatagaagtcagcttctatttgctttactgcaggaggcttaattttttgggctacattgtaaggaataacttcccactcagtggcatcttgcagaattgctgatatgcaattatggtagtgtttaattgtttgattagataaaccaccaggtttgccgtcctgtcttataccatcttcttgaaggtttgaatagaactgctgaagatgtaacggttttattttttcaattggaatatgccctatggtaggaaaaatacgatttttgagcatttgctcgtaaccgtaaactgtactttttttaagatttttccttgcgaaagtttctagccaaaataaagcaaattctttaaaagttttcttaggattctcaatgtatgttccagactctatttctgtgatgaacttcgcaaggtttttttctgcttctcttttactttttgctttgattgttttacgatgttgtatcctcttaccgttactatctgttcccttactaactcgtaaacggtaagtatcttttcctcttttttctatgcttcctgccaagattctttcctcctaaacattgatacgatcatttatttccaaaagaaaaaatttcatacagatagtactgtgacattcggtaatgtgacccattgatatatgtataattcggttatatgactggttgagtataccctgtcagtcgtataaccgaaaacgaaataagagtaccccctctaggagcgggggaatagaaattgcatattcaaatacttatttgtcgattaagctaattcggttttatgaacagtcaaagcctctacaaattcggttatacgaccaaagtcattctctaaatcgataaatggagttagtcgataactcacttctaaagaaccggtatctatattaatgatgatcttactaataaataataagtatagtactctcagcggtgtggtatctaagttggtgatattcatattcgtaaaatcgtaaaatagttctatatatcgatgactttgttttaacctgttaagctcagttattgttaaatcaatttctatgatgttttcatttaaatcatttaaaacttctatgaagtataacgattgatgaagttgatctaaatcattcttattagactttacattatagtaattggtttttactataccaatgtgagtagttagaacctgtttgcatttatttagttctcctaagtaaacatctattgtctgatcaaaatgtgtttgcaaatcgtctagaacggactcccaatcttttgaaaatcttttgatcattatctgatgaattgcatcagcttctatactttgtttgcatctaatgcatcgatacttcaaatactgtttcttgctactgcctggagtatctacccttgtttttaataactcttcacatttcttacaactcaataaatctctaaacaaaaaaggtgtatcgaattttttaggggttgtttttaaattattgatttgttgaactttattccacaaattaattggaataataggtttataaacatcttctttaataaatggtcttctatcagtagggttaaacccgctcttctttcttgaactccaagttaaatgccctgtataaacctttctatttaaaatgttagctatagtatttttatgccagcctttgttgttaggagatgtagcattggacgagtttagaactttgcaaattttatcattgctatatccccaactcgatagataaaatataaatcgcactatagaagcattttcatttggaattaagtcttgtttgtaagattgatatccaaaaggtggttttccacccgggcgtatgtcctctttcagtaaatttttttgattatcttttgtccttgcagatttgaaggaggattccgctcctgcaaatatgaattttagtatagtcattacatcatcagggtcccattctttttctgtttgagtagaaaaaaattgagcattaggttttgaacttttcaacgggtaataaacatctcttacaaagctttcaaaagaacgatcaattctactttcttcgtaaaaaaataatgcttctgctttatcttccagaatatactgctttgcttcgtttaaaccttttcgtttaccagcaggtgtattatatgcacttactgcttcatcctcacaccaaagcacaatttcataattctccttcgaagctttcctcagtatctcttttttttgtatttcaaaagagttgttgtcattttgtttatgagaggatctccttatatatccgatacctctttttagttcaaccacaattatcacgctcccagagctcactgaagtacaattcgaatgtaatttcatcagtactcaccgaaatatgttttactaagcatcgaattagtgatacatacatatcttcctctaaggttaaatctttaatagtacagattaacttctcgaactcaatagattgactcctttgatgtgaaactttctcgatgttcatattaattgtgtctaaggagtctactagtagctcaatatcttttagtagaattccggcattttcattatgagcattcaagcaatacttgtatttcaacatctttagctgtttgtttaaggcttcttttttattagttaaatctttattttgtttagaaagattattatgaatcaacctttgtataatgaccttatcaaatttttctattgtttgatttaatatacttaaggtgtgaacctttaactcacttactttaacgttaatccttctgtggttagtgcaggtgaatttgcccatacgatcttcaataatcttatatttcatttctgagttacatatggtgcataggggaatcacgatcttattgttcaagtgctctgcttcagtttccgccaatatgttgagataagggttaatgtttttttgggtgtcggtaaatttctctaaatctataataggagtaacgtgatttagcttatgcattgactggttagtttcataatgccctgcatagaaaggattggtaataatattaaacacttgttgtaccgggcgttttattttcttactatattttaataggagattataaaactcatttttagatttcactttcaaactttccttaaacaaaagtgagattgtaacactatcttttgctttaggtttatatgttttattttcattattatcaattacttttgaaaatccatatatgaatgcaggatattgtttccgggtatcagaggttcgattaccaatattttgtccttccatctgactcattagggctaagatgctttcattttgtattgaagtgttaaattcaggatgatcggatgcagtaaatataacgttaacgttatgctccataagttttttggcaatttctatgtactgataagtatttcgtgcaagcctatccctatgataaacaatcaatgtgtcaacttttccttctgagataagctgcaataattttgaaagtcccggtcgctctttgatttgtgatttagttgcagatattccatcgtcatcgatatatataagtaatttggaattgtacattgaaataagcctttgtgcagcacccaattgcaagcttttagtttgaccatccgaactggttctcgtgtaaacaatagtgaattttcttctattatccatcattcatctcttccttgtatttatctgtagccattagtagtcgaccttttatttctgaaggaatgcttagactctcaataagcattccttcaattaaatgaataatccattgcttagactctttaggaagttcttcgctatatgaaacttttacaactctgggtttttccatataaaccgctccagtcatatatttttatcatatttgactgggcgattcggttttatacctacttgacgtttttaacagttattaaatcgaaaatagtaagctgctctatatatggttcttgcgccgttaagcgttttctagatattttaatggtttttagatcttttacttcctttacttccacctctaaactcctcgtctatgaatgttttaatgaatctctctaagataactttagaaattccgaaatcttcgtgattctttagacattgtaagacccacaagggtagtcttttatcgaccacactaacatcccccatctaaatctcaactcttcgaagaatccctgaatgctctttattttcgttttggactgaagtaacctcttgttcttccatccaatattcaaggcttttaattctgaatagcacttttttacctgctctgatatggggcacctctttccttttagccaaatcgagtaaatgccaatagctaataccgatatagtttgctgcttccttagcagtcaatgttgttctaactggttggttcaaaataattccccctgttttagtaaacataaagatatgcagttaacctttgttaattagtttaatagcgatcaatataaaagtggaaaaaaagttatgccttttttctatagcttgaaaaagctacttctttttgatttgcactaagctttgataaatagtgtatatcgatatgaaatggaagtggaaaaaacttttaaaaatagtaagcattttattgaggtgggtattcgtcacaaaaattagtgaattatgagtcaggacggatatctgtttaataaatagcataaaacagacagaaaatttagttacttaatctcacttatttggtagaatgaatgttaagaaatggaagtggggcgagggtggctactatattggaattaagaaaaataagttgataatacaattgtggtgatgaactacataccctgtgaaagtattcaattggcagctacctattaaatttctacgggaggaactaatggataaaaagatttcactaacggactttgtggatttttcaattagagtagggccagcaaggattacaaaggtaaaagagataaaacaaagggaagggtatcaccctggaagggattattggaaagtaatgagggataaacttgaagaatttcataaaaggaatttagagcgatcttacttagatacgatcgtggatgatgttcattcaaacaaaaaagaaaactataaacaagtagttaacagttataaaacttttttaggacgcaaacagattggttggtttgaacctgttaaagatacttggtcctttaatgagcttcaaattaatgttaaccctgaacttggtctagaaattaatggggttaggcatttaatcaagatttactttaaagaaaatttagctcaacctaacacagtattagataaaaggaagttggaaacaatcttttatctaatggaaaactcccttgaagattactacgacgccgatataaggtattctgttctgaatgcaaagacggggagactaataactaaaacgagggatttagttaatattaaggaagtattagaatcagatgctttggcatttatgcatttgtgggagagtatatagttttgaaacgctgtatgtgcccaaattgggacccaaatgggcacataatgtctccaattaaatcaatttcagctaataatgaggaataaacacacttaaaatagcctattaatacaaggtattttatttggcttaaaaagtttcctaatgtaattgtatgtttcctaaaccgcaggtcggaggttcgattcctctcggggccaccatttaaatccttatgagataagggttttttattttgcctttttaccctcaattttcttcattccttttttcttaccactttaacgatgtgcacaactacataaaatgattttaaaataaacttggatagcgtctggtattctcgacataacgtctatgttttctatcatgttgatgtttcagatagtgaatttgtcctaacaagaaatagagaagatcttccgaaaatcgatcagcttgtgatggacgatccttctggtgaagcacctgtattggaactcgttgaaacagaagaaggtgtcctatttggagatcactattatatgaagggaacgtttcaatctgtcgctcattctgagacgaacgaaccacttcgaaattggaatggagcacttacaacgatcgtaagtggaaatcgttcagctaagcttaacgtacctgtatcttatgaatatgaaaaggaaacaaagactacgaaacagattaatgaaacaaagagatttgacgaaacgacagtaacggtttctcgctgggaggagacggcttctgatcgtcggctcatactagatattgattctccattctcgacaatccctcatttggaattgatgatttctaccaaggaggaagagatagcgccgttattagtggaggagctaagcggcgggcaatactcagcctcttttccagctggaacgaagctacctgaagccattcaactcgatgggctgattggcaacttctcaaagggagtgagttttgacgttgatccgaatcagtatgaaatctataagcggattaaagaatcaacttacacacatcagttagatgaaccgattgcatcgatttatggatctgatgtcgttaaagatacacttttttataacgaggacggtgtaacttttaacttactggtgaattcagttgcttctgaagcaccttacttaaatatgaagtataaaaaacagatcaaaatcgaagccgtgaatgaaaagggagaaattcgcaatccaaacttacttgatagtgagaaagatcgaatcgtattcatgatcgatcgtggtttctatgaaaggtctgaaagcattcaagttcatatgaggcatctccctatatatatgaaaacagactggacgattaacgctcaaactgagtaggaaacattgttaaaaaatgcaagctaaagcgacctaaaggtggtatgatagaagtagtatggagagttgggaggattttaagttggacgattggaaagggacattggctgaattatttcgtgccgttggcatcaatcttaaatcagagctttctcccgtggttgatggtttacaatccgtattcacagataatccgtggggacagcttttcttattattacttatccttctcatcgctgctcagggtatgagtgcgattgctcggcaatatgaccgtgcttttaggcaaacgattgagcggaagatggaaactaattcacatctacataatttttttaaagggttcttgcatcataaacgttcggaaggttggatgaatgatgcggcctggcaacaaaaagagcttcagcgttttgacttatatgagctcgaatggttaaaagcagagcttgcgacagcagaaaatgacttccgtgattatcgtcctcaaacttttctagcaggcattcttttttcgatagccgttctttttctaatttggtactatgactggacgatttttgaaaaagacactctaaccattttgctacctgttcttattgtcacatggtgtatgggacttgttttctataaagtagggattaagaaacgcttctatcaatctttaaatacaagtgtccaactggcgatttcgacgaaaaaggttcaggatgtaatgatgtatattgattctgatctaaagcgatataaaacagagcgtgtgacgactgacggaggatattacgaagtagttcgctgcatgacctgtctttaccattcaaagtatcttgaagaagtgcgcttccagatcaatgacacaacccttacctttagagcaaaagagcgtgtgattgaagtaactgtgaatagtgggtacagccattcattcttaattgatcgtcttgagtttagagatggctactgtcaaagccttcgcaaaggcagcaagcttttcgatgataagttaatggtcacttatttaaacgctgcctttgagcaaaggcctgcttactttcaaacaagctcttaattattggcctctcttctcatgaagaggggcttttcttaaccttcataagctgttgttgtttttcgttggtttgctttttcaataagtttgtctagttttaattcacttgaagcctgggtgtttgcttttaaatttccttccattaagcgaagggcatagtcattgtcttctttgacattagacgcacagcaatcggatggaatataaagatcatattctctcatgtatgcatcgtttgcagtaaacagcacacaaatgtttcctgcaaaaccagttagaatgagagtgttaacgttcaaatatttcagtagcgttgaaagtggtgttgaaaaaaagccagagtgctttggtttgacgactgtataatcatcatcttcaggctcaaggcgatcaacaaggtgttggccattagcctcggcggcatagttaatcacctttttgaaatcagattgccatagaccataattatcattaacatagatcacaggcattccttttgattttgcctcttcttttaaagatttaatattgtcagctgcttcctctgtgtatcttgctagaagttcagcatcttcaaaatccatcgtgttgatcacatcgattaataaaagtgcagcggaagtgtcttgatggctatgttcgatatgttctttacccatgtgaactcctctcctttaaataaattggaataatatgtagtttacccaaactgttcttagataaaacgactgtaaaggagtgaatggaatgcaggatcaccttgaaaaagatgagtattttatgcgactagcaatagccgaagctgacaaggcttccgctattggcgaagtgccaattggcgcagtgattgtaaaagaagatcaagtgattgcggcagcgtataaccttagagaaacagaacaacgatctgttgcgcatgctgagctgcttgcaattgatgaggcttgtcgtaaagtaggatcatggcgtttatccggctgcacgctctatgttacgcttgagccatgtgcgatgtgcagtggtgccattgttttatcgagagtggagcgagtagtgtatggtgcttccgatccgaaaggcggttgtgctggtacgctaatgaatcttcttgatgatagccgatttaatcatcaagctgctgtcacggctggtgtatgtgaaggggaatgcggaacgatgttatcgacattttttcgccatttacgattaaaacaaaaagaagaaaagcggcgtaaaaaggaactattatcattcattgaaaatcctgaagagacatgatatagtctttttgtcagcgagacaacgattgatggaggcgtacccaagtctggctgaagggggctgactcgaaatcagttaggacgttcacgcgtcgcgggggttcaaatcctctcgcctccgccatttacatttaatggagtatttgacctgttgctaaaatggtcgaaatgcgatatactttatcttgcaccattcgagtgcacaacattattatcaaatttgccgtgctaggtggggaattagcggtgccctgtactcgcaatccgctatagcgagactgaatcccttcccgaggtttagccactgcagggtctgacctgaataagtggtgttgacattcgggtcctgcgcaacagagtcctatgaatcctgtcaggtccggaaggaagcagcagtaagtaggtaccctctgtgtgccgcgggagtgcccggatcgagctaactgttcaggtaacgcctgtggtggctttatcgaaggaaggtgcacggtttacttaatttaaatgctcaaactcactcttttaaaagggtgagttttttagtatcgttttggtaggattgtcttttgaattaaaggcgatgaaacggtataatagaaacgtatgaagaggttaggaggagagtaggcgaatgagttatcaagcgctataccgcgtttggcgaccgcaaacgtttgaagatgtggttggtcaaaagcatgttacaagaacaattcagaacgcactcatgcagcaaaaaatctctcacgcctatttgtttacaggacctcgaggaacgggaaaaacgagtgctgccaaaattattgcgaaggcgattaactgtgagaaggcaccagtggctgaaccgtgcaatgaatgttcagcgtgtctaggcatcactgatggatcaatttctgacgtcatagaaattgatgcggcttctaatacgggggtcgacgacattcgtgatattcgcgataaagtgaagtatgcaccaagttctgtttcttataaggtgtatatcatagatgaagttcacatgctttctacaggagcgttcaatgctcttcttaaaacattagaagaacctccaaagcatgtggtgtttatccttgcaacgacggagcctcacaaaatcccattaacaatcatttcaaggtgtcagcgttttgatatgagaaggataacagcgcaggacattgtgggacggttacaaaccattattcatgcgcaggatattgaggtagaagaagatgctctttatcaagtcgctcgagcggcagatggcggaatgcgagatgctttaagtattcttgatcaggcaatctcatatagtgaggcggaagttgtattagatgatgtgcttgctgtaacgggaagcgtgtctcaaaaaatgatttcaaaaatcgcattggctttccatcatagagatgtggcggaagcactgaatgcagtggaagaattaatggatcacgggaaagatgctgcacgtttccttgaagatctgatctattactatcgtgatttattactttatcaaacggcccctcagcttgaagaggttgttgaacgagtgaaaattgatgaaacgttccagcagttaggtgaccaatcagcgaaagactggatctacaaggtcatcgagacgttgaatcgtagtcagcaagagatgaagtggacaaaccatccgcggattttccttgaattagctctcgttcaaatttgtcaggatgaaaccagtagtcagagtcagcctgctcaagatcagagcgaattacttgaacgtattcaaaagcttgagggtgaactgaagacactgaaagagcaaggtgttacggttaaacaagaagagacaagtgaaccgaaacagaagaaacaatttaaaccttccagacagaaatctggtgtatctcatggtagaataaaagagatgctgaagaaagcgaccaagcaggatttaatgaaagtaaaaagtgtttggggcgaagtgatggagaacgtccgtcaggaaaaagtctctgctcacgcatggttaaaggatagcgagccagttgcagctaccgataactccttcttgctatccttccagtacgatatgcactgccagatggcaacgaaagacaacattcgtggtacgcttgaacaagtactttcacgcacgattggtaaacagcttgaaatggttgcaatagtcgaaacagagtggaaggaaattcgcgctgagttcttgaagacaagagatgaaccagaacccgacgaaaatggtggggagccagcagaagatccattaattgctgaagcaagacgccttgttggcgatgatttattagatattcaaacttaaaaatgaacgataactaaggaggaatttttttatgaaacgtggtatgggtggcggaggaaacatgaataacatgatgaagcaaatgcagaagatgcagaaggatatggcaaaggcacaagaagaactgaaagacaaagtcgttgaaggttcagctggcggcggcatggttcttgttaaagcaaatggccataaagaaattctggaagttattgtaaaagaagaagttgtagatccagatgacatcgatatgcttcaggaccttgttcttgctgcaacgaatgatgcgctacgtaatgtagacgagttggttaacaaagacatgggtaaatttacgcaagggcttaatatgccaggaatgttttagggggaacgcaggtgcattatcctgaaccaatctcaaaactgatcgacagttttatgaaattgccgggaatcggaccaaaaacggcggtccgcctggcttttttcgttcttgaaatgaatgatgatgacgtacttgatttcggaaaggcgctagtcaatgcgaagcgtcagctaacgtattgctctgtttgtaatcacattactgatacggatccgtgtcggatctgttcagacaatcatcgagatgaatccgttatttgcgtcgttcaagatgcgaaagacgtcatcgctattgagaagatgaaagactatacgggcctttatcacgtgcttcatggtgccatttctcctgtggaaggaattggaccggaggatattaaagtgccagagcttttgaaacgtctacaggatgataaggtgacggaaatcattcttgctacagatcctacaattgaaggggaagcaacagcaatgtatattgctcgtcttgtgaaaccaacagggattcggattactcgtattgctcacggccttcctgtaggtggcgatcttgaatatgctgatgaggtcactctttctaaagcaatggaaggtcgtcgtgaattgtagcgtcaggaggaaacaaaatgttcttcaaacgtaaaggctatttacgcaaggaagctgatgagcgtttgattcagacgctatatgaattaaaagaagtatggaacaagcagaaagaaattgtagagcgtagcgtagaaccctctggagcggtacttgctaagctgaaagtcgatgaagcgaaatacttctttctattaaaagaagcgaaacgaagaaagataagaatgggatagttcaaacttcccgttcttttttatttggacagacatatgatttagtaattctgagaaaaagagcggaggcccattatggatccaaaactcattattggcttatttgtcctaagtattgttttgcttcttttcgtaggggcgccactgaaaccgttgcgttggatcggacaggggttaatcaagcttgccatcggagcgttactactgttctttctaaatacgttcggaagtccttttgatttacatgttcctattaatccaggaactgctgtcgttaccggattcttaggtattcctggccttgtaacacttgctgccatacagcttattatcattgggtgaaacaaaaggatcctataataaaagggtcctttttgtttttctgaaataattttcaaaaagagggttgcatatcaaagataaccctgatatagttatataggtcgccgcaacaacgcggttgacacgaaaaacaatttcaaaaaagttgttgacgccaactgagttaatatgatatattaataaagtcgctgaaaacgacattgaaagaaacgaattgctctttgaaaactgaacgaaacgccatgtaagtagttgtttctacggaaacaaaacattgttttaaaagctagattaagctttctatcggagagtttgatcctggctcaggacgaacgctggcggcgtgcctaatacatgcaagtcgagcgaagagatgggagcttgctccctgatcttagcggcggacgggtgagtaacacgtgggcaacctgccctgcagactgggataactccgggaaaccggagctaataccgggtaatacatcgcaccgcatggtgcaatgttgaaagttggctttctgagctaacactgcaggatgggcccgcggcgcattagctagttggtaaggtaatggcttaccaaggcgacgatgcgtagccgacctgagagggtgatcggccacactgggactgagacacggcccagactcctacgggaggcagcagtagggaatcttccgcaatggacgaaagtctgacggagcaacgccgcgtgagtgacgaaggccttcgggtcgtaaagctctgttgttagggaagaacaagtaccgttcgaatagggcggtaccttgacggtacctaaccagaaagccacggctaactacgtgccagcagccgcggtaatacgtaggtggcaagcgttgtccggaattattgggcgtaaagcgcgcgcaggcggtcttttaagtctgatgtgaaagcccacggctcaaccgtggagggtcattggaaactggaggacttgagtgcagaagaggagagtggaattccacgtgtagcggtgaaatgcgtagatatgtggaggaacaccagtggcgaaggcggctctctggtctgtaactgacgctgaggcgcgaaagcgtggggagcaaacaggattagataccctggtagtccacgccgtaaacgatgagtgctaggtgttggggggttccaccctcagtgctgaagttaacacattaagcactccgcctggggagtacgaccgcaaggttgaaactcaaaggaattgacgggggcccgcacaagcagtggagcatgtggtttaattcgaagcaacgcgaagaaccttaccaggtcttgacatcctctgacaatcctggagacaggacgttccccttcgggggacagagtgacaggtggtgcatggttgtcgtcagctcgtgtcgtgagatgttgggttaagtcccgcaacgagcgcaacccttgatcttagttgccagcatttagttgggcactctaaggtgactgccggtgacaaaccggaggaaggtggggatgacgtcaaatcatcatgccccttatgacctgggctacacacgtgctacaatggacggtacaaagggcagcgacaccgcgaggtgaagcaaatcccataaagccgttctcagttcggattgcaggctgcaactcgcctgcatgaagccggaattgctagtaatcgcggatcagcatgccgcggtgaatacgttcccgggccttgtacacaccgcccgtcacaccacgagagtttgtaacacccgaagtcggtggggtaacctttatggagccagccgccgaaggtgggacaaatgattggggtgaagtcgtaacaaggtagccgtatcggaaggtgcggctggatcacctcctttctatggagaattacgaaggtaacttacgttaccaaccttacatgagcgtttcgtttagttttgaaagaatgatttattctttcaaaacaggtgaagtgatgaagcttacgctgattcaagtagtagccttgttccttgaaaactagatagcacaaacaacgacatccaataattattttttatgcaagaacttagtaataactgatgcgttacggcagcaatgcctaacaaatcgaaggttaagctactaagggcgcacggtggatgccttggcactagaagcctaagaaggacgggacgaacaccgatatgcttcggggagctgtaagtacgctttgatccggagatttccgaatgggggaacccaccatctttaataggatggtatccatttctgaatacatagggaatggaaggcagacccggggaactgaaacatctcattacccggaggaagagaaagcaaatgcgatttcctgagtagcggcgagcgaaacggaatcagcccaaaccagagggcttgccctctggggttgtaggacgtctctttggagttacaaaggcacggatagacgaagcgacttggaaaggtccatcagagaaggtaacaatcctgtagtcaaaatccgctgccctccgagacggatcctgagtacggcgggacacgtgaaaccccgtcggaatctgggaggaccatctcccaaggctaaatactctctagtgaccgatagtgaaccagtaccgtgagggaaaggtgaaaagcaccccggaaggggagtgaaagagaacctgaaaccgtgtgcctacaactagttggagcccgttaatgggtgacagcgtgccttttgtagaatgaaccggcgagttacgatcccgtgcaaggttaagctgataaggcggagccgcagcgaaagcgagtctgaatagggcgaaatagtacgtggtcgtagacccgaaaccaggtgatctacccatgtccagggtgaagttcaggtaacactgaatggaggcccgaacccacgcatgttgaaaaatgcggggatgaggtgtgggtagcggtgaaatgccaatcgaacctggagatagctggttctctccgaaatagctttagggctagcctcgcggcaagaatcttggaggtagagcactgattggactaggggtccttaccggattaccgaatccagtcaaactccgaatgccaacgatttatccgcgggagtcagactgcgagtgataagatccgtagtcgagagggaaacagcccagaccaccagctaaggtcccaaagtatacgttaagtggaaaaggatgtggcgttgcttagacaaccaggatgttggcttagaagcagccatcatttaaagagtgcgtaatagctcactggtcgagtgacgctgcgccgaaaatgtaccggggctaaacgtatcaccgaagctgtggattgtcttacgacaatggtaggagagcgttctaagggctgtgaagtcagaccgaaaggactggtggagcgcttagaagtgagaatgccggtatgagtagcgaaagacaagtgagaatcttgtccgtcgaaagcccaaggtttcctgaggaaggctcgtccgctcagggttagtcgggacctaagccgaggccgaaaggcgtaggcgatggataacaggttgatattcctgtaccacctcctttccgtttgaacgacgggggacgcagaaagatagggagagcgcgctgctggaaatgcgcgtccaagcgattaggctggtgaataggtaaatccgttcaccgtgaaggctgagtcgtgatggcgagggaaatttagtaccgaagtccttgattctacgctgccaagaaaagcctctagtgaggaaagaggtgcccgtaccgcaaaccgacacaggtaggcgaggagagaatcctaagacgatcgggagaactctcgttaaggaactcggcaaaatgaccccgtaacttcgggagaaggggtgcttcctcgggtttatagcccaggggagccgcagtgaaaagatccaagcgactgtttagcaaaaacacaggtctctgcaaagccgtaaggcgaagtataggggctgacacctgcccggtgctggaaggttaagaggaggggttatcccttacgggagaagctctgaatcgaagccccagtaaacggcggccgtaactataacggtcctaaggtagcgaaattccttgtcgggtaagttccgacccgcacgaaaggtgcaacgacttggatactgtctcaacgagagacccggtgaaattatagtacctgtgaagatgcaggttacccgcgacaggacggaaagaccccatggagctttactgtagcctgatattggattttggtacagcttgtacaggataggtaggagccatagaagtcggaccgccaggttcgatggaggcgtcggtgggatactaccctggctgtactgacattctaacccagcaccgtgatccggtgcggagacagtgtcaggtgggcagtttgactggggcggtcgcctcctaaagtgtaacggaggcgcccaaaggttccctcagaatggttggaaatcattcgcagagtgtaaaggcacaagggagcttgactgcgagacctacaagtcgagcagggacgaaagtcgggcttagtgatccggtggttccgcatggaagggccatcgctcaacggataaaagctaccctggggataacaggcttatctcccccaagagtccacatcgacggggaggtttggcacctcgatgtcggctcatcgcatcctggggctgaagtaggtcccaagggttgggctgttcgcccattaaagcggtacgcgagctgggttcagaacgtcgtgagacagttcggtccctatccgtcgcgggcgcaggaaatttgagaggagctgtccttagtacgagaggaccgggatggacacaccgctggtgtaccagttgttccgccaggagcatagctgggtagctacgtgtggaagggataagtgctgaaagcatctaagcatgaagcccccctcgagatgagatttcccacagcattaagctggtaagatcccttagagatgatgaggtagataggttcggggtggaagcgtggcaacacgtggagctgacgaatactaatcgatcgagggcttaacctaaaacaaaagtgatgtgagcatgtctcactaaacttgatattattggaatacgttgtgcgtgctatctagttttcagggaacaccctgtaaagtctagtgacgatggcgaagaggtcacacccgttcccatgccgaacacggaagttaagctcttcagcgccgatggtagttgggggatctccccctgcaagagtaggacgtcgctgggcaaaagaagaaaggcgagagaccaaatggtttctcgcttttttgtatggttttatgggtgagtttatactagctcaaagccctcattcatcacgttcgcggaattaatctcaaattcgcggaaatatcatgcgaaagcgcggaataaatccgattttcgcggaaatatctaaaagatcgcggaataaacttgctaccttcacataccgcttgagctacaaggataatatacctttgaaattttctttcttttcgtaaatcacagacacgggataagttacaggcacatatccttagaaagaagcgaaaaagtcagcttaaattgaaaaaaccggtatagaaccgctataattgggcaatgcttttaccatggaggtgggaagatggagaagacaatcagggagagctatagtgagtgctgtcttgtttgtgaagagcacagtttcaaaggcattcatatttgtgatcgttttatctgtcatgactgtgagcggaaggtcattcaaacagataccagtcatgaaaactatcaattttaccttgagaaattacgcaaactacgactaagtcgattagcataagcagatagctgtttcataggctatctgcttttttacttaacctaaagttggaacaatcatagggatttgcctatccctttacttctccgatagtctagataatgatagaatactagtataaggaaatgaatcttcaatagattgaagttgatttaatgaacaaaatggatcatgctccattatatgaagctctactatcgtggaaagatcagaatcctctttcctttcatgtccctgggcataagaatgggatgagcttttctacatataaacgtgcggattatttgtataaagacttattgaaaatagatgcaacagaactttctggactagatgatcttcatcatgcagatggtccaattaaaaaagcagagcagcttactgctcatctatatggtagtgttgaaagtcgctttttggtggggggttctactgctgggaacttggcgatgatcatggcgttatgttctgaaggagatcgagttcttgttcagaagaactgtcacaaatctgtattgaatggactacgcttagctaaagctagacctatttttctcagcccatctattgatgaagcaagtaaggtgccgacaggagtaacactcgatctcatacgtcgtgcattgaatcaatataaggatatcaaagtgattatactaaccaatcctaattactatggaatgaccgttaacctagagccgattatctcttatgctcacaagaatggaattccggttctagttgatgaggcgcacggtgcacattttgtaagagggaagtttttccctgagagtgctttaaagcaaggagcagatgtagttgttcaatctgcccacaaaactctacctgctatgacgatgggttcttacttacacataggaaatgaaacgtataggaatgcgctcaacgactatttagaactctttcaatcaagtagcccttcctatccaattatggcttcactcgatttggcaagacactatctctcttcgctgactgatgatcagcttggtcttattttagaagaggtttatcaatttaagaaacaactaagtgaggttcctggtttaagcgtcataggggatgtaggtcaagcgtatcaccagattgatcctatcaaaattacggtacagttatctggcatgtcaggatatgagttagcaaaaaaacttgagaatgagaatgtatttgttgagcttagtgaccctttaaatgttttacttgtttgcccaattacttctaatacagaggcttttgacaggggattacaggcatttaaaaaaattgcttctctcagaaatgaagctaattttaacgtgtcattatttaagatagctgatgaagatattacttttccggcttattcctttgcgaagttggagacgatgatgaaagagaaggttaagctaactgaggcgactggattgattgcagcaaaagctgtcattccctatccaccaggtgttcctattgtcataccgggtgaacgaatttgtttagagaaagtgaaacgtttagatatgattatacgtgctggtgggcatgtacaaggattagatggtgacatgattgagattgcaagagaagaggagtaaggcattgaaaggattatttataacttttgaaggaccagatggtgctggtaaatccacacaggttcagaaactagctgattatttaaatgaagaagggattcgttttattcatacccgagagcctgggggtacagcaattagtgatcagattcgatcgctgattttgaacccagagcataaagagatggtggatgagacagaagttcttctttatgcttcatcgcgtgcgcagcacgtaagagaaaagatcattccggcattaaatgaagggtaccttgtgatctgtgatcgctttgttgatgcatcaattgcttatcaaggagtcgggcttggattagatgtggaaagtgtgaaggtgattaacgaatttgcaaccggtggacttacgccggatcggagctatatgattgatcttccagtttccgttggtaaagaaagaatgattgctagaaatcaactagaccgaattgaacaaaaaggaacagcttatcatgaaaaagtaagagaagcctttttggaactatataaagataataaagaacggattcatttaatcaatggtgagcaaaatgttgatgagattttttcatctataataaaggattttaaaacactttgggataattattctactaatagcaaataaaagggtggaggtttgccgcccggggagggataaaaatgaagttagtcatggctgtcgtacaggataaagatagcaaccgcttatccaacgccctggtcgaccataattttcaggcgacaaagcttgcgaccaccggtggatttttgcgtgcagggaatacaacattcctgattggaacagaagatcatcgcgtgcaaaagcttcttgatatcattaaagacaattgccaaagcagagagcaaatggtggcaccggtatctccaatgggaggaaatgcggactcttatgtcccttatcctgttgaggtgtcggtaggaggagcaacggtgtttgttcttccagtagaggctttccatcatttttaatacggtaggatgagggatagaaatggcagattggaatgaattaaaagaacgtcagcctacggttgttaggatggtaaccaacagtttcacaaaggatcgtctatctcatgcatacttatttgatggtggagcaggcactggtaaaaaagatgtcgccgtacatatggcaaaaacttatttttgtcaggaacgtacggggattgagccgtgtcaacactgcaaagactgcaagcgaattgattcagggaatcacccggatcttcatctcatagagcctgaaggtcaatcaattaaaattgatcaaataagaaagctacaaaaggaattctcctatcttggagttgagtctcgaaaaaaagtatatatcttgaatcattcagatcgaatgacaacgcaggccgcaaatagtttacttaaattcctagaagagccggggcaaatgacgatggcgattttattaacggaacaaaaacagcatattctttcgacgatttattcgaggtgtcaggtcattacttttcagccactttcaacaaatggagtggaagaagctcttataaacgatggagtgaccccataccttgctaaatcagctgctcagctaacgaatgatcagcgtgcagcaaaggagcttgcacttgatgagtggtttgcacaggcaagagcgatagtgatacaattgactgaagagttgaaggaaagacctcatcaggttttcctaacgatccatgacaaatggctagcacattttaaggataaaacgcagcaggatatgggccttaaccttatgcttttttggtataaggatttattgaaaatacaactgcaggataatcggattgtctatgcagatcagaaggataagctcgaacgttatgcccttcaattcggaagaaagaagataagtcagcatatgatggcgatactcgatgccaaaagacgtctgagtgcaaacacaaacccacagtttgtgatggaacagctagtgctcaggttacgggagggataagtttgtgtatgaagtagttggcgttcgctttaaaaaagcggggaagatctattactttgatccgagtagcctccaggtgtccgacaaagaatttgttatcgtggagactgccagaggggttgaatttgggaaagttgtactagctaacaagcaagttgatgaagaagatatcgttcttcctcttaagaaagtaattcgcatagccgatgagaaagatcgtcttgcggtcgaagataataaacatgcagctgaagaagcatttgatgtttgcgtttctaaaattgaagagtacaagcttgatatgaagcttgttgatgtggaatatacatttgatcgaaataaaattattttttattttacagcagatggaagagttgattttcgcgaacttgtgaaagggctcgcatccatttttcgaacaagaattgaacttcgtcagattggggtacgcgatgaagcaaaaatgcttggtggtattggaccgtgtggcagaatgctttgttgctcaacgtggcttggcgattttgaacctgtttcaataaagatggcgaaagatcaaaatctatccttaaaccctgctaaaatatcaggactttgcggcagattaatgtgctgcttgaagtatgagaacgatgcttatgagtctggtaaaaaagagcttccagacgttgggaagacgattcataccggacagggcaaaggaaaagttgttgggttgaatatattggagcgtcttgttcaggtcgaattgttcgaacttaaccgcgtgacagaatatacgcttgatgaattgatacaagacggcgcagtatctacgcaagccacagattgattgaggtggaacggaagtggagaaaaaagaagttttttcacgtgtaagctcaatggaagaacagattggtgacttatacaaacaattaggcgaacttaaagaacatcttgcaggactgctggaagaaaatcaccatctcgaaattgagaatcaccacttgcgagagcggttagaacaaacttcagagccgaagagtcattcatctggcaagaagaagcggggtaaaccagaagttggagaaggctatgataatcttgccaggttgtaccaggaaggttttcatatatgtaatctccactatggtagtattcggacagaaggagattgccttttctgcctgtcatttttaaataaaaagtagtgatctggtctttccgtatctggaaagaccttttttacactttcgagtgatttgataaacaattcatatagataggagaacagcatcatgcaattaaacggtgatgaacgaattgattacatcgttgaaaacgaactaagcattattcaaagtccaactgttttttctttttccttagatgcaatcttactagctaggtttgcttgggttccaatcaagcgtggaaagataatcgatctttgtacaggaaacggtattatcccgctgttattatcgcggaaaagtgaagttacgattgaaggggtggaaattcaagatcgtctctttgatatggggcagagaagtattgaattaaataagctaagtgctcaattaaccctccatcatgcggatattcgtgaattaccttcaaccattaaacgggaatcgtatgatggggttacgtgtaatccaccatattttaaaagtacgcgaaacgagcagcgtaatttaaacgagcatcttactatcgctcgacatgaagtgatgtgtacccttgaagacgtcattcaatcctgtagccaattagttaagcagggcggtaaggtatcccttgtgcatcgtcccgaaagattactggacattatgacattaatgcgaaagtatcgtatcgaaccaaaaaggatgcagctcgtctatccgaaagctggtaaagaagcaaatacattgttaattgaaggaataaaagatggaaaacctgatttaaaagtattgccgcccttcattgtgtatagagacgacaatcaatacactgatgaaatgagacatgtttatgcagagctctaatcactatgtgtatattctgcagtgtcgagacggaagctattatactggctatacgaccgatttatcacatcggttggctcagcatgaatgtggaaaaggtgcgaaatatacaaggggaagaggtccgttaaccctcgtctaccaagcggagttcaagacaaagcgtgaagcgatgcaagtagagtatcagatcaaacaacgatcgcgcgctcaaaaagaaaagattataaaagaagagaggcaaaatcatgtggagtcaacagagctacaaagagaccgagacaggtaagctttatctcgtccccacccccataggcaatttaaacgatatgacctttcgtgcgattcagaccttaaaagacgcagatcttattgctgcagaagatacgagacaatccaaaaaattgacgaatcacttcgaaattgaaacaaagttaattagttatcatgaacataacaaagaatcgagtggccataaattattggagcggttaagagaaggacaaaccatcgcccttattagtgatgcaggaatgcctgctatttcagatcctggttatgaaattgtatcttcttgcgtcgctgaaaatattcctgttattccgttgccaggagcaaatgcagcgattactgcacttatagcatcagggttaccgacccaacatttctattattacggttttctctcacgccagaaaaaggagagaaaaaaggaactttctcatttaaaaggaattccttcaccaattttattctatgaagcccctcatcggctaaaggaaatgatgaaagcaatccttgaagaacttggagacagagaagttgttatagcaagagaattaacgaagcggtatgaagaatttatccgtggaaccgcagaagaagtgttagtgtggtgtgaacagtcagagattcgtggtgaattctgcgtcatcgttgaaggtggtaatgaagaagagacaaatgaagaacattggtgggcaaacctttctgtccaagaacacgttgagcattacattaatgagggaatgaaaagtaaagatgcgatcaagcaagtatctgttgaaagagaacttccgaaacgggaggtctatcaggtctatcatgtcgaataatcatgtcgaaaaaaagctcctgccgtaggcaagagcttttgtagattactattattttgcaagagctttttgaatttcttccaatacttgctctgcgccttctttgctaaggataagcttgccattaccgattgcaagattgtcatcggatacttcaccagttacctggcaagtcatgttaggcttatacttctttaggataatgcgctcgtcgtcaacatagatttcaagagcgtccttttctgcaataccaagtgtacggcgtaattcgatcggaataacaacacggccaagctcgtcaactttacgtacaataccagtagatttcatgttttatactcccctattcccaattttttattaattacgtcaggattcgacaaatttctctatttatgttctatataataccagtgtttcccattagcgtcaatccttttaaatgggtaaatatttcctaaaaaaggttcgttaagggatttatagtactatgaaatttccaaaacctgacttgcctatattaataattcgacaattttcttgtaaatccttcgacatgaattgtaaatttgtgtaggtaaaaaggatttgagctccgcttccttgcaattattccttaaattagttatattttgatgaagaagtgacgtacatagcggaacgcaattgcgggctgtagttaaaaggtgctaatgttctcgtccaaagtgggacgggagctttttatccagtagcccccacctcaaaacgtgagttcatttgggcgttaaggtggggcattcatcgtttctaaagaacgatccagacgttccacttataactgttttaatcaaggaggaagcaacatgggtgacaagacgttttatattacgacaccgatctattatcctagcggtaagttacacattggccatgcctatacaacagtagctggcgatgcaatggctcgttacaagcgactaagaggctttgaagttcaatatttgactgggacggatgagcatggacaaaaaatccaaaagaaagctcaggaacaaggtgttactcctcagcaatatgttgatgatatcgttgcgggcattaaagacctttgggataaattagacattagttacgacgattttatccgcacaacagagaagcgacacgaagagattgtcgaaacgattttccaaaagatgtatgaaaaaggcgatatctatcttgaccagtacgaaggatggtattgcactcagtgcgagtctttctttactgaacgccagttagttgatggcaagtgccccgactgtggacgagaagtagaaaaagtgaaggaagaatcttacttctttaaaatgggtaaatacgcggaccgtctactgaaattttacgaagataatcctgagtttatccagccggaatcgagaaagaatgaaatgatcaacaacttcatcaagcctggtcttgaagatcttgccgtatcgcgaacttctttcgactggggcgttaaagttcctggcgatcccaaacacgtcatttacgtttggattgatgcgttgtccaattacatcacctccctggggtatggaactgaaaatgatgagctttataataagttttggccagccgatgtccatcttgttggtaaggaaatcgttcgtttccatacgatttactggccgattatgttaatgtctcttgatcttcctcttcctaagaaagtttttgctcatggctggttgttaatgaaagatggaaaaatgtcgaaatcaaaagggaacgtcgttgacccagtaacactaattgaccgctatggtttggatgcgttgcgttattatctattacgcgaagtaccgtttggttcagatggcgtctttacaccagagagctttgttgaacgaattaatcatgatttagctaacgatcttggtaacctgttaaatcgaacagtagccatgattgcgaaatattttgacggtgaagtacctgtttatcaagggtctgttaccgcttttgacgataccctcgttgagatggtcgattccaccatttcaaaagtggaaaactcccttgaaaatatggagttttcagtagcgctagcatccatttggcagctcattagtcgcacgaacaagtacattgatgaaacggaaccttggattcttgcaaaagatgaagctaataaggagaaacttggagccgtaatggttcatcttgctgaatcgttaagacacgttggtattctcttacagcctttcctaacgcaaacccctaaaaagatttgggcgcagctaggtataacagaaggtgagaaaacaagctggaattcactaggattcaaaaaaggctacggtggtacgactgttcaaaaagatgcgccacttttcccgcgccttgatcgtgaagaagaggttgcctatattgtcgaacagatgggcggtaatattgtgaaagaagcacctaccgtagaaaaaccagatctagatgaaattacaatcgatgactttacaaaagttgatttaagagtagctcaagtgctggaagttgagccggttaaaaaagcaaataaacttttgaaactgaagttagatctcggttatgaaacaaggcaggttgtttcaggaatcgcaaaacattataaagcagaggatctcatcggcaagaaggtcgtttgtgtttccaatcttaagccagtaacccttagaggagaattatctgaaggcatgattctagcaggtgaacacgatggtgaactaaaattgtcgaccattgctgaaagtttgccaaatggaactcaaattaaataatcactcaagactcggtcttaattagaccgggtcttttttacttttcatttcacaatttatccctgtaaataaatagaggatttatgagtgggtttccttcgcatgcgcatcataaaagcgaagtgaaccattataaaaggccttaatatacagaatattctaacttattttctgttcgttgtaaacaaattgtaattaaaatgaaactgtttagacttagaaaaaaactaggacatttggtacactagcatcgtactagagtggagaaggagttttgacatgctattcgacacacatacacatttgaatgttgaacaattttccgaagatcaacaagaagtgattgagcgagctcaagcagcaggagtcagtaagatggttgtggttggttttgatcgtgaaaccattacacaggctatggcacttgtagaaaagtatgattttctttacgcagcagtaggttggcaccctgttgatgcaattgacatgaaggaggaagacctcgagtggattgaagaacttgctggtcatccaaaagtcgttgcaatcggcgaaatgggccttgattaccattgggacaagtcacctcatgacatacaaaaagacgtttttcgtaagcaaattgcgcttgcgaaaagagtagatttaccgatcatcatacataatcgtgaagcgacgagagatgtcattgatgtattgaaggaagaaaatgcagcagatgtaggcggcattatgcactgtttcgctggaactgtagaagaggcgaatgagtgccttgagatgaatttctacatttctcttggtggtccagtgacatttaaaaacgctaaactacctaaggaagttgcaaaagaaataccagtggatcgtttgcttattgaaacagattgtccatttttagcaccgcacccaaaccgcggtaaacgaaatgagcctgcttatgtaaagcttgtagcagagcaaattgcggagttaaaagaaattgactacgaagaattagcaagaagaacatctgaaaatgcgatgaacctatttgggatcaatcgctaatcaaaaccgttgtcgttaaaaaaagagatcatcttatgctttttgcagaaacttccccatctagagtgaagataaaaccttttctattaatcttgtaataaggggataagtcagaagcttttctttatgaaacacagtcggttcaagggggatctatgacaatgaaatcgaacatggaaaacttttttgctcgtcttaagggcggaaagaacgtattcatgatttgcttaagtgtaattgtactaggtttagtctccggctttatcgtgtttgaaactacaaaagcttcggtcacgcttgtccttgatggggaagagaagttagtagatacacatgcagatacagttgcggagttattaaaagatgaaaacttgagtcctgatgctcatgattatttaagtcacgatttatcagcacagctggatgctggtgacgttattgaatggaagcctgcttttcaagtaacgctgtcggtcaatggaaatgatcaacaggtctggtcaacgcaagagaccgttaaaggttttctcgaaaatcagaacattgagctaaaagaacatgatgaaatgtctgtttcactcgatgatgaattgaaggaagatatgacaattgccgttgatgaggcgtttaaagtggctgtaaatgacggtggaaaacagaatgatatttggacaacttcgactacggtcgctggctttttagaacagcagaacattcaacttggagaacttgatcgcgtagaaccaggaaaaaacgagaatgtaaaagcgaactcggaaatcaacgtgattcgagtagaaaaggtcaccgatgtagtggaagaaccaatcgactatgcaaccattaagaaaaacgatagctcgatgcaaaaaggaactgaaaaagtagtagaagatggacaagaaggcaagcaagagaaacattatgaagttgttttagaaaacggcaaagagatttcacgtgaacttaagaaaacagatgttgtgaaggaaagcagtgacaaaattgttgctgttggaactcaggtgattatgcaaacagctgttaaaacgagtagcgattcatcaacgcctactaaatcaactaagtcgtcgtctagcaagcctgagcctgctgatgatgcgaagaagtctgaaccaaaagctaaaagtgaacctgctggtaaagctggtaaagttcttaacgtatcaacaacagcatatacagcaaactgtacaggatgttcaggaattacttcgactgggtttaacttaaagtccaaccctaatgcgaaagtgatcgcggttgatccaagtgttattccactaggctcaaaagtatttgttgaaggatatggaacggcgattgctgctgatacagggggagcaatcaaaggaaacaaaattgacgtctttttctcatccaagtcacaggcctatgcatggggaaataagaccgtacaaattacgattctcgattagtgatcgatctatgatatgctattaacacagagtgaggcaaatctctctctgtgttttttgtatgataaagaaaagtttaatgaggaaaactaaaagaattcacgcgttataaatagaatcggttacgtattatggaggaaacaaagtgaaagtaaaagaagttattatcgtagagggtaagaacgatacgctggctgttaagcgtgctttagatgctgatacgcttgaaacaaatggttcagaaattagtgaagaaacgctcatacgaattgaattagcctggaggagaaggggcgttattgtttttacagaccctgattatcctgggacacgtattcgacagatcataagcgagcgacttccttcatgcaagcatgcttttcttaacaaaaagcgagcgatctcttcaaatggaaaaaaagttgggatcgagcacgcttcaattcaggatattcaagaggctatcctttcagtaagagaagagtttgagacaccggaggtcttaattgaatgggaagatttgattgcagcaggtcttgtggttggtgatcgtgcgaaggagagaagaaaagctcttggtgagcggttgcagatgggctatatgaatggcaagcagctattcaaacgacttcaaatgtttcaaatatcaaaagaagagtttcgtcaggcactcgaagaagtgttacaggaggaagagaaatgaataaagaaatatcaacccccgttagaacaaaagaaatactcgcaaaatacggctttacatttaagaaaagccttggccaaaactttctaattgactcgaatgtcctaactaaaattgtcgatcaggctcaattatcacctgagtcaggtgccattgaaattggtcctggaattggggcgcttacagaaaaacttgcgaaacgagcaaagaaagtagtggcgtttgaaattgaccagcgccttctcccaattctggatgatacgctgtcaccatacccccatgttcatatccgccatagcgatgtgttagaagcagacgttcatcaagttatcgctgaagaatttgaagaaggtcaggatttaatggtggtggcaaatcttccatactatgtgacaacccctattctgatgaagttattagaagaaaaactaccggttcgtggtattgtggtaatgattcaaaaagaagtggctgagcgtatagcagctaaacctggctcaaaagaatatggatcgctttcactagctgttcagtatcatgctgtagcaaaaacggctttaactgttcctaaaacagtgttcgttcctaaaccgaatgttgattctgcagtgcttcatttagagttgcgcgaggagcctcctgttgatcttttggatgaagcttatttctttgaagttattcgagcaagttttggtcagcgcagaaagacattattaaataacttgcaaaataatttactgagcaaagatcaaaagccaatgattgaagaagtattaacagaaacaggtattgatggaagacgtcgtggagaaacactttccatggaagagtttgcggcattaagcaatgcattttataagcgaagagcttgatttgaaaaaacaccttagagggtgttttttttgattttattaatccgattttgctttcgtaaggtaagggctggtgaccactcctaaacagttctagaaaaacatcttttcaaaaacttctcatatagtagaaaaaggagccatcgtttcgtttaaaggtcaagcggcgtggagggaagagatgacgatgaaagaaggagatatcgttgcaaggcgttcatacggctgtgatttaatcttccgtgttacgagattaaatgaagcgaacaagtcagcagagctcgtaggtgaagatatgaggctcatcgcagacgccccatatgacgatctcgtattaattgactcaagtgaacataaaatgaggcgagagcagtcgaaagagaaagaggattattcgtttcgcttgttcagacaagattatcagttgttacgtatgaagcgagaatattcggctactagccattttaagaaagaaacgagtttctttgaacttccaggtaaaattcttcatattgatggcgatccactttatctaagcaaatgtttagaaatgtataagcgtttaggggttccagtctatggtttgtatatgaaagaaagtgaaatccctgagaatatcattaaattagttaacaatgtaagaccagatattctagtgataacaggacatgatgcgtatagtaaacataaaggcgaaaaaaaagatctgcagtcctatcgcaactcacgttattttgttcgtgcagtaaaagaagtacgaagcgtttttccgaacctagatcatcttgtgatttttgctggtgcgtgccagtctcattttgaatcattaattcgagcgggtgctaattttgcaagctcaccttcaaggattaacatccacatgttggatcccgtttttattgtgtctaaaatcgcgctcacgtcatttactgatcatgtgaacgtttgggatgctctaaggaatacgttaaccggtgaagatggccttggaggcgttgaaacgaaaggaatactgcgaactggcatgcctatgaaagaaaatgaagattattcagagtgaaagaacggatggtagcgatactcatccgttttctttttttattctatattttaagtttatgggaaagaagtgtgtcagaaaaagacatgctatttaaaaaaacgcctataaataaacagttttcatcgattacacatatttttcgacaaattaagaaataataaaaatgcacatcagtagtaaataacaattgacattgtttttgcttcgttgttataatttaagttttatttgacaagatgatgcaaaagatgttataatttgtctaagtgaggtggaggttccgatggcaaaaacgattattgagatcaaacaaacgttacaatctcaggttggcaaacgcttgaccttaaaggcaaacggaggtcgcagaaagacaattcaacgttcaggcatccttgaagaaacctacccggcagtgttcatagttaagctggatcaggacactaacgcatttgagcgcgtgtcgtacagctacacagatattcttacagatacagtacaaattacatttaatgaagaacaagcggcagtaagcggttaaggcatttggtctaactgcttttttgctttctttagaaagatttattcccttttatggttacatattcgtagtataatggttgctttctatcctcaaactaagcgtgtcacaggatagaaaggagcttgattcgcatggcgagacgtagagggattatgtccgatcatttgaaagaagaaattgcgaaagagcttggattttatgatacggttcagaaagaaggttggggaggaattaaagctcgcgatgcaggtaacatcgtgaagcgtgcgattcaactagcagaagaacagcttggaaaccaacaaaaacactgaaccctgtgacgattgcccctggctaatagccgggggctttttttgttgtgaaatgctgctacgctccttcttaatctgtttctttcttttagggttgttgtgttacaataattcacagtaagttaaaatgtcgaacggtaggacgaaaatgtaggtgaacgagatgagaaaaaaattgagtgtgaaagcgccggcgaagataaacttagcacttgatgtgcttcataaacgacctgatggctttcatgaagtggaaatggttatgacgaatgtagatctggcggaccgtcttgagttaaccgagctaagacggaatgaaatcattattgaatccactagtggttttgtacctgatgatcagagaaatttagcgtttcaagcggcagccctcctcaaaaagaaatttaacatccgacagggaattgccatcaaaatcgataagcaaattcctgtagcagctggattagctggaggaagtagtgatgcggcagcaacgttaagaggtcttaatgaactttgggaattaggacttacttatgatgaacttgctgatataggttctgagattggctcagacgtggctttttgcgtttatggaggtacggcccttgccaagggacgaggagagattatcaagccgatcgatgcacctcctccgtgctgggtcattcttgcgaaaccttcgattggggtttccacagcagaagtttatcgacgtcttcgtacgagtgaaatgaatcatcctgatgtaaaaggaatgatgcaagcgattgaggacaaaaattacgaagccatttgtgaccttctcggaaatgttttagaagatgtgacattaaaacttcatccggaagtgcgtcaaatcaaagagaaaatggaaagtctaggtgctgatggggtccttatgagtggaagtggaccaactgtctttggactaacccgtcacgaatcaagaatgcagcgaatttataatggattacgaggcttttgtggtcaagtgtatgcggttcgtctgctaggtgagaagaacccttgaataaatccgtacattagtgatatattatgagtaattattcggatttttttggaggttcttctatgaagatgaaacggagttctcggttagtggacatgacaaggtatatgttagagcatccacaccgcttagtttcactaacttatttctcagagcgctatggcgcagctaaatcttcaatcagcgaagatttggttattattaaagaaaattttgagcaacagggtgtcggatcgttattgactgttcctggtgcagctggtggtgttcgatacatgccgctcattagtgatgaagaagcagaccgcgtcgttggagagctgtgtgatttcttagaaagtcctgatcgccttctcccgggtgggtatttgtatttaactgatatcttaggaaatccagaaattatgaaccaggttggacgtcttttcgcatctgtcttcgctgaccgtaaaattgattgcgtgatgactgttgcgacaaaagggattccacttgcgtatgcagctgccagtcaccttaacgttccagttgttatcgtaaggcgtgatagcaaggtgacggaaggctcaacggtaagtattaactatgtatcaggctcatccaaacgaattcaaacgatggctcttgctcgtaggagtttgaagcctggcgctaatgtcctaatcgtggacgacttcatgaaagcaggtggaacgattcaaggaatggtaaaccttcttgaagagttccaggctgacgtagctggaataggcgttctcgttgaagcggaaggtgaaggagaagaacgattggtagaagagtatgtctcgatgatgaacctaggtggagtcgatatgaaagagcgttcgattcaggtagcaccaggaaactacaaaaaatttcttgcgcgattaactgaaggagtggagaacgaatgaaaactgtctacacgaaatcagcaccagaagcaattggcccttattcacaaggaatgatcgttaacaacttgttttatagctcgggtcaaattcctttacgagcagatggaacatttgttgatggcgcaattgaagagcagacacatcaagtcttttcgaatgtaaaagctgttcttgaagctgcggggtcatcacttaatcgcgttgtgaaaacaaccgtgtacatccaggatatgaatcaatttggagcgattaatgaaatatacggggaatactttgatacacacaagccagcgcggtcctgtgttgaagtagcgcgacttcctaaagacgcccttattgaaatagaagtgattgccttagtcggttaatcaagttgacgcactcatttactgggtgcgtcttttttaatgatttctctgtttagattctctcatttgtgtcgaacatggattttatgagctgctaacagcaaatttttataacattttttatatttagaagaaggatttgttgagtataagttgaatagtgcatatatgctctaattaatggaaaaaggtggtgcactcgagttggaaattacagatgttcgcctacgtcgtgtgaatacggaaggacgcatgcgcgcaatcgcttccatcacaatggatcatgaattcgtcgttcatgatattcgcgttattgatgggaataacggcatgtttgtagcgatgccaagcaaaagaactccagatggagagtttcgcgatatcgctcatccaatttcctcgaatacaagggaaaagattcaaactgcagttttagctgaataccatcgtgttggtgaaatggaagcagcttatgaagaagcaggagcttcctgattgaaaagtctggtcaattgaccagactttttttatgttttacgaccgaataaaagaatacgaatcgaaatgttcatcaacctttcttttccagcctcatatatggtgaggatttcaggaacttccttgaaagtgaggggtttttgagatatagtcaaagtggaaaaataggatacgatggaggaaccatatacatgaatagatttgcagttgtactagcagcaggtcaaggtacacggatgaaatcaaagctttataaagtgctccatcccgtttgtgggaagccgatggttgagcacgttgtgggtcaacttgaagaacttaagcttgagaacattgtcactgttgtcggtcacggcgctgagaaagttcgtgatcaacttggtagtcgagtcaattatgtcctccaagaagaacaattaggaacggctcatgctgtcatgcagacgcaggaaacactagcaaataatgaaggtgtgacgcttgtagtatgcggtgatactcctctcattacgaaagaaacaatggatgctctcttaacatatcatgaggaaaagggtgcgaaagctacgattctgacggcagacgctggtaatccatttggttacggacgaattattcgtgatgaaaatggacgtgttcaacgtattgttgaacaaaaagatgcaactgacgatgaacagcaagtgacggaaattaatacaggtacatactgttttgataacaaaaccctttttgagacgcttcaattagtgaaaaatgaaaatgctcagggagaatattacctaccggatgttgttgaaattcttcaaaaacaaggtgaagtcgtagcagcttatcaaacagcagatttcgatgaaacaatgggcgtgaatgatcgtgttgcgctttctaaagcagaagttgcaatgaaaaagcgcattaatgagaaacatatgcgtaatggcgttactctgattgatcaagatgcaacatacatctctccagatgctgtgattggtcaagataccgtcatttatcccggtacaacgataattgggaacaccaccattggtgaagaagctaaggttggacctaatactgaaataaaagatagtaaggttggaaatatgaccgttgtgaaacaatcggttattcatgatagcgaagtaggaaatgctgtaaatattggaccgtttgcacacattcgacctgcttcacaaatcggtgatgaagtgaagattggaaactttgttgaagtgaagaaagctgttatgggtcacggaagcaaagcatctcacttgagctatgttggcgatgccgagatcggtaaagatgtgaatcttggctgtggttctatcactgtcaattatgatggtcagaaaaagtacttaacgaaagttgaagatggggcattcattggctgtaatgtgaatttgattgcacctgtaacagtaggcaaaggtgcaaccgtagcggccggctctactattacagatgatgttcctagccaggcgctatccattgcgcgctctcgtcagacgaataaagaagattatgcaacaaagaagaaggataactgatttttaaaggataagaaagtatgaatagagtgttgtctgctcaagctttgaggagtcgataagacgtttgtgtttttcttattaataaatggaggggtaccagccgatggctaattatttagatccaaatttgaaagtgtttagtttaaactcgaatcctgaccttgcagaagagattgtagagcacataggtgttccaatgggaaaatgttctgttgtgcgctttagtgacggagaaatccaaattaacatcgaagaaagtattcgtggctgcgatgtttatgtgattcaatcaacatgtgcccctgtaaatgaaaacattatggagcttctcattatgattgacgctttaaagagagcttctgctaaaacaatcaatattgtgcttccttattacggatacgcccgtcaggatcgtaaagcaagatctcgtgaaccgattacggcgaagttggtagccaaccttcttgaagtagctggagtaactcgtcttattacgttggatcttcacgcctcccagattcaaggctttttcgatataccggtggaccagttgatgggtgttcctacgcttgcaaaacactttgaagaaaagaaccttgaagatattgtcgtggtgtccccagaccatggtggagtgactcgtgctcgtaagcttgctgagcgcctgaaagcgccaattgcgattattgataagcgtcgtccacgtccgaatgtggctgaagtaatgaatattgttggtaacatcgaaggcaaaacagccattattattgacgacattattgatacggccggtacaattacgctagcagctaacgcgctcattgaaaacggagcaaaagaagtgtttgcctgctgtacacaccctgtcttatcaggtcctgcaatcgaacgaattgataattccaaaattaaagagcttgcaattacgaacacgattccgcttccgaatgacaagcaaatcgataagattacacagctgtccgtggcacctcttcttggtgaagcaatcatccgtgtccatgagcaactttcagtaagtaaattatttgattaaatgaaatacgtttattgccttctgattatgggtattcataatagtagagtaaaacctaatcaggaaggtgattaataatggcagcaacattgaaagcattagatcgtaatacaacaaaaagaagcgaacttagaacactacgcgaaactgaagaaggtcttccggccgttctttacggtaaagaccgcaaaagtgctccggtacaggtagacgctcttgagttcattaaggtatatcgtcaggtcggaaaaaatggcgttattgagttaaacttcgaaggacagggtacttatcctgttatggtatatgacatgcaagttgatccaattaaaaaccacgttcttcacgttgacttctattctgttgaccttaacaaggaagtagaagcagaagttccagttcacttaactggtgaagctgtaggaagtaaagagggtggcgtcgttcagcaaatgcttcatgaaattcttgtgaaagctaagccgaatgatttccctgatagcatcgatgttgatatttcagaacttaacgttggtgacgctgtacaagctggagatcttccgaaaggtgacaagtacgaaattcttctagatgctgaagagccgattgcttcaatcgtacctccaacagaagagccagctgaagacgaagaagaagctgatgaagtagcggaagagccaccagcagatcaagaagaaactggtgacgaaacaacgaaaacagaataaacaacaaggacgtaaccgaacgggttacgtctttttttcaagataaagagacttcaggtgaataagtgcacgaatttttgatacgatagaagaaaagcaatgaaaggtagggcgtcagccgttgaaattaatagtaggcctcggtaacccgggaaagaaatttactaatacaagacataatgtaggatttatggctattgaccaacttgcaaaagagatgggaatcgcgttagatcaaaagaagtttcagggtatatacggtaaaggagtggtaaatggagaacccgtttatctattaaaaccacaaacctttatgaatttgtcaggagaatccgtgcgtccattgatggaatactttaatattgaggtagcggacttgcttgtcatatatgatgatttggatcttcctactggtaaagtgcgaattcgtcagaagggtagcgcgggtggacataatggaatgaagtccattatcacacaccttcatacacaggaatttaagagggtgcgaatcggaattgatcggtcagcacgccaaactgtcattgactatgttttaaaacctttctcaaaagaagaagtagagccgattcaacttgctatcgagcaaacggcaaaagcgtgtgaagcatggacaacaacctcttttccagaagtgatgaatcagtataactcgtgaatatcctgtcattctcccgtccatactagtaaaagataggaacagggaggactttttatggatattcattacgtatgccgtcattgtggaacggagattggaagactgtcacaacaaaaccacacagctgacgaactagggtttcaacagctcactgagaaggagcgccaggcaatggttcactatcatcataatggaacaattgaagtgaaagccatttgcgaagattgccatgaagccatggagcgatctccatcttttcatgagcttgatacatttattcagtaagaagctttgggagtgcgtccaaagcatttttgcgttaaccaaaggaaccaatcgatttcaaaaccattagatttagaggttttttagattctgtgccaagtttgttaatgtacatcgtttcagcacaagcaatgctagtgtattaaaacgatttacgacgtgcttgcacttttccatagtgagaggggagaataacttaccgatgttaggtttaagagaatattttagtaagggcgatgaatttcagtccgtgtttacgggggtgaaagaggggcttaaagaacaacttgttgcagggctagctggttctgctcggatgcttctgatggcctctctctatcatgaaacaaagcgtcctcagctcattattacccacaatttgtatcaagctcagaagctctatgaagatatgtgtgagcttgtctctcaagatgaagtttacttgtatcctgtaaatgagctcatttcttcagaaattgccatagctagccctgaattaagaggacagcgaatggaagctttaaattattggatgaagaataaaaatgggatcgttattgcgccaatttccggcgtcagaaggtatcttccgccaaaaagcatctgggaaaaaagccagatttcatttgctgttggcgacgacattcctttagaagaaacgctcgcaacttttgtagctatgggatatgaacgtgtaccaatggtttcttcaccaggcgaatttagcgtcagaggcggtattatcgatatttatcctttgacggaaaatagccccatccgaattgaattattcgatacagaagtggattctattcgattttttgatatcgagtctcaacgatctgcaaataaaacagatcgcattacaattggacctgcagatgaggtcgtgttatttccagagaattatcaacgaggggcagagcgccttcagaaagaattgcaggcttcactaaaaaaagtgaaagatcagaaagtaaaagaagccatgcacgaaaacattacgtatgaaattgatcagctgaaaagtgagcaaaattttcagggtgtgatcaagtatatggattattattatgaccagcctgcaagtttactagattatttacctgaggatggtcttgttgtttttgatgaagtgagccgaattcaagaaatgtcttctgatctggataaagaagaagcggaatggcaaacagctctcctaaatcagggggaaattgtgtcatctgtttccttatcgagatcttacgatacgttattcgcaaagcctgttcactcaacaatctatttatcgatcttcttacgacacgttccatatacaaatccacaaaacattattaatgtttcaagtaaagcgatgcagaacttccatggtcaaatgaaagtactaactagtgaaattgagcggtggaaaaaaagcggtatcgccatcgtttttcttgcagcaacagaagagcgaaggaagcgccttgagcgagttctagaagattatgaaatcaatgcgatgatggtagaacaagatacgccgatttcccatcagcagccacaaattttaataggtagcctaaacggtgggtttgaacttccgatgcagaagctagctgttctaacggaagcggaagtattcacgaaacaatcgaaaaagccaagacgttctcaaaagatgtcgaacgctgaacgaattaaaagttattcagagttgaaggtgggcgattacattgttcacgtcaatcacggaatagggaaatatctcggtatacgcacactagaagttagcggcattcataaagattatctgtatgtgagttatgcgggtaatgataatttgtatgtgcctgtggaacaaattgatcaagtgatgaaatacgtaggttctgaaggaaaagaaccgaagctctacaaacttggtggaacggaatggaaaaaagtaaaacgtaaagttcaatcttctgttgaagacatagctgacgacttaattaaattgtatgccgaacgtgaggcgagtgttggccataagtttgagaaggatacagaagagcaaagggagttcgaagctgcctttccgtaccaggaaacggatgatcagctccgagccattcaagaaattaaagaagacatggaaaaaacgcgtccgatggatcggttgctatgtggtgatgtgggttatggcaaaaccgaagttagtattcgagctgcatttaaagcaattatggatggaaaacaggtggcttttctagtcccgacaacgattctcgctcaacagcattttgcgacgatacaggaacggtttgcggatcaccccattaacatcgggctattaagccgcttccgctcaaggaaggagcaaaacgagacgttaaagggtgttaagaacggtacggttgatattgtgatcggcacacaccgacttttatcgaaagacgttacgtatcatgatcttggcctccttattgtcgatgaagaacaacgttttggtgtgacacataaagaaaaaattaagaagttaaaagcgaacgtagatgtgttaacccttactgcaacaccaattccaagaacgcttcatatgtcgatgttaggtgttcgagatttatccgttatcgagacgccgccagaaaaccgcttccctgtacaaacgtatgtggtcgaatataatggcacacttgtacgagaagccattgaaagggaacttgcacgtggaggacaggtttatttcctttataaccgcgtagagtcgattgattacatgacagatcaaattcgaacgcttgtccccgaagcgagagttagcttcgctcatgggcaaatgagtgaaactgagcttgaatcagtgatgattgattttcttgatgggaattatgatgtgctcgttagtacaaccattattgaaacaggtgtagatattccaaacgtcaatacccttcttgtatatgatggcgataaaatggggctgtctcagctttatcagctccgtggtcgagtaggtcgatcgaatcgtgtcgcttatgcttacattacttatcaacgagataaagttctaacagaggtagcagagaaacgccttcaagcgattaaagaatttactgagttaggttccggatttaaaatcgctatgcgcgatctttctattcgaggtgctggtaaccttcttggagcagaacagcatggatttattgattcagtcggttttgatttgtattctcagatgttaaaagatgcgattgaagaacgaaaaggcgatgcaccaaaagagaaggcgttcagcgttgaaattgatcttgaggtagatgcttacattcctggtacgtatattaacgatgagaagcagaaaattgatatgtataaacgcttccggtcaattgactcattgaaagacatcatggatttacaagatgagatgatggatcgatttggagattttccagaagaggtcgaatatctcttccaagtttcacgtatgaaagagcttgccaaagaagtaaaggttgaaaaagttggccgaagtaagaaagacattcagctacttttccatgaatcagcgcgagaagcaattggaggagaaacgatctttgaggttgcgaatgaatttgggaataagctctccctgggggcagatggtaataaagtaaaggtagttgtgaagggaagaggccttgaaacaaagggacatcttcagcttgttgaaaaagttttaaagaaagtaaagggagcaaaaaagcagccaatgaatgcgaattaaagccgattttggaggaacctcataattttgacaggtttgtgaatagaactcatacgtccaaacgatactaatggaaacatattgtagaacatgcaatagaaaaagtgattggagcaatcacctacaacttccagaaagcgaggcaacttagatgaaagcaacaggtatcgtgcgtcgtattgatgatttggggcgtgttgttatcccgaaagaaattcgcagaacactcaggattagagaaggggacccactggagatttttgttgatcgagaaggggaagttattctcaaaaaatactctccaattagtgagcttggtgattttgcgaaagaatacgcagagtctctagcagagcattcggggcatattgcccttatctctgatcgcgacgtctacattacaactgcgggtggcccaaagaaagaatacttaaacaaaagcattggcgaatctgtagaaaaagcgatgaatgaacgaagatgtttgctaaatgaaagtaaatctgaactcattgaaggagttcctgttgaaacaggacatgtgattgctccaataatagcgaatggcgatccaattggaacggtcatcttacttgcaaaagaagatgaaaaggtaacggaattggaacaaaagttatctgaaacagcagcgggttttcttgcaagacaaatggaacaatagaacagcgattaaatggaggcgaacgcctccattttctttggtttaaaggataggaaagtctagccgatcggtggtgaacaaggcgcttgcactactcttatcaggcttcaaaactttcccatcttggctcatatgatataattcgtacataaacatgtattgaattttggcaggtgtgtatgaaaacagaagaaaatcaaaaaggattctggcacggagcgcttttgcttactgcagtcgctctttttatgaaggtgctaagcgttggctatcgaattccttatcaaaatattactggtgacattgggttttatgtctatcaacaaatttacccgttctactcgatcgctatcattctcgctacatatgggtttccagttgtcatttcgcgtcttatctctgaacagcttgtaaaaaataacattgatcaagcgaaagagctttctcgttatagtttctatatccttgctatgcttggttttggtggatttcttctcctgtatgcttctgctcctttgttagctacgttaatggaggatcaccgtttaattggaccgctgcgcaccacagccttttcttttcttattatgcctggtattgcgtcgattagaggttattttcaagggcaagaaaatgtggttcctaccgcgtggtcacaagtaaccgaacaatctgttcgtgtcgtagctatccttacaatatcgataagtcttgttgcaggcggagctgatgcatatgcagcgggcacaggggctgcactgggttcattagtaggtggcctagcagccttcattctgctcctttttcttcgctatcgacatcagtcgctccgtataaaatctttgaaagcacgctcatttcgtttttttggcgtcgctcgcaggatcttaacggaagggacattagtatgtgtcagcgcacttgtgatggtactcttccagctaatggacgcagtaacaattgtaccggggttaatggaacatggacttccttcaataggggctagggaaacaaaagggatatttgatcgcggtcagccccttatgcaggtgggtacagtgcttgctacctcactctcgttatcaatcgtaccggtgatctcgaaagcatcggcggaaaaacaaaaggagttcattcgtgataaggctgctctttctctaaaagttagttttgttattggacttgcagcttccgcagggctagcgatcatcatgaaggaaacgaatatgatgctttttagtgatcaatctctttctcctacgctcagccttctcgcatttgcgattttcttcagttcccttgcgatgactgcagcaggtgttttgcaaggtgtgggcttagcaaggaaagcggctcgttatgctgtaattgggatatttgtgaaggcctttttaaatcttatattgattcctttaataggcattaatggggctgcatttgcgacagtcattggctttgcggtggttgccggactaactgtttttgctgtgcattctaaagttaaattgattgaatatccgttctatttaagacgagctgtagcggctgtgatggtcatgagtacagctgtaataatactgcagttctttattccatcgtttctctctagaggactatccagtatctcagcacttgcaggggccatagttggaggcctcgtgttcgggttcgcaacactcatactgcaagtatttacagagaaagagttactgcaattacctaaaggagagaaaatctctttgtatcaaaccaaattaaagaaaggagcctgaacgatggcgagtattacaattattggaacgggagcgggggaccttactcagctctctctcggcagctatcggaagttgaagtcagctgatcgaatctttgcaagaacgcttgatcatcctgtccttaaagagttaatgagtgaagggcttgtcgtgacgggttttgacgacatttatgaaagtaatgattcttttgaggaaacgtaccgcaccattgttgatcgtctatttgaagaggcacaacagggctctctcatttatgccgttcctggacatccaatgatggctgaggcgactgtacagctcctcttagaggagcaagctcagcagggtgttgaagtgattgttgctggaggacaaagtttccttgatgatctatttactgcggttcgaatcgatccaattgaaggctgtcagattctcgatgcgacgcgttttacaaaatccgaagttcaagtacgcaatcaattaatatttgtacaggtttatgatcagttcactgcttcaaatgttaaattaaccttaatggagcttttgcctgatgattacgaggtaactgttctacaagcagcggggagtcaggatgagaaaataatgacagtacccttgttcgagttagaccggtcaatggaagtcaataatttgacggcagtttacgttcctcctgtaaaggatacaacgcttttatatcaggattttgaatgggtacgccatgtggtagcaagtctacgcggtcctggaggctgtccttgggatcagaagcaaacgcacgaatcattaaaaaaatacttaattgaagaagcttatgaagtgttagaagcaatagacgaccaagacgatgagcatcttgctgatgaattaggagatgtattgcttcaggttctcttacatgctcaaattggtgaggatgaggggatgtttacaatcgaggacgttatcggaaagttaagcgataaattaattcgaagacatccacacgtatttggagacgaacaggttcaaactgctgaggaagtagtggggctttggaatcaagtgaaagaacaggaaaaggatgctgccccatcacagtttgatacgattcagaaaggtcttcctggtctcatgcgagcaaacgaactacaaaaagcagctgcaaaagtgggcttcgactgggatgaagtcgatccaattttcgagaaggttcaagaggaactaactgaatttaaagaagctgtgaataataagtcgtttcatgatcaggaagacgagcttggagacttattatttgcgctcgtgaatgtagctcgctactataaaattgatccagaagtagccattcaccgcaccaatcataaatttgtttctcgttttcaatatattgagaggcgagtaaaggaaaaaggacttgaaatagagaagttatctcttgaagaactagattatttctggaatgaagcaaagcaaaaaggaattaaatagggagcgttggaacaaatgagattagataaatttctaaaagtatcacgattaattaagcgccgatccattgcaaaagaaatttgtgataaaggtcgtattgaagtaaatggtaacaaagcgaaagcaggcacgaatgttaaagcgggtgatgagctagtgatttcatttggccataaaaaagtgacggctcgagtggatgagataaaagaaacgacaaagaaagaagaagcaaataacatgtttaccatactaaaagaagaagcagctggtgaataaaaaggacctgatcaggtcctttttttgctaggaagagaagaaaggcttatgctgatctgttatccctatccatagcttgttctaaaagatacctctttttcatagacatgtatcgagaagagggggagagcgatggataattattatgagtacggcacatatgataaagcgtcaaacacacctgaacacgatttagttatgaagtcacgtaagtcgcttgaaattacaggagtgaagcacgtcgatagctttgataatgaggaattccttttagagaccaccatgggctttctcgcaatacgcgggcagcacttgaaaatgaaaaatttaaatgtggagcaaggacgtgtctcgattgaagggaaaatctttgatctgagctacctcgaccatcacgaaggggaaaaagctaaaggattctttagcaagttattcaaatgacattatcggtgcaattctatacgatggttgcgatggtggctatgggagtgtggcttggaatagccatggatacctatagccgttttcttcatccaaataggaaaaaaaattggttgctctatgccaatgatgttgtcttttggctcctacagggactacttattttttatgttctgtattttgttaatgaaggagcgatccgattttatgtctttttagccatattatgtggctattcagcctatcgcgctctttttcaaccgttatatcgtcgtttgttagaacgaattattatagtggttttagcaaccagtcgttttattagatcactgtttcttcatttgatttataagcctttaaggttcatattgaaagttctatttagcttatgtatgatgatagtgagtatgatggcaaccattttttggtttatctttaatgttttttgggtaccgttaaagtgggcaatctcattgatatggcgattattacctcaacaggtgcagacatcactaacaaaaatagcaggagttgccgataaaataaagaactacatataccaatggttaactaaaatacgaaagtgaggagggaaaagcttggttactgcgaataagcacaagcctaaagtaacggaagttcattcggaatatcatcaagaaaaacagctacaggataaagtgaaggaacgtagaaaaagaggtcttgttcgacgtcttactgctttcgcggtagctgctttagccatagctattctatttatctccgtattcacttcacaggcagcaacgatcgaagaaaaaaacttacagcaaaagcaggctgaagaagaattaacgaaattaaaagagcaagaaaaatatttaactgaagaaattgagaaacttaatgaccttgattatatcggtgaattggcaagaagagactactttatgtcaaaacccggtgagacaatctttaagcttccttcttcctcaaattgacacgttgttttttgaaggggtataattagcgtacgactgatcttttaaagattttaaggaggagctttttttacatggcaatcgaagtaggcagcaagttacagggaaaggtaacaggtattacaaattttggtgcgtttgttgaactaccagacggcaaaacaggtctcgttcacatcagtgaagttgcagacaattacgttaaggatattaatgattttcttacagttggcgatcaggttgaggttaaagtcatccaggttgaaaacgacggtaaaattggtttatcgatcaagaaagcaaaagatcgacctgcatctgagcgtccgcagggtcgtccacaaggtcgcccacagggtggaggccgccctcaaggtggcggtggcagacccggtggcggtggttacaaaggaaagcctcgcggaggtggccgtccacaggtagagtcatttgaggataaaatgagcaagttccttaaagacagtgaagaccgcctttcaactttgaagaaacaaacagagtcaaaacgaggcggtcgcggcgctcgtcgcggctagagcttgttgtctactaaccatatttataaacaaaaccggcatgcgcttgcatgccggttttgtttatggtggtattattcagaacttgttgatgatctggaaggtcctaccctgttttgaatgtttgtatgcaaaaaatataaaaaacaagttgacacaaacttttctgcaatgtattatataacttgtgcttaataaagcaacagtcttatggcggtgtagctcagctggctagagcgtacggttcatacccgtgaggtcgggggttcgatcccctccgccgctaccatttttataagttggcccgttggtcaagtggttaagacaccgccctttcacggcggtatcacgggttcgaatcccgtacgggtcaccaacttattcaagaagatcatacggtcttctcacccaagggttcccctgcagaagtgattcaagatgatggacagcaggactagctacgcgtcggaatcccgtacgggtcaccaacttattttaataactatacatataaatgcttgcaatatacaaagtttgctaaaaaggtccgacattatctaaatgtcggacctttttttagtttgttctgagcgagattccaaattgatggttcacttatatggtggaaaagaagaaaggaacctcgtttttcccttccgatcatatttcttttctagtttatttttaacatttcgacctttttatttttaacgactgttcgatttgaaaaagggggacgaggctagatctttcttaagtaaattccctgaacatgataaaaaacccactcaccttgcttacagatttcttcctctctctacacgtgattgacaagcttccctgaaagaagtcgagaagtttttaacatatctctcctgttttttgacaaaaagcgaaaattgattatggtttaataatttacacaaactgcttcaagcagatcggtgaaaaatagaatcaatgaaagcaggtgggggaatgcaaagcgaattggtcatggagaggtcgaaatcaagggtgggaaaatggattcatgggacaaaaagtcggctagaaacgattttttttcaacgtggactacttctgtttgtaataggatttttacttggacgagcggtcattcttacacaagtcacccctttcgccattcctttttttggagctgtattttttctaagacgtgaacgtgcacctatgataatcgccgccttgctagccggagccatttctacttctaatctacagaacactgcatttattatgtgtggcattcttgtttttcttatcattaatcgttttgtgaaattatcttctctttctctcgttaagaccctaccgattctagtgtttgctacaagtatgataggaagactaattttaagtttactgacagagcgatcactagccaatacaaattggatattagcagcggtagagggtgcgcttggaatgatattaaccattatatttattcaaagcataccgattctttcaatcaagaaaagaacgcaggcgcttaagaacgaggagatcattagcttcattattttgcttgcaaccatgttaactggaacgatcggttgggttgtatatggattttcgattgaaaacattttatctcgttacctagtattaatttttgcttatgttggaggagcggcaattggttcaacggttggggtagtaaccggattaattctggcacttgctaatgttgctagcctctatcaaatgagtatgctcgcattttcgggattacttggaggtttactaaaggatgggaggaaggttggggtcgggatggggcttcttatagggacattgttgattgccttatacgggagcggtcctgaatttttgtatcctaacctaatggagtcggtgattgccgtattgctctttttctttaccccatctaaagttacctctcaactttctaaatacattccagggacggttgaacatgccaatgaacagcagcaataccttcggaaagtacgcgacgttacagcaaatcgcgtcgagcaattttcgaatttatttcaagcgctctcaagtagctttacggattctgatgtacaagctgatgatcagtctgagcgggaagttgattattttctaagtcatgtgacagaaaaaacgtgccaaaattgttttaagaaagaaacgtgctgggcaaaaaactttgatgccacttatggttacatgacgggaattatggaagaacttgaacaaacgactgaattaacgaactatagcttaaaaagagattttgataagcactgcattaaggcgaataaagttattgatattattggaaaggagatgagtcactatcacgcaaatcgcttgttaaaaaagcaggttcgtgagagcagaaaaatcgtggcagatcaattgcgcggcgtttcacatgtgatgggagattttgcgagggagattcaaaaagaacgtgataacctccatcaacaggaagagcaaatcatggatgcgattcaaagtatgggtttagaagtaggacaagtagaaatttattgtcttgatgaaggaaacgtcgacattgagatgaagattccagcatgtggcggaaggggagaaggagagaaagtaatcgcgccgatgctttcagacattttaaaagaaaacatcattgtcaaaagggaagtctgtgctgagcacgagcacgatacttgtcacctttactttggatcagcaaaagattttgtgattgaaacgggtgtagcgaatgcagcgaaaggaggagcgtggctttctggagatagccattcaacaattgaattaggtgctggaaaatatgcgattgcgattagcgatggaatgggcaatggagagagagcgcaccaagaaagcacagaaacgattcaacttctccaaaaaattcttcattcaggaattgatgaaacagttgccattaaatcggttaactccgtactttctttacggaataccgatgaaatgttttctacactcgatttagcgatgattgatttacaagatgcttcggcaaagttccttaagatcggctccattccaagttttattaagcgaggcgatcgcgtaatgatggtggaatcaggtaatctaccaatgggtattattcctgaatttgatgtagaggtcgtaagtgagcaattaaaagctggcgatttactaataatgatgagtgacggcatttatgaaggtgtgaaaaatattgagaatccagaattttggatgaagcgcaaaattcgagagctggacacagataaaccgcaagaaatcgcggacctcattatggaagaggtgatccgaacggaatatggcagaattgatgacgatatgacgattgttgtggcgagaataaaacgaaacgtacctaaatggtcgacgatcccaatttattcagccccatcctttcgaaagaaaaaggcgcagtagggtgtataaactctcctcctaaaggcgatgcttgtaacagcaaaaaaggaggagtccagatgaaaaaaggaacactacggcagattcttttaataacagatggatgttcgaatcagggggaagatccggtggccatggctgctcttgcaagagagcacgggatgacggttaacgtaataggtgtacttgatgaaaatgagcggaccgatggattaaaggaaatagaaaatatcgctttatctggcgggggcatccaccagttagtttatgcgaaacagctatcgcatacggtgcaaatggtaacgcgtaaagcaatgacccagacgattcaagggtttattcataaggaattgcaatcgatcttgggtcaggataaagaaatagaagacttaccacctgacaaacgggggcaggtagtcgaagtggttgacgaactgggggaaaccatggatttggaagtgttaattatgattgatacaagtgcgagtatgcaacataaacttccaacggtagaagatgccctgctcgatctttcgattagtctacattcaagaattggtgcgaatgagtatgccctttatgcatttcccgggaaacgaaagcaggtagaacggctgatggattggacaccgatactgaaggatattcacaccattttcccaaaactaacaacgggtggtattacgccaacaggacctgctttaaaagaagccattgatgcttatcagaaaaaacgttcaaagagagggctgctagatgacgggtacatcgaagaatcaagtagctgatgttccccgtggaacaagaattagcggaaaatggaacaagcaaacctatcaaattatgaaaaaattagggagcggggctctcggtactgtctatttggcagactctataaaagggcgagtagctttaaaaataggaattgacagtatgtccattacgtcagaagtaaatgttctaaagcagctttcgatggtccagggaacagttcttgggccgtttttctatgagatcgatgattgggaacgaaacgggaagtgctatcctttctacgtcatggaatacattgatggagaaccactctttgcttttgtcaatcgaagaggaaaagagtggattggcattttaatgcttcaactgcttcgtgatctctcagcgcttcatagagaagggtgggtttttggcgatttaaagccggacaaccttttggttgaaggatctcctccaaaattgaggtggctcgatgtgggagggacgacgtcgatgggaaggtctgttaaggagtttacggagtttttcgatcggggctattggggactgggtaatcgagtagccgagccttcctatgatttattttcagtagcaatgatcgttctaaacgctggctatccaaagcggtttgaccgccccaagaaagggatagaagactatttgatgagtaagattgagaataatcaccttcttagagaatataaaccgattcttagcaaggctttactcggaaagtatcaacacgcttcagaaatgaggcaagaactctttgttcttttacaaggaggagagaaaacgaaagtacgtaaaaataaaattagctctgccaattctcgagtcgcgtcacgtcgtaatcgtcctccagcgaagaaaaaacggtcagggtggattgaaaccgttcttctcgtagctttccttctattcttctatactttatacttagttggtcacattttttaaaaaagatatgtttgaaaacgtggtcgttaggttaatagtactaaaatgaataactgtttaattcaagcaggaagtgagaggaagacagaggttgttgcaagatgtcgaccattttattcataagcatcatctgatcaatcgtggagatacaattgtcgttggggtttctggaggaccagactcaattgcgttgcttcactatttgggcaatgtcgcgttgtctttccaattaaaattggttgctgcacatgtcgatcatggcctacggggcaaggagtctgccgaggatttattgttcgttaagcactactgccatcaggaaggcatcacctttgaagcttctacagttgatgtaaaccactataaagagcaacatcaggtctcgacacaggttgcagctagggaatgtcgctatcacttttttaaggaaaagatggaaaaacacgaggcaaatatccttgcacttgctcaccatggagacgaccaaatcgaaacaatgttaatgagacaagttcatggtagcatcagttcaggacttgcgggtattcctgcaaggcgtcctttctcaataggataccttattcgcccttttctttgtgtgtcgaaggaacagattttgagttattgtagcgatcatatgttggactatagaagtgacccatctaataacaaagatgattatatgaggaatcgctttcgccatcatgtccttccttttcttaaagaagagaatccaaatgttcacaaacggtaccaactatatagcgaacgaatgcaagatgatgaacggcttttagtggagttagcaaagcaacatctagaaaaagtgatcatcgatcaaaatgacaaatttgtgaagatggacaacaaggcgtatcattgcctccctattcctttacaaagaagagtgattcatctaatattaaactatctttatagaggcaatgctcctttttcttctatacatattgaggatttgcggttaatgctcgattctgagcacccttctgcttcccttaatttacctctaaaattgagggcggtaaaatcttataccacctgttatttttcttttgaaacctttttgcaaccagaaccgtatacgtatcatctccctttatggggttctgtggaaacgccgaccggaacgattacggccgttctagttaaagacgtaccacaatcactctcgggaaatgatcttattgttgagggacacctgcttcctgcagttgtgcgctcgagacgtcctggtgatcgaattcagccaaaaggcatgatagggacgaaaaaggtaaaagatatttttatcgaccgtaaaatagaccgttcagaacgtgatgtttggccaattgttgaggatgtaacgggtcaaattatctgggtcgctggagtaacccgttctgaaaaggcaacactgtcagcaagaaagagtcagcttgtgcatttgcactatgagaaaaaaacacttacataggttgggagggcaatactactgatgttaaacgaaattcaagaaacattaattagtgaagaacagattcaagagaaatgccgcgagttagggaaacggctttcggatgaatatgaggatcgttttccacttgtgattggcgtccttaaaggtgcaatgcctttcatgggtgatttaacaaagcgcatgacttgtcatctagaaatggactttatggacgtttcaagttatgggaactcaactgtttcttctggagaagtaaagatcatcaaagatcttgatacttcagtagaaggacgtgacgttcttattctcgaagatattattgatagtgggttaacgctaagttatctgattgatcttctaaagtaccgcaaagcaaagtcaattaagattgtaacgcttctggacaaaccaacggggagaaaagttgatcttaagcctgatgtagcaggatttattgttcctgatgagtttgttgttgggtacggtcttgacttcgctgagaggtatcgtaatcttccgtttatcgggattcttaaacccgagatttatcaaggttaatttgttgtagtcagttgtgccagtatggtaagataatctatggtttcctgttcgtgggaggaggtaaggaatgaatcgtatcttccgaaatacaatattttatttgttaattttcctcgtcgtagtaggtgttgtcagtttctttaacggaacaaacaatgaggcaaatgtcctcgattacggcgaatttcagtccaaattgaataatggtgaaattcaagagttaacgttacaacctgagcgcggggtttacacggttactggtcaattagctggtggcggtgaagatagcgaagatgctaatacattcgttacgaatgtacctgactcagaaagagctgtggagaatatcttaactgcagctgatgaaggaaatgtagaattaacgacagaaccagctcctgaacaaagcggttgggttacatttctaacaagtatcattcctttcgtaattatcttcattctgttcttcttccttcttaaccaggctcaaggcggcggtggccgtgttatgaattttggtaagagtaaagcgaagttatacagcgaagagaaaaagaaagttacttttaaagacgtagctggtgctgatgaagagaagcaagagcttgtcgaggtcgttgagttcttgaaggatcctcgtaagtttgctgcagttggtgcccgtattccaaagggtgttctactcgtaggacctccaggtacaggtaaaacgttgcttgcacgagcagttgctggtgaagcgggcgttccgttcttctcaatttctggttctgatttcgtagaaatgttcgttggtgtcggtgcatctcgtgtacgtgacctattcgaaaatgcgaagaagaacgcaccttgtattatctttattgatgagattgatgcagttggtcgtcaacgtggtgccggtcttggtggcggtcacgatgagcgtgaacagacgcttaaccaacttctcgttgaaatggatggctttagtgcaaatgaaggaattatcatcgttgcagctacaaaccgtcctgatattcttgatccggcacttcttcgtccaggacgttttgaccgtcaaattccggttaaccgtcccgatgtaaatggtcgtgaagctgtacttaaagtacatgcacgtaacaaaccgttaagcgatgaagttgatttaaaaacgatcgcaatgcgtacaccaggattctctggtgcagaccttgagaacttattgaacgaagctgctcttgtagctgctcgtcataacaagaaaaaggttgatatgaacgatattgatgaagcgacagaccgcgttattgctggtcctgctaagaaaagccgtgtgatctctgaaaaagagaaaaacattgttgcttatcacgaagcaggtcacacgattattggtactcagcttgataatgccgatattgttcataaggttactattgttccccgtggacaggctggtggttacgcggtaacacttcctaaggaagatcgttacttaatgacgaagccagaattgattgataaaattattggtttactcggtggtcgtgtagcagaagaaattaccttcggtgaagcaagtactggagcaagcaatgacttccaacgtgccacagctattgcccgtagcatggttacggaatatggtatgagtgaaaagctaggtccgatgcagtttggatcaggttcaggaggaaacgtcttccttggacgcgatatccaaaatgaacagaactatagtgattcattcgccaatgaaattgatcttgaagttcaaagcattattaaatcagcatacactcgctgtcgtgagattcttcttgaaaatcaggataagttaaatcttgttgctgaaacgctaaaagatatcgaaacacttgatgccgaacagatccgctctcttgttgaagatggaaaacttcctgaaggtcaccatgctactggtagctctgaagatgtgaaagtaaacatctctaagaaggaagaaaatcctgaaacaaatgaagagcaagaataaggttatgttaaagcaggatgtcgacaatgacatcctgctttttctatccctttataaaatcagtaaccgttttcaaaaaagaccttcgtttttaaatccaatgtgtggtataactatagagagtgttaccgaagttaaatctttaaataaggtgataatatgatacttgtgcttgatgtaggaaatacgaatattgttctcggtgtgtatgaaggtgaagagttaacccaccactggcgaatggggacaagcagaaagcagacagaagatgaatacgcaatggtcatcaaaggccttttttctcatgaagaactttcgtttgatgatgtagaaggcattatcatctcatctgttgtgcctccaatcatgttcgctcttgagcgtatgtgccagaagtattttcaccacaaacccttagtcatcggtcctggaattaagacgggactcaatataaagtatgataacccaaaagaagtaggagccgatcggatcgtcaatgctgtagcagccattcatctatatggtgcgcctcttattattgttgactttggaaccgccacaacgtactgctatattgatgaacaaaaacagtatgttggtggagcgattgcgccaggcattaacatttcaaccgaagcgctttacatgcacgcagcgaagcttccgcgtatagaaatcgcgaagccaaaccatattgttgggaaaaacacggtgagcgcgatgcagagtgggacgctttatggttatgttggtcaagtagaaggaatcgtttctcgtatgaaaaagcattctactaaagaaccaactgttattgctaccggaggactcgcttctctaattgcggaggaatgtgaccttatagatgtggtcgatccattcttaacgctgaaaggtttgcattttatttataataagaacaaagaagagttaaacgcataccgataaaaagggatgcgtttttcatttgacgtttttggggaaattatgaataataggcatttcaataaacagttgtcttgatccctcacaactttctcgagaaatgtagtagcatcagaaagtttaaagtgattaagggaaaagtaatgaaatctttacttttaatgcaatgatcttcctacattctagactcagttgctcataatggaagttcttgaaaaaataatgtatcgtgtaagtgggcatttgcccactagtgaaaggagctacaaagtaatgaatgattatttaattaaagcacttgcattcgatggcaatgtaagagcttatgcgatatctagtacagaaatggttgcggaggcacagcgacgtcatacgacttggccaactgcatctgctgcgcttgggcgcgccatgacagcttcaacaatgatggctactggactaaaaggggaagaaaaaatcacggtaaaaattgaaggtggcggcccgatcggcgctattattgtggacgcgaatgccaaaggtgaaacacgcgggtatgtcagcaacccacacgttcactttgatttaaatgatcaaggtaagcttgatgtggctcaagcagtaggacgcgacggctttctatcagtggtgaaagatattggtatgcgcgagaaattcacaggacaagttccgattgtatctggcgaattaggagaagattttacgtattatcttgttacttcagagcaagtaccttcagcagttggcgttggtgtccttgtaaatccggataacacgatccttgcagctggaggttttatgattcaattacttcctggtgctggtgaggaaaccatccgttttatcgagaaacgaattgaagcgattccgccaatttcaaaattaatcgaatctggaaaaacgccagaagagattttgtacgctcttcttggagaagaaaatattaaaatcatcgacaacatgccggtgcaatttgagtgtagctgttcgaaagagcgtttctcaaatgggattatgggacttggaaaagaagaaattaataatatgattgaggaagatggagaagcagaaactgcttgtcatttctgtaatgcccactaccacttttcaaaagaagaacttcaagagttatacgctgaaagcaaaatataaaaggttcaaattgacagataagtttagtggtgatattctttaagttagataatccctataaaaatactcgggtttgaggaggcgcgacgatgagaatagcaaattcaattacagatctaatcggtcaaacacctattgtgaaacttaaccgcatcgctgatgagggccatgcagaggtatacttaaagcttgaatttatgaatcctggaagcagcgtgaaagatcgtattgccctagcaatgattgaagcagctgaagaaaagggcgaattaaagcccggagatacttttgtggagcctacaagtggtaatacgggaattggtcttgcaatggttgcagcagcaaaaggctaccaggctgttctcgttatgcctgatacgatgagtatggagcgacgtaacctattgaaagcatacggagcaaagcttgttcttactcctggatctgaaggtatgggcggagctattcgcaaatccgaggaattagcaaaagagcacggttatttcatgccccaacaatttaaaaatgaagcaaatcctgaagtgcatcgccgtacaacgggtcaagagattgttgaacagatggaccagcttgatggatttgttgcgggtattggtactggtggaacgattacaggtgcaggtgaagtattgaagaagcactttccgtcagttaagctttacgctgtagagccaaccgactcgcctattttatctggtggtaaaccaggccctcataagattcaaggtattggtgctgggtttgtaccggcggttctgaatacggatgtctatgatgaagtcattcaagttcaaaacgatcaagcttttgaatgggctagaaaggcagcaagagaagaaggtattctaggcggtatttcttcaggtgctgcaatctatgcagcgcttgaagtagctaagaagcttggtaaaggtaaaaaagttcttgctgtcattccaagcaatggggaacgttacctaagtacaccactgtttcaattcgatgatgaataagaaagcgcgaaaagcagtccttctaagggctgcttttctattttaagaaatagaaaaggtaagtatttctaattgagtatttgaaagtgtttggggaggataaaaaggatgaagcgtaggggaacttcatgtagaatagaggcataaactgagcggcagcgtatgcttaagcttttgatagggtgtgaacagtttgccagaacaactagagaaaatcacgcgtcattcgatttatgaaaccatcgagttaagcgcggatgagtggttttcacgatataaatcattcgccgaagaatgcgaagagcatattttattggatagtacacgtggtggtcgatatagtatgtttggaatcaagccaattgcttcgcttattggatacggtacttctctaacaatcatagaggaaggaaaagatcctaaatacttagacggcaatttattagagttaatgcaagaatggatgcagcgtcatgtggcattcaatgacgagtttttaccggactttcaaggtggtgccatggggtatcttagttatgatattgttcgccaaattgaaaaattaccacagctagctaccgatgatctcgaactcccggagcttttcttcatcgtttatgaagatgttggcgtgtatgatcatttatcagaaacgctgtggttcatttcacaggctgcaaaaggtgaggaacgtgaagctgaacagcgtctggaaatgtataaacgaaagtggacgaaagagggcgtaactaaaccgttaaaatcttcttctttttcaaaagaagcgagacagttattttcaatggatcagcacgccttttcgtcagctgttcaaaagatacaagcatatatatcggctggagatgtttttcaagtaaatctttcacttagagaatccaggacacttcattctgaccccgtttcgatatatgaaacgcttagaaccattaatccttcaccgtacatgtcgtttattcacaccgatacattcgatcttgtcagtgcatccccggagcttctgatcaagaaaaagggcgtagaattgagtaccaggccaatcgcgggtacgcgttcacgagggaaaaacgatgaagaggatcaacagcttgctcgtacgctcatcgaaaatgaaaaagaacgtgctgaacatgtgatgcttgttgatcttgaacgtaatgatcttggacgtgtatgtgaatacggcacggttgaagtagatgagtttatggtgattgagaaatattcacacgtgcagcatatcgtttcaaacgtgcgtggtatttcttcaaaagaagcaaccgcttttgatgccattaaagccacatttccaggtggtacgattaccggtgctccaaagatcagaacgatggaaattattgaagaacttgagcctgtgcgccgtggggtttacactggatctattggatggatagggtttaatgatgatatggagttgaatattgcgatccgcacaatggttattaaagataacgttgctcatgtgcaggctggcgcaggtattgtgattgactccaatccagaagctgagtataaagaatcattaaagaaagcaagagcgttatggaaggcaaaagagttaagtgaagaaaaagagactagcagagattagcttagaggaggagtaaaaatgattttaatgattgataattacgattcatttacgtataacctggtacagtaccttggtgaaatgggtgaagagcttgtcgtgaaacggaatgatgaaatcaccatttccgaaatcgaggagcttaatccatccttcattatggtatcgcccggaccgtgcagcccaaatgaagcgggaattagcatgacagttattaagcattttgcaggaaatatacctatattcggtgtatgtcttggtcatcaatcaattgcacaagtatttggtggtgatgttatcaaagcagatcgactgatgcatggaaaaacgtcgcaaatgcatcatgatggaagatcaatcttcaaagatcttgagaatccgtttactgcaacgaggtatcattcgctaattgtaaaaaaagaaacacttccagaatgctttgagattagcgcgtggacagccgagggtgaaattatggcgatccgtcataaagaacttgcgatcgaaggcgtgcaattccatcctgaatccattatgaccggaaccggtaaaaaactattgaaaaactttattgaaactcatcgaaaagaaccatgtttctaacgattaatgaaaagctaattgacgaaaaagaagcggttatctcggtttttgatcacggttatttatatggcgtgggcgtatttgagacattccgtacttatgaaggtcacccttttttatttggtgatcactacaagcgcctgcgtgattcacttgaaaatcttcagatctcgctcccttattcttgtgacgaactccttttacaggtaaagcaaacgatagaagccaatgaaatgaaggacgcgtatgttagactaaacgtttctgcgggagctggagaaatcggacttaatacagatgagtacgtaactccgacggttattgtttatgtgaaagcaattggccatcctgttcggaatgcaaagagaggtgtcattctttctcttagacggaattccccggagggtgagtacaggttaaagtcacatcattatttaaataatatccttgcgaaaagagaagtcggaagcgatccttcagtcgaaggcatttttctaacacaagatgaaaggctagcggaaggcattgtttcgaatctattttggtttaaaaacggcgttcttttcacgccggacctttcgacggggattttaaatggaattacaagacagtttgttgtgcatgttgcgaaaaaaatggggatcagtgttagagaaggtggctttcagaaagaagcccttgttgaagcagatgaagtgtttgtaacaaactctattcaagaaatcgttccgttgtttcaaatcgaacaaaagccattgcccggacttgatggtcctgcgacgaacgagctcatccttcaatatgaacaccatcgcacgtcattaatgagtcgagaggaatactaactaagaacatacgtacgaagaggagtgagctgcgtgacaacggtaattgataagcataaagcacatccaatgatgatgaagtggcgggacaaactaattaactggaatgaaaaaacatgggttatgggtatcctgaatacaactccggattcattttcagatggtggagaatatagtacgacggcacaggcagttgcccatgctgtccaactagttgaagacggcgcggatctaattgatattggtggagaatccactcgtcctggggcaactcctgtctcattggaagaagagcttcgccgcgttattcctgttataaaagcagttcgtcacgcggttaacgtacctatttcaattgatacgtataaagcagaagttgctaaccaagcagttctcgctggtgcagatatcattaatgatgtgtggggagccaaggcagacccggaaatggctactgtggctgcagaacacgaagtccctattatcttaatgcacaatcgtaatgacatgaattatagtgatatcatgattgatataaaggcagatatagaagaaagcatagcgattgctcgtttagcaggcgtgaaagacgaggatataattcttgatcctggcgttggttttgcaaaaacacatgagcagaatctcgaagtaatgagaaggctggatgaattcgttgcattgggatatcctgtgttgcttggtacatcaagaaaatccatcgtagcaaagactttaaatacgccaccagatgatcgggtggaaggaactggggcaactgtttgtcttggcattgagcggggctcacaaattatcagagttcatgacgtgaagcagatagcacgaatggctcgtatgatggatgcgatgcttaaacctcatctcaatggataaggagagtgaatgggatggataaaatctatctaaacggaatgaagttctacggttaccacggagtattccctgaagaaaataagctcggacaacgtttttatgtcgatctaacactcgaagcagatctttcgaatgcgagtcaatcggatgatctaaactatacagtgaattatgcagatgcgtataatgttataaaaggtattgtagaaggtacgcctagaaaattagttgaaacagtagctgaggaaatagcggataagatgtttctgcaatttgaaattgttcgtgcgtgtacggttaaagtgattaaacccgatccaccaatagatggccattatgactctgttgcgatcgagatgaagagggaacgaaatgaatagtgtatatattggaattggttccaacatcggggatagagagagctatatccaaacctctttattaaggttgcaagaatatccaggagtacagattacttcgacatcttctttatatgaaactgctcctataggtgtgaaggagcaaggtacatttcttaatatggtagctttgctagaaacggaaatgaacgctttccaactacttgaaattctccagggcattgagcagtctcttgggagagagcgtgatataagatggggaccacggacaatagaccttgacattctgctctataatcatgaaaatattgtagcagagggtctggtggttccgcaccctagacttcttcaaagagggtttgttatcatacctcttcatgaactgaatcctgatattattattccaactactaataagaggattgattcttattttaatcatatagaagataaagaaggtgtacgtctatggaagcggaaatctacggaagacgtattcgcgcttttcgaaagttaaaaggttatactcaggaacagctagcaaaagaattaggtgtatcggtttctgtactaggggagatcgaacggggaaatcgaaagcctacaaacgactttatgcaattagtagcacaaaagcttagagtttcaatagatgaactttttccattaaaacacaactgagaattgaggtgatagtatgttgaaaataggagatgtttcgttaaagaaccccgttgtacttgctcccatggctggcgtttgtaatccagcttttcgtttaatcgctcgagagtttggtgcgggattagtctgtgccgaaatggttagcgataaagctgttttgcacaagaatgagaaaacgatggatatgctttttgtagatgatcgtgagaagccgatgagtcttcaaatctttggtggcgaaaaagatacgcttgtcggtgctgcgcgctatgttgaccaagccacaaacgcagatattattgatattaatatgggatgccctgttccaaaaataacgaaatgtgatgcgggtgccaagtggcttctagatcctaataaaatctatgaaatggtttcagctgttacgaaggaagtagaaaaacctgttacggttaaaatgcgtagtggatgggacgaagatcacatttatgcgattgagaatgcaaaagcgattgaagctgcaggtggcaaagctgtttcacttcatggccgtacacgtgtccagatgtatgaaggggaagcggattgggatattattcgacaagtgaaagagtcagtttctattcctgtaatcgggaatggagatgtgaagacgccccaggatgcaaaaagaatgattgagacaacgggagtagacggagtgatgattggaagaggcgcactcggaaatccgtggatgctttatcgtacggttcagtatcttgaaacaggaaagattctagaggatccaacacctcgcgagaaaattgatgtcgctatgctccatcttgatcgtcttatcgcactaaaaggtgaaaatgtcgcagtacgtgagatgcgtaagcacgcagcatggtatttaaaaggaattcgcggtaatgggacaataaggaataaagttaatgaaacaaatacgagaaacggtgtagctgaactactgtacggatttattgaagaattggaagcgaaacaggcggtttgactttctaactagcatttcctatactacatctaggaactaacggactgccagtaatggatactggcagttttcttcatatatgtcatgatacacccggcgcatttgtcaccgattttatatatgggaaggcttgctattcatagtgctttccgataaagttatagcgggataaacatagatttgacaggagtgatagagatgagtcaggagcttgaattgaatgaccttctaaaagtaagaagagaaaagcttgatgtgctaaaagagaacaacattgatccgttcggacatcgatttgatcgttctcacactgctagcaaaatgctagaagaatttgattctttcacaaaagaagaactagctgaacaaaacaaacttgtttcgttagctggtagaattatgaccaaacgtggaaaaggaaaagccggattcacacatatacaagatttaactggtcaaatccagctctatattcgaaaagatacggttggagatgagcagtacgatctttttgactcaatggatattggggatattatcggagtaagcggtgaggcatttaaaacaaaagtaggagaactttccgtaaaggttaacgaccttcatttgctttcgaagtcacttcgtccactacctgataaattccatggtttaaaagatgttgaacaacgctaccgccagcgttaccttgatttgattatgagtccagaatcaaaagaaacctttatagctagaagtcgtatcattcaatcgatgcgccgttaccttgatgatcaaggttttcttgaggtggaaacaccaatgatgcactctattccgggaggggcttcggcacgtccgttcgtcactcatcataacgcgcttgatatggagctttacatgcgtattgctattgagcttcatcttaagcgtttaattgtaggtggtatggagcgcgtctatgaaattggacgtgttttccgaaacgagggtgtatcgactaggcacaaccctgaatttacaatgcttgaactgtatgaagcttacgcggactataaagatgtgatgacgttgactgaggaaatggtagctcatatcgcgaaagaagttacgggctctacaacaatccagtatggggaagaggaaatcaatcttgaaccagaatggaagagagttcatatggttgatgctgttaaagaaataactggcgttgatttctggaaagaaatgacggatgaagaagcgcgaagtcttgcaaaagaacacggtgtagacgtaaaagaaacaatggagtttggtcacgttgtgaatgaattctttgaacagaaagtagaagacacgctaattcaaccgacatttgtctatggccatcctgttgcgatttcacctcttgctaagaaaaatcctgaagatggtcgttttacagatcgttttgagttgttcatcgtagctcgtgaacatgcaaatgcctttactgagctcaatgatccaattgatcaaagagaacgttttgaagcgcaactagtagagcgcgagcaaggtaatgatgaggcgcatatgatggaccatgacttcattgaagcgctagagtatggtttaccaccaaccggcggtctaggtattggaattgatcgtctcgttatgctattaacgaattctccttccattagagatgttcttctgtttccacagatgagaaatacggagcgataataaattaagaatgaagttcgttcatcgagcttcattcttttttctttttctttccctcgttcagtggaatactctgagttgaaggttattcaaataaatgtacgtcctagggaaggtttcagttcaaagatttcattacaatacataaggcatcaggaggcaataaatcttttgaaaaaaagatttgaaaaagggttgcgttactaagacaaccctgatatagttatataggtcgccgcaacaacgcggttgacatgaaaaacaatttcaaaaaagttgttgacgccaactgagttaatatggtatattaataaagtcgctgaaaacgacatcgaaagaaacgaattgctctttgaaaactgaacgaaacgccatgtaagtagttgtttctacggaaacaaattgttttaaaagctagattaagctttctatcggagagtttgatcctggctcaggacgaacgctggcggcgtgcctaatacatgcaagtcgagcgaagagatgggagcttgctccctgatcttagcggcggacgggtgagtaacacgtgggcaacctgccctgcagactgggataactccgggaaaccggagctaataccgggtaatacatcgcaccgcatggtgcaatgttgaaagttggctttctgagctaacactgcaggatgggcccgcggcgcattagctagttggtaaggtaatggcttaccaaggcgacgatgcgtagccgacctgagagggtgatcggccacactgggactgagacacggcccagactcctacgggaggcagcagtagggaatcttccgcaatggacgaaagtctgacggagcaacgccgcgtgagtgacgaaggccttcgggtcgtaaagctctgttgttagggaagaacaagtaccgttcgaatagggcggtaccttgacggtacctaaccagaaagccacggctaactacgtgccagcagccgcggtaatacgtaggtggcaagcgttgtccggaattattgggcgtaaagcgcgcgcaggcggtcttttaagtctgatgtgaaagcccacggctcaaccgtggagggtcattggaaactggaggacttgagtgcagaagaggagagtggaattccacgtgtagcggtgaaatgcgtagatatgtggaggaacaccagtggcgaaggcggctctctggtctgtaactgacgctgaggcgcgaaagcgtggggagcaaacaggattagataccctggtagtccacgccgtaaacgatgagtgctaggtgttggggggttccaccctcagtgctgaagttaacacattaagcactccgcctggggagtacgaccgcaaggttgaaactcaaaggaattgacgggggcccgcacaagcagtggagcatgtggtttaattcgaagcaacgcgaagaaccttaccaggtcttgacatcctctgacaatcctggagacaggacgttccccttcgggggacagagtgacaggtggtgcatggttgtcgtcagctcgtgtcgtgagatgttgggttaagtcccgcaacgagcgcaacccttgatcttagttgccagcatttagttgggcactctaaggtgactgccggtgacaaaccggaggaaggtggggatgacgtcaaatcatcatgccccttatgacctgggctacacacgtgctacaatggacggtacaaagggcagcgacaccgcgaggtgaagcaaatcccataaagccgttctcagttcggattgcaggctgcaactcgcctgcatgaagccggaattgctagtaatcgcggatcagcatgccgcggtgaatacgttcccgggccttgtacacaccgcccgtcacaccacgagagtttgtaacacccgaagtcggtggggtaacctttatggagccagccgccgaaggtgggacaaatgattggggtgaagtcgtaacaaggtagccgtatcggaaggtgcggctggatcacctcctttctatggagaattacgaaggtaacttacgttaccaaccttacatgagcgtttcgtttagttttgaaagaatgattacttctttcaattgaatatagtcaataagcctttatgggcctgtagctcagctggttagagcgcacgcctgataagcgtgaggtcggtggttcgagtccactcaggcccaccataaaagttttgttgaacacgcatattccttttggcaaatcgccttttggattatttggggccttagctcagctgggagagcgcctgccttgcacgcaggaggtcagcggttcgatcccgctaggctccaccaacacatctactatagattgaattaagcgtttgtttgattcaagtagtagacttgttccttgaaaactagatagcataaacaacgacatccaataattatttttatgcaagaacttagtaataactgatgcgttatggcagcaatgcctaacaaatcgaaggttaagctactaagggcgcacggtggatgccttggcactagaagcctaagaaggacgggacgaacaccgatatgcttcggggagctgtaagtacgctttgatccggagatttccgaatgggggaacccaccatctttaataggatggtatccatttctgaatacatagggaatggaaggcagacccggggaactgaaacatctcattacccggaggaagagaaagcaaatgcgatttcctgagtagcggcgagcgaaacggaatcagcccaaaccagagggcttgccctctggggttgtaggacgtctctttggagttacaaaggcacggatagacgaagcgacctggaaaggtccatcagagaaggtaacaatcctgtagtcaaaatccgctgccctccgagacggatcctgagtacggcgggacacgtgaaaccccgtcggaatctgggaggaccatctcccaaggctaaatactctctagtgaccgatagtgaaccagtaccgtgagggaaaggtgaaaagcaccccggaaggggagtgaaagagaacctgaaaccgtgtgcctacaactagttggagcccgttaatgggtgacagcgtgccttttgtagaatgaaccggcgagttacgatcccgtgcaaggttaagctgataaggcggagccgcagcgaaagcgagtctgaatagggcgaaatagtacgtggtcgtagacccgaaaccaggtgatctacccatgtccagggtgaagttcaggtaacactgaatggaggcccgaacccacgcatgttgaaaaatgcggggatgaggtgtgggtagcggtgaaatgccaatcgaacctggagatagctggttctctccgaaatagctttagggctagcctcgcggcaagaatcttggaggtagagcactgattggactaggggtccttaccggattaccgaatccagtcaaactccgaatgccaacgatttatccgcgggagtcagactgcgagtgataagatccgtagtcgagagggaaacagcccagaccaccagctaaggtcccaaagtatacgttaagtggaaaaggatgtggcgttgcttagacaaccaggatgttggcttagaagcagccatcatttaaagagtgcgtaatagctcactggtcgagtgacgctgcgccgaaaatgtaccggggctaaacgtatcaccgaagctgtggattgtcttacgacaatggtaggagagcgttctaagggctgtgaagtcagaccgaaaggactggtggagcgcttagaagtgagaatgccggtatgagtagcgaaagacaagtgagaatcttgtccgtcgaaagcccaaggtttcctgaggaaggctcgtccgctcagggttagtcgggacctaagccgaggccgaaaggcgtaggcgatggataacaggttgatattcctgtaccacctcctttccgtttgaacgacgggggacgcagaaagatagggagagcgcgctgctggaaatgcgcgtccaagcgattaggctggtgaataggtaaatccgttcaccgtgaaggctgagtcgtgatggcgagggaaatttagtaccgaagtccttgattctacgctgccaagaaaagcctctagtgaggaaagaggtgcccgtaccgcaaaccgacacaggtaggcgaggagagaatcctaagacgatcgggagaactctcgttaaggaactcggcaaaatgaccccgtaacttcgggagaaggggtgcttcctcgggtttatagcccaggggagccgcagtgaaaagatccaagcgactgtttagcaaaaacacaggtctctgcaaagccgtaaggcgaagtatagggggctgacacctgcccggtgctggaaggttaagaggaggggttatcccttacgggagaagctctgaatcgaagccccagtaaacggcggccgtaactataacggtcctaaggtagcgaaattccttgtcgggtaagttccgacccgcacgaaaggtgcaacgacttggatactgtctcaacgagagacccggtgaaattatagtacctgtgaagatgcaggttacccgcgacaggacggaaagaccccatggagctttactgtagcctgatattggattttggtacagcttgtacaggataggtaggagccatagaagtcggaccgccaggttcgatggaggcgtcggtgggatactaccctggctgtactgacattctaacccagcaccgtgatccggtgcggagacagtgtcaggtgggcagtttgactggggcggtcgcctcctaaagtgtaacggaggcgcccaaaggttccctcagaatggttggaaatcattcgcagagtgtaaaggcacaagggagcttgactgcgagacctacaagtcgagcagggacgaaagtcgggcttagtgatccggtggttccgcatggaagggccatcgctcaacggataaaagctaccctggggataacaggcttatctccccaagagtccacatcgacggggaggtttggcacctcgatgtcggctcatcgcatcctggggctgaagtaggtcccaagggttgggctgttcgcccattaaagcggtacgcgagctgggttcagaacgtcgtgagacagttcggtccctatccgtcgcgggcgcaggaaatttgagaggagctgtccttagtacgagaggaccgggatggacacaccgctggtgtaccagttgttccgccaggagcatagctgggtagctacgtgtggaagggataagtgctgaaagcatctaagcatgaagcccccctcgagatgagatttcccacagcattaagctggtaagatcccttagagatgatgaggtagataggttcggggtggaagcgtggcaacacgtggagctgacgaatactaatcgatcgagggcttaacctaaaaatattggaatacgttgtgcgtgctatctagttttcagggaataccctgtaaagtctagtgacgatggcgaagaggtcacacccgttcccatgccgaacacggaagttaagctcttcagcgccgatggtagttgggggatctccccctgcaagagtaggacgtcgctggacttatatagtggaggattagctcagctgggagagcatctgccttacaagcagagggtcggcggttcgagcccgtcatcctccaccatattttttaacccgtaagggtacataaagtgccggcctagctcaattggtagagcaactgacttgtaatcagtaggttgggggttcaagtcctctggccggcaccagcttttcttacatgaaaagagccattagctcagttggtagagcatctgacttttaatcagagggtcgaaggttcgagtccttcatggctcaccatttatttgcgggtgtggcggaattggcagacgcgctagacttaggatctagtgtcttacgacgtgggggttcaagtcccttcacccgcaccaattgcggaagtagttcagtggtagaacatcaccttgccaaggtgggggtcgcgggttcgaatcccgtcttccgctccattaatttaataaatttgcgcccgtagctcaattggatagagcgtctgactacggatcagaaggttagggattcgacttctctcgggcgcaccattacttttactatttttcttcttgaaacgggaagtagctcagcttggtagagcacttggtttgggaccaaggggtcgcaggttcaaatcctgtcttcccgaccatctatctatagcaacggggccttagctcagctgggagagcgcctgccttgcacgcaggaggtcagcggttcgatcccgctaggctccaccaaatattttctaaaaaacttgttgacactgacaaacacatcatggtatgatggtttggtcgctgaaaacgacattgaaagaaacaaattgctctttgaaaactgaacgaaacgccatgtaagtagttgtttctacggaaacaaattgttttaaaagctagattaagctttctatcggagagtttgatcctggctcaggacgaacgctggcggcgtgcctaatacatgcaagtcgagcgaagagatgggagcttgctccctgatcttagcggcggacgggtgagtaacacgtgggcaacctgccctgcagactgggataactccgggaaaccggagctaataccgggtaatacatcgcaccgcatggtgcaatgttgaaagttggctttctgagctaacactgcaggatgggcccgcggcgcattagctagttggtaaggtaatggcttaccaaggcgacgatgcgtagccgacctgagagggtgatcggccacactgggactgagacacggcccagactcctacgggaggcagcagtagggaatcttccgcaatggacgaaagtctgacggagcaacgccgcgtgagtgacgaaggccttcgggtcgtaaagctctgttgttagggaagaacaagtaccgttcgaatagggcggtaccttgacggtacctaaccagaaagccacggctaactacgtgccagcagccgcggtaatacgtaggtggcaagcgttgtccggaattattgggcgtaaagcgcgcgcaggcggtcttttaagtctgatgtgaaagcccacggctcaaccgtggagggtcattggaaactggaggacttgagtgcagaagaggagagtggaattccacgtgtagcggtgaaatgcgtagatatgtggaggaacaccagtggcgaaggcggctctctggtctgtaactgacgctgaggcgcgaaagcgtggggagcaaacaggattagataccctggtagtccacgccgtaaacgatgagtgctaggtgttggggggttccaccctcagtgctgaagttaacacattaagcactccgcctggggagtacgaccgcaaggttgaaactcaaaggaattgacgggggcccgcacaagcagtggagcatgtggtttaattcgaagcaacgcgaagaaccttaccaggtcttgacatcctctgacaatcctggagacaggacgttccccttcgggggacagagtgacaggtggtgcatggttgtcgtcagctcgtgtcgtgagatgttgggttaagtcccgcaacgagcgcaacccttgatcttagttgccagcatttagttgggcactctaaggtgactgccggtgacaaaccggaggaaggtggggatgacgtcaaatcatcatgccccttatgacctgggctacacacgtgctacaatggacggtacaaagggcagccacaccgcgaggtgaagcaaatcccataaagccgttctcagttcggattgcaggctgcaactcgcctgcatgaagccggaattgctagtaatcgcggatcagcatgccgcggtgaatacgttcccgggccttgtacacaccgcccgtcacaccacgagagtttgtaacacccgaagtcggtggggtaacctttatggagccagccgccgaaggtgggacaaatgattggggtgaagtcgtaacaaggtagccgtatcggaaggtgcggctggatcacctcctttctatggagaattacgaaggtaacttacgttaccaaccttacatgagcgtttcgtttagttttgaaagaatgatttattctttcaaaataggtgaagtgatgaagcttacgctgattcaagtagtagccttgttccttgaaaactagatagcacaaacaacgacatccaataattatttttatgcaagaacttagtaataactgatgcgttatggcagcaatgcctaacaaatcgaaggttaagctactaagggcgcacggtggatgccttggcactagaagcctaagaaggacgggacgaacaccgatatgcttcggggagctgtaagtacgctttgatccggagatttccgaatgggggaacccaccatctttaataggatggtatccatttctgaatacatagggaatggaaggcagacccggggaactgaaacatctcattacccggaggaagagaaagcaaatgcgatttcctgagtagcggcgagcgaaacggaatcagcccaaaccagagggcttgccctctggggttgtaggacgtctctttggagttacaaaggcacggatagacgaagcgacctggaaaggtccatcagagaaggtaacaatcctgtagtcaaaatccgctgccctccgagacggatcctgagtacggcgggacacgtgaaaccccgtcggaatctgggaggaccatctcccaaggctaaatactctctagtgaccgatagtgaaccagtaccgtgagggaaaggtgaaaagcaccccggaaggggagtgaaagagaacctgaaaccgtgtgcctacaactagttggagcccgttaatgggtgacagcgtgccttttgtagaatgaaccggcgagttacgatcccgtgcaaggttaagctgataaggcggagccgcagcgaaagcgagtctgaatagggcgaaatagtacgtggtcgtagacccgaaaccaggtgatctacccatgtccagggtgaagttcaggtaacactgaatggaggcccgaacccacgcatgttgaaaaatgcggggatgaggtgtgggtagcggtgaaatgccaatcgaacctggagatagctggttctctccgaaatagctttagggctagcctcgcggcaagaatcttggaggtagagcactgattggactaggggtccttaccggattaccgaatccagtcaaactccgaatgccaacgatttatccgcgggagtcagactgcgagtgataagatccgtagtcgagagggaaacagcccagaccaccagctaaggtcccaaagtatacgttaagtggaaaaggatgtggcgttgcttagacaaccaggatgttggcttagaagcagccatcatttaaagagtgcgtaatagctcactggtcgagtgacgctgcgccgaaaatgtaccggggctaaacgtatcaccgaagctgtggattgtcttacgacaatggtaggagagcgttctaagggctgtgaagtcagaccgaaaggactggtggagcgcttagaagtgagaatgccggtatgagtagcgaaagacaagtgagaatcttgtccgtcgaaagcccaaggtttcctgaggaaggctcgtccgctcagggttagtcgggacctaagccgaggccgaaaggcgtaggcgatggataacaggttgatattcctgtaccacctcctttccgtttgaacgacgggggacgcagaaagatagggagagcgcgctgctggaaatgcgcgtccaagcgattaggctggtgaataggtaaatccgttcaccgtgaaggctgagtcgtgatggcgagggaaatttagtaccgaagtccttgattctacgctgccaagaaaagcctctagtgaggaaagaggtgcccgtaccgcaaaccgacacaggtaggcgaggagagaatcctaagacgatcgggagaactctcgttaaggaactcggcaaaatgaccccgtaacttcgggagaaggggtgcttcctcgggtttatagcccaggggagccgcagtgaaaagatccaagcgactgtttagcaaaaacacaggtctctgcaaagccgtaaggcgaagtatagggctgacacctgcccggtgctggaaggttaagaggaggggttatcccttacgggagaagctctgaatcgaagccccagtaaacggcggccgtaactataacggtcctaaggtagcgaaattccttgtcgggtaagttccgacccgcacgaaaggtgcaacgacttggatactgtctcaacgagagacccggtgaaattatagtacctgtgaagatgcaggttacccgcgacaggacggaaagaccccatggagctttactgtagcctgatattggattttggtacagcttgtacaggataggtaggagccatagaagtcggaccgccaggttcgatggaggcgtcggtgggatactaccctggctgtactgacattctaacccagcaccgtgatccggtgcggagacagtgtcaggtgggcagtttgactggggcggtcgcctcctaaagtgtaacggaggcgcccaaaggttccctcagaatggttggaaatcattcgcagagtgtaaaggcacaagggagcttgactgcgagacctacaagtcgagcagggacgaaagtcgggcttagtgatccggtggttccgcatggaagggccatcgctcaacggataaaagctaccctggggataacaggcttatctcccccaagagtccacatcgacggggaggtttggcacctcgatgtcggctcatcgcatcctggggctgaagtaggtcccaagggttgggctgttcgcccattaaagcggtacgcgagctgggttcagaacgtcgtgagacagttcggtccctatccgtcgcgggcgcaggaaatttgagaggagctgtccttagtacgagaggaccgggatggacacaccgctggtgtaccagttgttccgccaggagcatagctgggtagctacgtgtggaagggataagtgctgaaagcatctaagcatgaagcccccctcgagatgagatttcccacagcattaagctggtaagatcccttagagatgatgaggtagataggttcggggtggaagcgtggcaacacgtggagctgacgaatactaatcgatcgagggcttaacctaaaaatattggaatacgttgtgcgtgctatctagttttcagggaataccctgtaaagtctagtgacgatggcgaagaggtcacacccgttcccatgccgaacacggaagttaagctcttcagcgccgatggtagttgggggatctccccctgcaagagtaggacgtcgctgggcaaaagaagaaaggcgagagaccaaatggtttctcgcttttttgtatggttttataggtgagtttttactagctcaaagccctcattcatcacgttcgcggaattaatctcaaattcgcgggaatatctaaaatatcgcagcataaactttacaccttcttcaaacctctcacaacttcctcagtcctatcaaattataagtagtaaatggtgatttaggctactctattagaacacacaactcagagattctcagacaaacaaatagacatttattaatcataaaactccaactcgatactccactcttaggtttagttagcaatgaatttattcgcccgcaacgcattttcaaaagagagattaactagtagttggaaagggtacaaactacaaacgaataaatgagggactggtacattattagcacacgctaactaacttttataaacatccttacttcttataaaaaagtaaagaaataaagagtcttgaatttcacattaatggaaaagcttaaaaaaggagacatgtgataggcttgttactttgcaatccatcctaaacacgttataatatatccaacgtcaaatatagtcaaagtcagtatggggacggagaggagggaactcagtgaggaatgtttccgatattattgaagcatatttaaagaaaattttaatggttgatggaagggatgctgttgagataaaacgaagtgaaatagcagataaatttcaatgcgttccctcacaaattaattacgtcatcaatactcgctttacgattgaaaaagggtatattgtggaaagtaaaagaggtggagggggttatatacggattgttaaagttaagcccgaaacccatgctgatttaattgatgaaatgctccagattgtcaaaaatcaagttccacaagtcgtttcagaaaatattatccttcgtttactcgaagaagaggttatttcagaacgagaagcgaagttaatgttaagcgtactagatcgtacagtgattacaatagagctaccgttaagagatcacttgcgtgcgaatatgttgcgcgcaatgcttatcgctttaaaatataaataatattactacgataagggtagataaggagggttgccctatgacttgtcaggaatgtggtgagcgccctgctacgcttcatttcaccaaaattatcaatggtgaaaaaacagaaactcacatttgtgaaaagtgtgcaaaagaaaaaggtgaggttgagccaggcactaaccatttttctatccataacttattatcgggattactaaattttgaaactcctattagtgagagccaggcgcagtctttttataaatcggagcccagtcactgtcctaaatgtggcttaacttatcagcaatttacgaaaattggtcgttttggctgttctgagtgctataaaaccttttccgataaacttgatcctatacttaagaaagttcatggcggcaatacgattcactctgggaaaattcctaaacgggctggcgcagctatagaaatggaacgcaaagttcaaaatttaagaaacaaaatgaaagagtatattgaacatgaggaattcgagaaagctgcagaaacgagagatttgattcgttcccttgaagacaaaagttcatcggaagggggagaataatgtcacttcagcattttatcagtgaggctgtaagcccctggatgaaaaacgaaggccctgactcagatatcgtaatgagtagtcgtgtaaggtttgctcgaaatttaaagaattatgtgttcccaatcctttctaatcgtgagcataacttagaggttatcgaagaagtaagaggtcaatttactgatgtaccagacgatcaggtagggcaacttgagttaattgaaatggatgatttaaagcctatcgagaaacgtgtacttgtagaaaagcacctcattagtcctaatcttatcgaacagtccaaaaatggggctgtactcttaagtgagaatgaaacggttagcatcatgattaatgaagaagaccattttcgcatccagtgtttagtagctggttttgagcttaaaaaagcactgtctcttgcaaactcactagataattggatcgaagaaaaagtggattatgcatttgatgaaaaaaagggttacttaactagttgtccgacaaatgttggaacaggaatgcgggcatctgtgatgctgcatcttcccgcgcttgtgttaacacagcagttaaatcatattattccagctattaatcagcttgggctagtcgtaagaggcagttacggtgaaggaagcgaagcgctaggtaatatttttcaaatttcaaatcaaatcacacttggtaagactgagaatgacattattgaagatttgcaaggtgtggttagacaagtgattgaaaaagaaagagctgctagacgtgcccttcttgataactcgagaatcgaattagaagatcgtatttaccgagcgcttggcgtcctacagaatagtaggatcattcaatcaaaagaggcggctaaatgcttatcagatgtaagacttgggattgatttaggtctagttaaaggattatctaaatctattttgaatgaattgctgattcttactcaaccagggttcttacaacaatatgccggggcgagccttacccctacagagcgagacattaaacgtgctacgttaattagagaaagacttgaacttgaagatcaactaacgaagaatgtggagggtgatgaacaatgatgtttggacgatttacagaacgtgcccagaaagtacttgcactagcacaagaagaagcaatccgacttggtcataataacgttggaactgagcatattctacttggcttgattcgcgaaggagaaggtattgccgctaaagcattaacagctcttgggctgggctcagaaaaaattcaaaaagaagtagagaagttgattggacgtggacaggattctgttcaatccattcactatacaccaagagctaagaaagttatcgagctatcaatggatgaagcacgtaagctaagccattcttatgttggaactgagcatatcttacttggtcttattcgtgaaggagaaggtgttgcagctcgtgttcttaacaaccttggtgtcagcttgaataaagcacgtcaacaggttcttcaattgcttggaagcaatgaaagttcttcttctagtcatcagagtggtggggcaagtgccaatacgccaacgcttgatagcctagcaagagaccttactgtcatagcacgagacaatggtttagaccctgttattggccgtagcaaagaaattgagcgagtgattgaagtgcttagccgacgtacgaaaaacaatcctgttcttattggtgagcccggtgtaggtaagacggcgattgctgagggccttgcgcaacaaattattaataatgaagtacctgagactctccgtgataagcgtgtcatgacgcttgatatgggtactgtagtagcgggaacgaaataccgcggtgaatttgaagatcgtttaaagaaagtaatggacgaaattcgtcaggcaggcaatatcattttattcattgatgaacttcatacgttaattggagctggtggggcagaaggtgcaatcgatgcatcgaacatcctcaagccggcactagcaagaggagagcttcaatgtattggtgcaacaacacttgacgagtatcgtaaatatattgagaaggatgcggcacttgaaagacgtttccaaccaatacaggtaaatgaaccgacaagtgatgaatctgcgctaatcttaaaaggtctacgtgatcgttatgaagcgcatcaccgcgttacaattacagatgatgctattgaagcagctgtaaagctttcagatcgttatatctcagatcgttttctaccagataaagcgattgatttaattgacgaagctgcttcgaaagtgcgtctacgttcttatacagcaccaccgaatttgaaagagcttgataagaagctggaagaagttcgaaaagaaaaagatgctgctgttcaaagccaagaatttgagaaagccgcttctcttcgcgactctgagcaacgcttacgtgagcagcttgagcaaacgaagaaagagtggaaagaaaagcaaggcaaagagaatcaagaagttacaccagaagatattgcgatcgtcgttgccaattggactggaatcccggtttccaagctagaagagcaggaaacagagcgactattgaagatggaagaaattcttcataatcgcctgatcggtcaagaagaagcagttaaatcaatttcaaaagcagttcgacgtgctcgtgctggtcttaaggatcctaaacgcccaattggttcattcatcttccttggaccaactggtgttggtaagacggaactcgctcgtgcagttgctgaaacgcttttcggtgaagaagattccgtaatccgcattgatatgtccgagtacatggagaaacactcaacgtcacgccttgttggatcacctccaggatatgttggttatgaagaaggtggtcagttaactgagaaggtaagacgcaaaccttattctgttatcttgctagatgagattgaaaaagcacacccagacgtgtttaatatcctattacaagtgctagaagatggacgattgactgattctaaagggcgcgtagttgatttccgtaatacagtagtcattatgacgtcaaacgttggggctagcacgcttaagcgcaataaatatgttgggttctcaacaggatctgaaggtcaagaatatagtgatatgaaaggtaaagtgatggatgatctcaagaagactttccgtccggagttcttgaaccgtattgatgagacgatcgtattccattctcttgaaaagaaacacttgaaagaaattatagtactgatggccaaccagcttaaggctcgtctatctgatcatgggattgattttgaactaaccgatcttgctcttgataaaatttctgaagaaggatatgatccagaatatggtgctcgaccgcttagaagagctttacagcgtcatattgaagatcgtctttcagaagaattgctaaaaggaaatattgaaaaaggtcagcgagtgaagattgattacaaagagaacgattttgttgttgaaactctttctgaagcaacttcatcataagaaattcaaccggaagttttatcttccggtttttttctatttgaggagtggtttgcttcacttaagggaaaggtattgtgataagaattttattgatcctttttgaggagtcacccttcaatttaagagtgattcactgaatcgatggaacttttgtaaacggctaatcgttatgagttcataggaacttataaggtatgataaaataaatgtagtgaatttgttcggttaattgaaagtgaggatattagatggcgaagaaaaagacgaaatttatgtgtcaggattgcggctatgaatctccaaaatggatgggaaaatgtccaggatgtcatcaatggaacacgatggtagaagaaatggttccaggagaaaacgatcgtagacgattcgttacttcaagcaatgaaacggcgagtaaacccacatctattagaagtatccaaaaagaaatggagcctagaatactaacccacatcacggaacttgatcgtgtattaggcggtggtgtcgttccgggttcactcgttcttgttgggggtgatccggggattggtaaatcaacgctcttattacaaacgtcgtcgaagttggctgatcaggatcaccccgttctgtatatctctggtgaggagtcggtcaagcaaacgaagcttcgtgcagatcgtttaggtgttgatgcggaaaaattatttgtattagcggagacggatcttgagtatattagtaaagcgattgaagaaataaacccgcaacttgtcattatcgactcaatccaaacgattttcagatcagaagttacatctgctccgggtagtgtttctcaagttcgtgaatgtacttcccaacttatgcgtatagctaaaacaaagggaattgcagtttttattgtcgggcatgtaacgaaagaaggatcaattgcgggtccgagacttttagaacatatggtagatgcggtgctttactttgagggagagcgtcaccatacattccgaattcttcgcggcgtaaaaaaccgttttggatcgacaaatgagataggtgtttttgagatgaaggaagagggtctagaagaagtgcttaatccttctgagatttttctagaagaacgatcttctggttctgcagggtcaacggttgttgcatctatggagggaacgcgaacggtccttgtcgaaatacaagctcttatatcacctactagctttggaaatccacgtagaacggcaacaggtattgatcataaccgagtatcgttattaatggcggttcttgagaaaagagtaggccttcttttgcaaaatcaggatgcttatttaaatgtggctggtggtgtaagacttgatgagcctgcaattgaccttgctattgctgtttcaattgcttcaagttttagagacaaaccaacacgtccttctgacatagtagtgggtgaaattggattgaccggagaaattagacgagtatctcgtattgaacaacgagtcatcgaagccgctaaacttggttttgaacgggctattattccaaagaagaacataggtggatggacttttccagaaggcattcaggtaatcggtgttcaaacagtagatgaagcattaaaagaagcactaggagggtagaagatggagatcgataagcagcaggaaattataaacggcatattaaaaatcgttgcgccaggtacgcaattaaggcatgggatcgataatattctacgcgcgaataccggtggtcttattgttgtaggatatgatggtaagttgcaagaaattgtcgatggaggcttctcaattgagtgtcgtttcacgcctgcttatttgtatgagttagcaaaaatggacggggctattatattaaacaaagaagcctccaaaatattatatgcaaatacacaattaattccagaaacctctattccatcaacggagaccgggattcgccatcgaactgcagagcgggttgccaagcaaacaggtaatctagtgatttcgatctcacagcgtcgtaacgtcattacgctttatcaggggaatattcgctattcattaaaagagattggcgttattctgacaaaagccaatcaagcgatgcaaacgttagagaaatacaaatcagttctagatcaggggattacagaccttggtgcgcttgagtttgaagaacttgtcacgcttcaagaagtggcacaggtgattcatcggattgaaatggtgttacgtattaagaaagagattcttaattacattaatgagctagggacagaaggacgattaattagcatgcagatggaagagctcgtatctaatcttgagtcagaggcaaagtggctgattggagattatgtgaaggacgttgatgaatctcctgctgatgtaatgaaacgtttgaagaagctatcaagtgatgatttgctagaagaaaacgcgattatgaagattcttggttaccaggatcagaatgagaatgttactccgagaggttaccggattctgcataaaattccaagattaccatctaatattattgagaatttggtcgatagttttgataacctaaatgcgatttcgaaagcttcgatcgaggaattggatcatgtcgatggaatcggagctattcgagctaagaaaataaaagatggattgaagcgaattcaagaacaactctttgtggatcgccatatatagggctgtgaaatagacattccatagggggtgtgctactctataattaatttatagtcatgcaagccaacctataatcatactataaaattcgcaaacttcaaggaattacgtttcaatttcgggaaattgtttataatgttaaaaggaggtgaaaacgtcaatgataaagtggattgtacagttgttttttatcattttaggcggagcactgggattagtatacttaccagatttaatacaattactcaatataggggatcttccatcagtctttagcaactcttatgcaggtgctgtcattggagcggtactgttctttctagcaacattttggataacagattatattgtggattttattcgaattattgaagaaaaggtagttaaagcacctgttggagacgtactatttggggcaattggactgattattggacttataattgcatttttactaactgtacctctggctgagattaactttccggttgttagtaacattctgccgattttcattacgatcctgttagggtattttggattccaggttgggtttaaaaagcgcgatgagcttatcaaccttttctccaacaccaaaggcaaggaaaagaaaaaagatacggatgaggatgagattgattctggatcatccaaattaaagatccttgatacaagtgtcattattgatggaagaatcgcggacatttgtcagactgggtttcttgaaggcacgttagtcattccgcaatttgtccttgaggagctccaacatattgctgactcgtcagacgttttaaaacgtaatcgtggtcgtcgtggccttgatattttgaacaaaatacaaaaagagcttgaaatcaacgttgaaatctatgaaggtgattttgatgaaattcaagaagtagatagtaaactcgtcaagctagccaagcttgtcaatggcatggttgttacaaacgattttaacttaaacaaagtatgcgaactgcaaaaagttcaagttttgaatatcaatgatttagcgaatgcggttaagccggtagtgcttcctggggaagagcttaatgtgcaagttataaaagacgggaaagaatacaatcaaggcgttgcgtatctagatgatggtacaatgattgtcgtagaagaaggtagaaactatataggcaaaacgattgatgttcttgtaacgagcgtgttgcaaacatcagcagggcgaatgatatttgcgaagcccaagctacttgagaaagcactttaagcgatagacaacgggggttctagctttgaagtattcagtagtcattcctgcggccggtcaaggtaaacggatgaacgcgggaaaaaacaaacaatttattatgcttgaaggaaaaccgattatcgttcatacgatgtcggtttttcaaagtgatcctcaatgtgaagaaattgtgcttgctgttaatgagcgggagcacgacgactttcggtcgcttatagaagagtatgatttaacaaaagtaagtcatgtagtaacaggtgggcgtgaaaggcaacaaagcgtttatgaagggctaaaagccttgcaaggagataaggtcgtgttaattcatgacggagcgcgaccgtttttctcacatgaagttgcaaacaaagtggcgctggcagcagcgaattatgacggagctattgtcgctgttccggttaaagatacagtgaaacaggtagatcaattacaagtaaagagaacaattgatcgctcaagcttgtgggctgttcaaacgccacaggcttttcgtctatctgtgattaaagatgttcatcaatgggcggaagcgaatgacgtgattggaactgatgatgcaagtctagtagaaatgaatggacaagcggtgcatgttattgaaggtgattattggaacgtgaaattaacgacaccagaagatttaatttttgcaagagcgatattgcgagagaaaaaggagagtggcatttaatgcgagtagggcatggatttgatgtacataaattagtagaaggacgtccatgtattattggtggggtgacaattccgtttgaaaagggtttacttggacattctgatgcagacgttcttcttcattccgttgcagatgcttgtctgggtgcaattggagaaggagatatagggaagcattttccggatacagatgaggcatttaaagatgctgattccaaggaactccttcgccatgtgtatggcattgtaaaagaaaagggatttgtactaggaaacgtggatggtacgattatcgcccagcttccgaaaatggcgccacacatttcagggatgcgtgaagtgattgctgaattacttgaggcagacataagtcaggtgaatgtgaaggcgacaacttctgagaagcttggctttacgggtagaggagaaggaattgcagctgaagtagtcgtgttgcttcaaaaagcttgaccgataatttgactctaatggtaaaataataagacagttaaagataataactaatggtggtggatagaatgggaaatgaagtacgtgtacgttatgccccgagcccaacgggttatttacatattgggaatgctagaaccgcgttatttaattatttatttgctagaaatcaaggcggtaagtttattattcgcattgaagatacggatcaatctcgtaatgtagaaggcggcgttgagaatcagcttgattacttaaagtggcttggcatggattgggatgaaagtattgataaagagggcgagtacggtccatatactcaaatggaacgtcttgacatttatactgagcacactaaagagctattggaaaaagatctcgcatataaatgttattgtacagaagaagagcttgaagcggagcgtgaagcacagcgcgcacgtggagaaatgcctcgttactctgggaaatgccgacacctaactcaagatcagcgagaaaaactagaagcagaaggtagagagccgagcatccgttttgctgttcctcgcgacaaagagtatgcatttgatgatattgtaaaagaccgcgtatcttttgaatctaatggaattggcgactttgttattgttaagaaaaatggtattcctacttacaattatgcggtggcgctagatgactatcatatgaaaatttctcacgttttacgtggagatgatcatatttcaaacacaccgaaacagctgatgatttacgaagcatttggctttgaaccacctaaatttggccatatgacgctgatcgttaatgatcaaaagaagaaacttagtaagcgagataagtcaatcgtgcaatacattgaacagtatcatgatttaggttttcttccagaagcgttatttaactttgtcactcttcttggttggtctcctaaaggagaagaggaactgtttacaaaagagcagttggttgagatctttgatccagaacgcctatctacttctccggcggtatttgattcacaaaaactttactggatgaataatcaatatattaaacaatcgagtctagatcgagtggtcgagcttacgcttccacaccttgtagaagcaggaagattcccgcttgaaatgacagatgagcaaaaagaatgggctaaagaactgattgctctttatcaagagcagcttcattacggtagagaaattgttgagcttactgagttgttctttaagcaagaaattgagtataatgaagaagcaatgacagtgttgaatgaagaacaaattcctgaagtgatgcaaggctttttagatcaacttaaggaagttgaagaattcgagccagcggctattaaatcagcgatcaaggctactcaaaaggcaactggtcataaagggaaaaaactatttatgccgatccgtgttgctacgacaggtgaaacgcacggtcctgaacttccacaggccattgccttgcttggaagagatgcagttaatgcccgtttgaatcaagttcttgcgatgagtaaagcataaacgatatagatgtatactaacgttgaagaggaaaagtaaatgagtgtaattctttatagagagagctgtctgcggctgaaagcagcttaataattcactcatcgaaatgcccctctgagtcttctttcgaaagccagcatggtgattagttaggagcggtgccgccgttaccggtgataggagcatttcttggaaatgttcgaagcagagtggaaccacgcgaatggcgtctctgtgtgatgaaaacatcacacaggggcgtctttttttagtcaattgacttacctagacggtggaaaattcaatttaaccttatgggagtatgaggagaggggtgaacacatgtggaagacgttgaagcaggatatcgatgtcgtatttgatcaagatcctgcagcaagaagttattttgaagttattttaacttatgctgggcttcatgcgatctggtctcatcgcgttgcacactggttttggaaaaagaaattcttcttccttgcaagagctgtttcgcaaattagccgctttttcacgggtattgaaattcatccaggcgcaacaattggggaacgttgttttatcgaccatgggatgggtgttgtgataggagaaacgtgtgaaattggaaataatgtaacgctgtttcaaggagttacccttggcggtactggaaaagaaaaaggtaaacgtcatcctacccttgaagacaatacgctcgttgccactggagcaaaagtactgggatccataacgattggaaaaaattcaaaagtaggagccggatcggttgtacttcaggatgttccagtcaattctacagttgttggtatacctggaagagtcgtcatccaaaatggtgttaaggtacctcataatttagatcatcacaaaatgcccgatcctgtagctgataaatttaaacaaatggaacaagaaatgcgtgacttacaagaagaagttcgaacgttacgaaagaggagtgaaaacgatggcgattaagctatataacacattgactcagaagaaagaaacatttcaacccattgaagaaggaaaagtaaggatgtacgtgtgcggtcctaccgtttataactatatacacattggtaacgcccgacctgctatcgtctttgatgttgttcgtcgttatcttgagtatcgagattatgatgtccattatgtttccaactttacggatgtcgatgataagttaatccgcgcagctaaagaattaggtgacgacgtgccaaatgtagctgagcgttttatcgcagcttaccatgaggatacgggagccctaggtgttaaaaaagcggatgaacatccaagggtaacggaaaacatgcaagaaattatcgatttcatcacggctcttattgaaaagaattacgcctacgaatctgaaggtgatgtgtattttagaacacgtcaatttgaagggtatggaaagttatcccatcaatccattgatgaacttaagctgggatcccgtattgtagttggtgaaaagaaagaagatccgcttgattttactttgtggaaagcggctaaagaaggtgagatctcctgggcaagtccgtggggagagggtcgcccaggctggcatattgaatgctctgcaatggcgaagaaatatttaggagatacgattgatattcatgccggtggaaaagaccttgcattcccacaccatgaaaacgaggtggcgcaaacagaagccttaacgggtcacccttttgcgaattactggctgcataacgggtatatcaatattaataacgagaaaatgtccaaatcactcggtaattttgtgctcgttcatgatttgataaaacaacatgatcccgaagccattcgattctttatgttgtctgttcattatcgcaatcccattaacttcgatcatgaacttttagcaagtgcaaaaacagggttggatcgcattaaggatacggtggagaacctagagcaccgcctgttaaatagcgcagatcttgctgaggatgttcaggactggaaagagaaaattgaggactatcgaaagcgctttgtaacagagatggacgatgattttaatacagctaatgcaatttccatcttatttgaactctcaaaagaagcaaatctataccttcaaggaacgaattcttccaaagaagtacttgaacaatttatggaacgttttgctgatttcggatcagttcttggtatttcttttaaacaggaaaaagcacttctagatgaagatgttgatcagctgattgaagaacgaaatgaagctagaaaacagcgtaatttcagtagagcagatgaaatccgcgatgaattgaaagagcagggaatacttcttgaggatactcctcagggcgttcgctggaaaaggatgtagcatatgaaggaaatcgatgtaaagcaactgaattctcttgcacttgcgtatatgggtgactctgtcattgagattaatgtgcgaaagcgattgttatctctcgggcacattcgcccgaatcagctacaccgcacagcaacaacatacgtatctgctaaagcgcaggctgcttttcttcaccacgtactgaagcaagagtggctatcggaagaggaagctggtgttgtccgcagaggacgtaatgcaaaatctggaacggtacctaagaatacgagtgtaagtacgtacaaatattcgactgctcttgaagcgttgtttggttaccactacctaaagggaaatgaacgaagagttgatgaacttttggagagactttttgaatttgtagaacaaccgaagaaagaagtgaaatgagatggataaagaatttattgtaggacggaattctgttcttgaagcgctgcgatcaggacatgaaatcaacaagatttggattaatgaagggtctcaaaaagggcctcttcaaaatctgatacaaaaagccaaggagcaaaatgtgctcgttcagtttgtacctaagcgaaagcttgaacaattgtctggcgaaagtaaccaccagggcgtagtcgcttctattgcggcttatgaatacgctgacctggacgatttatttaaaaaagctgaagagtcaggagaagcaccttttttcctactattagatgagattgaagatcctcataacctcggttctatcttaagaacagctgattcagcaggagcgcatggtgttattattccgaaaaggagagcggttggcttaacatctacagtggctaaatcctcaacgggagctattgagtatattcctgttgcacgcgtaacgaaccttgctagaacgatggatgatttgaaagagcgggggatctggtttgttggtacagacgcgcaaggtggacaagattatcgccaggcggattatgacatgggaattggacttgttattggaagtgaaggaaagggaatgggtcgcctgattaaagacaaatgcgacttcctagtaagccttccaatggctggaaaagtaacctcgctcaatgcttcggttgccgcaggattaatgatgtatgaggtttatcgacaacgtcatcctctgggggagtaaaacatggacgtgctgttagttgatggatacaacataatcggggcgtggccggaattaagatcgctgaaagaaagtgactttagtaaggctcgtgagctattgattgagaaaatggccgagtatcaagcttataccggatatcgggtgatcgtcgtttttgacgctcacctctcccacggtattgaaaagcgtcatagtcaatatcgagtcgaagtgatctatacgagggagaatgagacagcggatgagcggattgagaagatggcaagagaactcaaaggaatacgcacgcagattcatgttgcaacgtcagattataccgagcaatgggctatctttggacagggagctttaaggaaatcagccagggagctttacaatgaaatgcagggcattgaaaaagggatcgaaaaaagtgtccatactgaaaatcggagaaaccgttcgccaggcctgcatttatcagaggaaattagcgaaatatttgaaaaatggcgaagaggcggtaaataagcggttgacgatttttcgacacgtactgtataatatttctatatagcgtactggtcggggggaacgcatattgagtacagtagacctcaaagaaagcacggtaaatcaagaacaacagtcagtagacccaagacacctggaacacgtagcattcgatcaacttgatgatgaactgctcgtcatcatggttcatgaaggtcacagtagagcgttggaacatttgattacgaagtacaaaaatttcgtacgagctaaagcgaggtcgtattttctcattggagcagatcgtgaagacatcattcaagaaggaatgatcggtctgtacaaagccattcgtgattttagaggggacaagttctcatcttttaaagcgtttgccgaactgtgcatcacccggcagatgattacagctattaaaaccgccacaagacaaaagcatattccgctgaattcttacgtctcacttgataagccaatctatgatgaagagtcagatcggacattgctagacgtcatatgcggaacaaaagtgacagatcctgaagaattgattattaatcaggaagaatttgatgacatcgaacttaaaatgtctgaaattttaagcgatttagagagaaaagtgctcatgctttatctcgatggacgttcttatcaagaaatatcggttgatttaaatcgacacgttaagtcaattgataatgctctacagcgggtgaaacggaagttagagcgttatctagaactgcgggaagtcagcctttaatatggacaaacctattaggaatattgggagagagtagggccaggtccctactctttttctgtgctagcctttcttgggctttattgacatgccgaaacgggctatgataaagtgataaaagtaagaatgtcaattttttgttaggtttgtaagaacgtcacagggtagctgaacgtttttttattttgttcttttttgatataagaaagcttatataaatacaaacttcactactgcgcggcttaggaaggtgtcattatgcgtaaaaaggcagtactagcatgtgttcaatgcaatagccgaaactatacaactatgaaaaactcacagacaagcccggcccgcatcgaagttaagaagtattgcaaatactgcgatgctcatactgtgcatcgtgaaacaaagtaatgcctcgcagggtgtttgctttttgaggcaaacgacaaaatagattctcgggggagttttccgccagattaattgggggtaacaagtaatggcaagtattgttcaacgttctggtaagttctttcgtaatgtcgcaagtgaaatgaagcgggtaagctggccaacacgtaaggaattaactcgctatacaatcgtaactgttacaacggttatttttatagctgtattctttgcgttgattgaccagggtatttcctcaataatccgcctcattttaggataaatcgttataaaaattcattctcaaggttagaatgatagagtaaatgagttggggagggaaggacacagtcctgcatatatggaaaaaagatggtatgttgttcatacgtactctgggtatgaaaacaaagtaaagaccaaccttgaaaaaagggttgagacaatgggcatgacggataagatctttcgtgttctcgtccctgtagaagaagagacagaagagaaaaatggtaagaaaaagacagttatgaaaaaagtctttcctggctatgttattacagaaatggtcatgacggatgattcatggtacgttgtccgaaacacgcctggtgttactggattcgtaggatcaagtggcgctggatctaaaccgactgctttgctaccggaagaagtagaatcacttcttaagcaaatgggaatggagcagccgaaagctgatgtagactttgaacttaaagagaaagtcaaagttaaagaaggtccgtttgctgatttcgtaggttctgttgaagggatcgacatggataaaggcaaagtgaaagttcacgtaaatatgttcggcagagaaacccctgtagaacttaatttcgggcaagttgaaaagttctaatcgaaaagtccttgcttaacttttcgattaatgatagaattttaatgtttcatgagtctcatactaatcgagacattcaattgatatataaggtgggagggtgtaaacacccaaataccacatcacggacttaaggaggtgtgtcgcgtggctaaaaaggtaatcaaggttgttaaattgcaaatcccggctgggaaggcgaatcctgcaccaccagtaggacctgcactaggtcaagctggagttaacattatgggattctgtaaagagtttaatgctcgtacttctgaccaggctggtatgatcattccagtagaaatcacggtttttgaagaccgttcatttacatttatcactaaaactccaccagctgcagttcttcttaagaaagcagcaggtatcgagtcaggttctggtgaaccaaaccgcaacaaagttgcgactgtgaagcgtgataaagtgcgtgaaatcgctgaaacaaaaatgccagaccttaacgcagcgaatgtagattctgcaatgcgtatggttgaaggtactgcacgtagcatgggaattacgatcgaagattaatgttacacaagccgttgcgattaaaagggattcctgcctgtgttatacaggttcgcaacttttattatgatgtcacattttgacatcataaatagtgggaggttaatccgctaaaccacattcaaggaggaacacaaaatggcaaaaagaggtaagaaataccaggaggctgccaagctagttgaacgtacaactttctatgagcctcaagaagcagtggaacttgtgaaaaagacttctgtaggaaactttgatggaacagttgaagcagcaattcgtcttggagtagaccctaagaaaaacgaccagcaggttcgtggcgcggttgtacttccaaacggaactggtaaaactcaacgcgttcttgttttcgcaaaaggcgaaaaagcaaaagcggctgaagcagctggcgctgattatgttggagaagctgattatatcgctaaaatcaacgaaggttggtttgagtttgacgtaatcgttgcaactccagatatgatgggcgaagttggtaagcttggtcgtgttcttggaccaaaaggcttaatgccaaacccgaaaactggaacggtaacgttcgatgttgaaaaggcagttaacgaaatcaaagctggtaaagtagagtaccgtgttgaccgtgctggtaatgtccatgcaccgatcggtaaagtatcattcgaagctgacaagcttgtagaaaacttaaacacacttgtagaaacgcttgtgaaagttaagcctgcagcagcaaaaggtacgtaccttaaaaacatttcggttacatctactatgggacctggtgttaaagttaacgcgtcaacttaccgctaataaaattagctgttgacatttgcgtagctattaaatatacttgtaaatgttgtttgataaattaatactttctgtaccgtagacagcaggggtgcaattgcacttaatatcctgccgaggtgtgaagtgattcgatacgtatgtaatcgtaaagccttcatgtcttcggatgtgaaggctttttatatgacctcatattccagggcggtatagatacatttctttaggaggtggaactatgagcagtatagttgaacagaagaagcaactagttacggaaatcgcagacaaactacgtgatagccaatcaacaatttttgttgattatcgcggacttgatgtttctgaagtaactgagcttcgtaagcaattgcgtgatgcaaacgttgagttccgtgtttacaagaacacaatgactcgtcgcgctgcagaagagcttgaacttactgatttgaatgaacaccttgtcggtcctacggcaatcgcgttcagcaatgaagatgttgttgctcctgctaaaattttgaacaacttcgctaagaatcacgaagctcttgaaatcaagactggtgtaatcgaaggtggcgttgtatcagtagaaaagatcaaagaacttgcggacctaccaaaccgcgaaggactactttctatgttgctatctgtgctacaagcaccgatgcgcaatatggcacttgctacaaaagctgtggctgatcaaaaggaagaacaaggcgcgtaacattaccgtctatcaattggtataaataaaacaaaaattaaggaggatttactcatgggtaacgagcaaatcattgaagcaatcaaagaaatgacagttcttgagcttaacgacctagttaaagcaatcgaagaagaatttggtgtaactgcagcagctccagtagcagcagcaggtggcgcagcagaaggtgctgctgaagagcaaactgaatttgatgtagttcttgaaagtgctggaagcagcaagatcaaggttatcaaagtagttcgcgaaatcactggtcttggcttgaaagaagctaaagaactagttgacggcgctccaagctctattaaagaaggcgttgctaaagaagaagctgaagagcttaaaggcaagcttgaagaagttggcgcagtagtagaagttaagtagtcatttgtctgaaacaaaagctcgcttttaaaagcgagctttttgttatttggcgctaatgattaagatgctagtaaggttgggtaagctgatagaaatggcgatagaaagagggaaaatgatgagtgaacattattatacgaaaaaccctggcgtgaaaagcaatccgaacaaaattgtagcggaattgcgagggaaacagttccagttcacgaccgattccggtgttttttcaaaaaaagagatcgattttgggagtaagcttctaatcgaatcgtttgaagaacctgaagttgaaggggatattgtagatgctggatgtggctatgggccaattggcatttcacttgcttctgaatttccgaatcgccgtttttatatgctggacgtaaatgagcgcgccactgaacttgcgacgaacaatgcaattaaaaatcgggttcataatgtaatagttatggagagtgatcagttaagtgcggtgaagggcagcatgttcgcttccgtccttacaaatcctcctatacgagcagggaaagatatagttcatggcatacttgaagatgcttatgaagtattgaaagaacatggtacgctttgggttgttattcaaaagaaacagggtgctccctcagcagtcgctaagctagaagaaatgttcaaacaagttgaaactgtcgtgaaaaagaaaggatactatatacttaaagcggtcaagtaaattatgaaattatcctttgacttcatggacggcctatgctaatataatataatgccaatgatggattttccaggcctttttcgcattcgtgtgcaaagaggtataaaatgccgtcgtctggaaaaactaatataatcgtttatagttaaggggaattttttatcaatgccctttttctttttttgtccaacgatagattcgaattaacagaatctaattggactaagaaaataaatacgctggatttgaggggtgaatcatttgacaggccaactagttcagtatggacgccaccgccaaagaagaagctacgcgcgaatcaaagaagtgttggatttgccaaatctaattgagattcaaacggcttcttatcaatggtttcttgatgagggtttacgagaaatgttccaggatatttctccaatcgaagatttcacaggtaatcttgtgctggaatttattgattacagcctcggtgaacctaagtatcccgtggaagaaaccaaagagcgagatgtaacctattctgcacctttacgagttaaagtacgcttgatcaacaaagaaacaggcgaagtaaaggaacaggaagtgttcatgggtgacttcccattaatgactgaaacaggtacgtttataattaatggggcagaacgcgtaatcgtatctcagctcgtgcgttctccaagtgtctactatagtgaaaagatcgataagaacggcaaaaaaggatatacagctactgtcattccaaaccgaggagcatggctggaatttgaaactgatgccaaagatattgtctatgtgcgaattgatcgtactagaaagctaccaattacggtgctgctcagagcgttagggtttgggtctgatcaagaaatcatagatctcctaggtgaagatgagtatcttcgcaataccctggaaaaagacaacacggacggcacagaaaaagcgcttctagaaatctacgaacgcttacgtcctggcgagcctccgactgtcgacaacgccaaaagcttacttgattcccgcttttttgatccaaagcgctatgatcttgcaaacgtaggacgttacaagattaacaagaagcttcacattaaaaatcgtctatttaatcaacgtcttgcagagacacttgttgatcctgaaacaggcgaagtgattgcagaagaaggtgcgattcttgatcgtcgcttacttgacagaattcttcctgcccttgagacaaacgtcggtttcaaagatgttgagcctcatggtggcgtgattgaagatgagtcaatcggtctgcaatcaattaaagtttatgctcctgatgatcctgaaggagaaagagttattaatgtaatcgggaatggtggagttgaaacaggcgtgaaaaacatcacacctggcgatatcatttcttctattaactacttctttaaccttctacatcaagtaggaaacacagatgacattgaccatcttggtaaccgtcgtctgcgttctgtgggtgaacttcttcagaaccaattccgaatcggtttatcccgtatggaacgtgttgttcgtgaacgtatgtcaattcaggatacgaacgttatcacgccacaggcgttaattaacattcgtcctgttattgcatcgattaaagaattctttggtagttcacaactatcccagttcatggaccagactaacccgctagctgagctaactcacaagcgtcgtttatctgctcttggaccaggtggtttaacacgtgagcgtgcagggttcgaagttcgtgacgtacactattcccactatggcagaatgtgtccgatcgaaacgccggagggaccaaacattggacttattaactcgttgtcatcttatgcaagagttaataaatttggctttattgagacgccttatcgcagagtagaccctgaaacaggtaaagtgacggagtatattgactacctaactgccgatgaacaggataactacgttgtggcacaggctaacgcaaagctccacgaggatggttcattccaggacgaagatatcgttgctcgtttccgtgacgagaacattatcatcgcccgtgaaaagattgattacatggacgtatcaccgaaacaggtagtttcggccgcgacggcttgtattccgttccttgagaacgatgactccaaccgcgcgcttatgggtgcgaacatgcagcgtcaagctgtaccattgatggttcctgaagcaccaattgtcggaacaggtatggagcatgttaacggaaaagattccggtgctgctgttatttgtaaacatgacggtttagtcgagtttgcatctgctgcagagattcatgtccgtcgtatttctgtcattgatggccaggaagttaaaggtgatcttgaccgctacaaattgcttaaatttattcgttccaaccagggaacgtgctataaccaaaagccaattgtttcagaaggcgatcgcgtagttaaaggtgaaatccttggcgacggcccttcaatggaaaaaggtgaaatggccctcggacgtaacgttctagtcggtttcatgacttgggaaggttacaactacgaggatgctattattatgagcgaacgtctcgtaaaagatgatgtttatacgtcaatccatatcgaagagtatgaatcagaagctcgcgatacaaagcttggacctgaagagatcactcgtgacattccgaacgttggggaagacgcgctgcgtaaccttgatgaacgcggaattattcgcatgggtgctgaagtaaaagacggagatatccttgtcggtaaagtgacgccaaaaggtgtaactgagctaactgcggaagagcgtctccttcatgctatctttggtgaaaaagctcgtgaagttcgtgatacatctctccgtgtaccgcatggtggagatggaattgtacttgacgtgaagatctttaaccgtgaagacggcgatgagcttccaccgggagtaaatcagcttgttcgtgtttatatcgtacagaagcgtaagattcatgaaggagataaaatggcgggtcgccatggtaacaaaggtgttatttcaaggattcttcctgaagaagatatgccttacctaccagacggcacaccaatcgatatcatgttgaacccactaggtgttccttcacgtatgaacattggacaggtactagagttgcacatcggtatggcagcacgtgcactcggtattcacgtagcaacaccagtatttgatggagcacgtgaggaagatgtatgggaaacgttagaagaagcaggtatgccacgtgatggtaagactgttctctacgatggtcgtacaggtgaaccatttgacaaccgtatttctgtcggtgtcatgtatatgatcaaacttgctcacatggtcgatgacaagcttcacgcacgttctactggaccatattcacttgttacacagcaaccgcttggtggtaaagcacaattcggtggacagcgtttcggtgagatggaagtatgggcactcgaagcatatggtgctgcatacacccttcaagagattttgactgtaaagtcggatgatgttgttggacgtgttaaaacttacgaagcaatcgtaaaaggcgaaaatgttcctgagcctggtattccagaatcgtttaaagttctaatcaaagaactgcaatcacttggtatggatgtcaaaatgctagcaagtgatgagcaagagattgagatgaaagagttagacgatgaagaagaccaatccagtgagaaattaaacttgaatgttgggtcaaatcaggcgagtgagtaagggttaaacctgaattctaaagggaggtaggccccttgatagatgtcaataaatttgagtatatgaaaatcggtctggcgtcaccggataaaatccgctcttggtcaagaggagaagttaagaagccagaaaccattaactaccgtaccttgaagccagagaaagatggacttttctgtgagcgtatcttcggacccacaaaagactgggaatgtcattgtgggaagtacaagcgcatccgttataaaggcgtcgtttgtgatcgctgcggagttgaagtaacacgtgcgaaagtccgtcgtgagagaatggggcacattgagctagctgctcctgtctctcacatctggtactttaaaggcattccaagtcgtatgggacttgttctcgacatgtcgccacgtgcacttgaagaagtcatttactttgcttcttacgttgtaactgaagctggtgacacaccgcttgagaagaaacaacttctttctgagaaagaataccgcgcataccgtgaaaagtatggcaaaacattctctgcagaaatgggtgcggaagcaatccgcagacttctatttgatatcgatcttgacaaagaggtagatattcttaaagaagagcttaaaacagcacaaggccaacgcagaacgcgtgcaatcaagcgcctagaagtacttgaggctttccgtggctcaggaaataacccttcatggatgatcttagatgtccttccggttattccaccagagcttcgtccgatggtacaactagacggtggacgctttgcaacttcagatctaaacgatctgtatcgtcgcgtcattaaccgtaataatcgtttgaagcgtttgttggatcttggagcacctagcattatcgttcagaatgagaagcgtatgcttcaagaagctgtcgatgcccttattgataacggccgtcgcggtcgtcctgtaacgggtcctggtaaccgtccattgaaatctctttcacacatgttgaaagggaagcaaggtcgtttccgtcagaacctattaggtaagcgtgttgactattcaggtcgttccgttatcgttgttggacctcacttgaaaatgtatcagtgtggacttccgaaagaaatggcacttgaactattcaaacctttcgtaatgaaagagcttgtatcaaaaggtcttgcacacaatattaagagtgcgaaacgcaaagtagaaaaagttcaccctgaagtttgggacgtattggaaaacgttattaaagaacatccagttcttttaaaccgtgcaccgacgcttcacagacttggtattcaggcgtttgagccaattcttgtagaaggacgcgcgattcgtcttcacccactcgtatgtacagcttataacgctgactttgatggtgaccaaatggccgttcacgttccgctttctgctgaagcacaagctgaagcacgcatcttgatgcttgctgcacaaaacatccttaacccgaaagatggtaaaccagttgttacaccatcacaggatatggttctaggtaactactacctaacgatggaacgtgaaggagcaattggtgaaggctctgtttataaagatactaacgaagcgttgattgcttaccagaatggatttgcacatcttcattctcgcgtagcgatccctgctgcatcattaaataaatctgcgtttactgaagagcagaacaagcaattgcttgtgacaacggtaggtaagttgattttcaacgaaattctgcctgagtcattcccatatattaatgaaccgacgacaaataaccttgaaattgcaacaccagagcattacttccttcctcacggagtgaacgtaaaagaagaaattgctcagcgcgaactgatcgcaccatttaagaaaggtattcttggtaagatcatcgccgaggtgttcaagcgttttaaagtgacagaaacgtctcgcatgcttgaccgcatgaaagatcttggcttcaagttttcaactaaagccggtattaccgttggtgtggctgacgtagtggtacttgctgagaagcaagaaattgttcaagaagcagaagagaaagtagaaaaagttcttaagcaattccgtcgcggtcttattaccgacgacgagcgttatgatcgtgttattgcgatttggagtagtgcgaaggatcgtatccaggaaaaactaatgaatcgtctcgaaaaagataacccaatctttatgatgagtgattctggtgcccgtggtaacgcatctaactttacccagctcgcaggtatgcgtggattgatggctaacccatctggacagatcattgaacttccaatcaaatccagcttccgtgaaggtctaacggtacttgagtactttatttcaactcacggtgcacgtaaaggtcttgccgatacggcacttaaaacagctgactcaggttaccttactcgtcgccttgttgacgtggcacaagatgtcatcgtacgtgaagacgattgtggtacggaccgtggccttgaagttagtgccattaaaaatggcaatgaattaatcgaaggattatatgaccgacttgttggccgtgttgcctttaagaaagttagacatcctcagacaaatgaagttcttgttgagaaaaataacctaattacagaagacatcgctactgaaatcgtagaatcaggtattgaaaatgtttatatccgctctgccttcacatgtagcacaagtcatggcgtatgtaagaagtgttatggacgtaaccttgcaacgggtactcgtgttgaagttggggaggcagtcggaatcatcgctgctcaatcaattggtgagccgggtacacagttgacaatgcgtacattccacacaggtggggttgccggagacgatattactcaaggtcttccacgtatccaagagttatttgaagcacgtaacccgaaaggtcaggccgtagtctctgagctagacggaaaagtgattgatttagctgaggttaaagagaagaaagagattgtcgttcaaggtgaaactgaaacaagaaactaccctgtaccatatggcgcacgtctgaaaattgttgtcggagatgaagtgaaggctggtcaacctcttacagaaggttcgattgaccctaaacaactcttaacaattagcggtattgatggagtgcaagagtatcttctagctgaggtacaaaaggtataccgtatgcagggtgttgaaattggtgataagcacgttgaagtaatggttcgtcagatgatgcgtaagattcgcgttattgatgcgggcgatactgaagtgttgccaggatcccttatcgacattcaccagtttaaaggtgttaaccgtaaagttcttagacaaggcggtttacctgcaacgggtcgaccagttcttcttggtattactaaagcatctcttgaaaccgaatcattcttatccgctgcatccttccaggaaacgactcgtgtcctaactgatgctgcgataaaaggtaagcgcgatgagctacttggtcttaaggaaaatgttattatcggtaaacttgttccggcaggtactggtatgcaacgttaccgtagaatcaacgtagcaggcgaagctcaagaggctgaacagcttttagaacaagaagaaactgcattagttagtcaagaataaacaggggaagtgttgacatcgggagtgcagggtgatattatatccaaggtgctcccgataatcctgttactttggaggatatgttcgtgtcttatgaaaaagtatcacaggcagatgaattaattattgggacgaaacaaactctaaaggccctccagattggagaagcgaaggaagttttcattgctgacgacgctgatcgcagggtaacttctaaagttgttgcactcgccgaagagaaaagcatacctgttcatcgagttgattctatgaagaaacttggtaaggcatgcgggatcgaagtcggcgccgcaacagttacgataaaagcataaccgtttttgccgggcgaggcatgccctgccaggcaaaaactttccttttatctatacatgaaccacctggatgtgtgggcttgctattaacaaaagaagggaggaaaacaaaatgccaactattaaccaacttgttcgtaaaggacgcgtttctaaaacaaagaaatccgattctccagcattgaacaaagggtataacagcttcaaaaagtctcatacagacctttcatctccacaaaaacgtggtgtatgtactcgtgtaggtacgatgactcctaagaagccgaactccgcattgcgtaaatacgcacgtgttcgtcttactaacggaattgaagtaacagcttatatccctggtatcggacacaaccttcaggagcacagtgtcgtgcttatccgtggaggacgtgttaaggatttaccgggtgtacgttaccacatcgttcgtggtgcgcttgacactgcaggtgttaacgatcgtagacaaggtcgttctaaatacggtactaagagaccgaaagaagctaagaaataatagctatcattttattaaataatgaaagggggttaacccatgccacgtaaaggtccagtagaacgtcgtgacgtattaccagatccaatttacaaatccaagctagttactcgcctgatcaaccgccttatggtagacggtcagaaaggtaaagctcagcaggtgctatacaaagcattcgatcttatccaagaacgcacaaacacagaggctatggaagtatttgaccaggcgttgaaaaacgttatgccagtacttgaagtacgcgctcgtcgtgttggtggtgcaaactaccaggtgccggttgaagttcgtccagaacgtcgtacaactctaggtcttcgttaccttgtgaactattcccgtcttcgcggtgaaaagactatggtagaaagacttgctaacgaaattatggatgcagctaacaacacaggtgcttctgttaagaagcgtgaagaacagcacaaaatggctgaagcaaacaaagcgtttgctcactatcgctggtaatcagcacacaacccaaatccctttataaaaggaaggagaaatactaatggcaagagaattctccttaagagatacacgtaatatcggtatcatggctcacatcgatgctggtaaaacaacaactactgagcgtattcttttctactcagggcgtatccacaaaattggtgaaactcacgaaggtggatcacagatggactggatggagcaggagcaagagcgtggaatcacgattacttctgctgctaccactgcccagtggaaagatcaccgtgttaacatcattgacacgcctggtcacgtagacttcacagtagaagttgaacgttcattgcgtgtattggatggagcagttgcagtacttgatgcacaatctggtgttgaaccacaaacagaaactgtttggcgtcaagctactaactacggcgtacctcgtattgtattcattaacaaaatggataaactaggagcagacttcctttactctacaggtacactaaatgagcgtctacaagctaacgcgcaccctgttcagctcccaattggcgctgaagatgaattcgaaggaatcattgatctcatcacaatggaagctttctattatcttgatgatcttggttcacgtactgaatcacgcgaaattcctgctgaatacaaggaacaagctgaagagtaccgtacgaagcttatcgaggctgtcgctgagcttgaagaagacctcatgatgaaatatcttgaaggtgaagagctaacagttgaagaaatcaaagctgcaatccgtaaaggaacttgtaacgttgaattctatcctgtactttgtggttctgcatttaagaacaaaggcgttcagcttgttcttgatgctgtacttgacttcctaccttcaccacttgatgttcctgcaattaaaggtcatctaaaagattctgaagaagaagtaattcgtactgctgacgataatggtcctttctctgcacttgcatttaaagtaatgactgatccttacgttggtaagcttacattcttccgcgtttactcaggaacgctttcttccggttcttatgttaagaactcgacaaaggacaagcgtgaacgtgtaggtcgtattcttcagatgcacgctaactctcgtgaagaaatctctactgtatatgcaggggatattgcagcggcagttggtttgaaagatacttctactggtgatactctatgtgatgaaaaggatacagttatccttgaatctatggacttcccagatccagttatttcagtagcaatcgagccgaagactaagagtgaccaggataaaatgtctgtagctctagctaagcttgctgaagaggatccaactttcaaaactgaaacaaacgaagaaactggacaaacgattatttctggaatgggtgaacttcaccttgatatcatcgttgaccgtttacgtcgtgagtttaaagttgaagcaacggttggtgcacctcaggttgcataccgcgaatcaatccgtaaagctggtaaggttgaaggtaaattcgtacgtcaatccggtggtcgtggacaattcggacacgtatgggttgaatttgaacctaacgaagaaggcgcaggatttgagtttgaaaacaaaattgtcggtggtgttgttcctcgtgaatacatccctgcagttgaagcgggtcttcgcgattcaatggccaatggtctccttgcaggctacccactaatcgacgtaaaagctcgtcttgttgatggttcttaccatgacgttgactccaacgaaatggcatttaagatcgcagcatctatggctttgaaaaaagctaaaactgtctgtgacccagctcttcttgagcctatgatgaaagttgaagttgtagtgccagaagaatatatgggagacatcatgggcgacgtaactagccgtcgtggacgtgtggaaggtatgactgcacgcggaaacgctcaagttatcaacgcattcgttccattatcagaaatgtttggttatgcaacaacacttcgttctcgtacgcaaggtcgtggtacttacacgatgactttcgatcattacgagcaagtgcctaaatcaatttctgaagaaatcattaaaaaagctacaggcgaataattgtagcaaaccaacttttgttgtaatctaagataggcgagattgatttattcatacgcctatcttggcatagataatttcttggtaatcaaaggaggaaacactaatgtctaaagaaaaattcgaccgctccaagccccacgttaacattggtacagttggacacgttgaccatggtaaaaccactctaacagctgcgatcacttcagtgcttcacaagcgttctggtagcggtactgctatggcttacgaccaaatcgatggtgctcctgaagagcgcgaacgtggaatcacaatctcaactgcacacgttgagtacgaaactgaaaaccgtcactatgcacacgttgactgcccaggtcacgctgactatgttaaaaacatgatcactggtgctgcacaaatggacggaggaatcctagtagtttctgctgctgacggtccaatgccacaaactcgtgagcacatccttctttctcgtcaagttggtgtacctactcttgttgtattcttgaacaagtgtgacatggttgacgacgaagaactacttgaactagttgaaatggaagttcgtgatcttctttctgagtacgacttcgatggcgacgatgttcctgtaatcaaaggttctgcacttaaagctctagaaggcgacgctgactacgaagctaaaatcttcgaacttatggatgcagttgatgagtatatcccaactccaacacgtgacactgacaaaccattcatgatgccagttgaggacgtattctcaatcactggtcgtggtactgtagcaacaggccgtgttgagcgtggacaaatcaaagttggtgacgaagttgaaattcttggtcttgctgaagagaacaagaagacaacagttactggtgttgaaatgttccgtaagcttcttgattatgctgaagctggtgacaacattggtgcgcttcttcgtggtgtatcccgcgacgacattcagcgtggacaagttcttgttaagccaggaactgtaaaagctcacactaagttccaagctgaagtttacgttctttctaaagaagagggtggacgtcacactccattcttcgctaactaccgtcctcagttctacttccgtacaactgacgtaactggtacaattgcacttccagaaggcgttgaaatggttatgcctggagacaacatcgaaatgacagttgaacttatcgctccaatcgctatcgaagatggaactaagttctctatccgtgaaggtggacgtactgtaggcgcaggcgttgtagcaacaatcactgagtaatctctatgattaaccaaaacacccggatttttccgggtgttttttattttgaatttatgttagattatacaaatgggttcgatacagttcgatcgaaacttcttaaggattttctaatagtctgaaattgcttttaggccttgcattttatgactcaagccgttatactattaaaagtgtgcgatcgacatactttttagttggactaagccttgcaaataggctttaggtttagtataataagaatgttggtcataaacagcgatgatgtggaaggttgctgacacacccggcccctttgccatggcgagtgtgttgggtttattttcacggagaactgtctataacaatatgggcgataaaggaggggaaataatggcaaagcaaaagattcgtattcgtttaaaagcatatgatcaccgtattctagatcagtctgctgagaaaattgtagaaacagcaaaacgttcaggtgcacaagtatccggaccgatcccgttgccgacggaaaaatctgtttacacaattctacgtgctgtacacaagtacaaagattctcgtgagcagtttgaaatgcgtacgcataagcgtctaattgacatcatcgagcctacaccacaaacggttgactcgttaatgcgtttggacctaccgtctggcgttgacattgaaattaaactttaatataacgctaaataaattatttaaaaacaattaggaggtgtgacgaatgaccaaaggaatcttaggaagaaaagtaggcatgacacaagtctttgctgacaacggagatattatcccggtaactgtaattgaagcagaaccaaacgttgtccttcaaaagaaagttgttgatacagacggctatgaagcaatccaagttggttttgctgataagaagaagtctcgcttcaacaagcctgaggaaggccatgctacaaaagctagcacaacacctaagcgcttcgtgaaagaaattcgtaacgcagaaggtagttacgaaattggtcaggaagtcaaggttgatatctttaacgaaggtgacgtagttgatgtcactggtacgtctaaagggaaaggtttccaaggtgcaatcaagcgccataaccaatctcgcggaccaatgactcacggttctcgttatcaccgtcgtccaggttcaatgggacctatcgatccaatgcgtgttatgaaaggtaaacttctacctggtcgcatgggtggcgaacgtgtaactgtacaaaaccttgagatcgttaaagttgatgtagaacgtaacgtgattctagtaaaaggcaatgtacctggagctaagaagagctacgtaactatccaaagcgcggttaaagcaaaagaagctaagtaagaagggaggatatccaagtgcctaaagtaacaatgttcaaccaaaccggagcacaagtcggcgacatcgaactcgctgaagcaatcttcgggatcgaaccaaacgaaagtgttatgtatgatgcggttatcatgcagcaagcatctttgcgtcaaggtaaccatgacgtgaaaaatcgttcagaagtacgcggtggtggagctaaaccatggcgccaaaaaggaacaggtcgtgctcgtcagggctcaatccgttcaccacaatgggttggcggtggagtagtatttggtccgacaccaagaagctattcttacaagctacctaaaaaagttcgccgtttggcaatccgttctgctttgtcttctaaagtacaaacagaggatatggtcatcgtggacagcatttcttttgatgctccaaaaacaaaggaaatgaaatcagtattatcaagcctatctgcagagaaaaaggcgcttatcgttacaggagactataacgaagcagttgcattatctgcacgcaatattcctggtgttactgttgtaactacagctggacttaacatccttgatgtccttaaagctgacaaactagttatgacaaaagacgctgtggaaaaagtagaggaggtgctagcgtaatgaacgctcgtgatatcatcaagcgccccgttattactgaagctactacagacgtaatggcagacaaaaagtatactttcgaagtagatactcgtgctaacaaaactcaaatcaagagtgctcttgaagaaattttcggagttaaagttgctggagtaaatactcagaactatatgggtaaaaagaaacgtgttggccgccacagcggatttacaccacgtcgcaaaaaagctatcgtgacgcttacaccagaaagcaaagaattggacttctttgaaggcgtctaaaaaataatagtgaaggagggaaataagaatggcgattaaaaagtataaaccgaccacaaacggtcgtcgtggtatgtcagtatctgactttgctgaaatcactactgaccaaccggaaaaatcgttgcttgcaccgcttcataaaaaaggcggacgtaacaaccaaggtcgcttaactgttcgtcaccaaggtggcggtcataagcgtaaataccgtgttatcgactttaaacgagacaaagatggaataccaggacgcgttgctacgatcgagtacgatccaaaccgttctgcaaacatcgctcttatcaactatgctgatggagagaagcgttacattcttgctccaaaaggacttaaagtaggaactgaaattatgtctggcgttgatgctgacattaaagtaggaaacactcttccactaatcaacattccagttggtacaacaattcataacattgaacttaagccaggccgtggcggacagcttgttcgttctgctggtgcagaagctcagcttcttggtaaagaaggtagatacgtactagtacgtcttcgttctggagaaactcgtatgattctttctacttgccgcgctactatcggtcaggttggaaaccttgaacacgagcttatcaacattggtaaagctggtcgttctcgctggttgggcattcgtcctacagtacgtggttctgtaatgaaccctgttgatcacccacacggtggtggtgaaggtcgtgcaccgatcggacgtaaatcaccaatgtcaccttggggcaaaccaacccttggatttaagactcgtaagaaaaacaaagactccgacaagtacatcgtacgacgtcgcaaaaaataacgggatttacctacggttccgcggagccgtagcataatctcaaaagggaggttcacaaatgggtcgtagtttgaaaaaaggaccttttgtcgacgatcatttaatgaaaaaggtcgaagacttaaatgaaaagagcgacaaaaaagttatcaaaacttggtctcgtcgttcaacagtattcccagaatttattggacacacttttgcagtatatgatggacgcaagcacgtaccggtttatgttacagaagacatggtcggccacaagcttggtgaatttgctccaactcgcacatatcgcgggcatgctgcagatgacaaaaaaactagacgttaatttgaggggaggtacaacgaatgcaagctaaagctgttgcaaaacacgtgcgtattgctcctcgtaaagcacgcttagtcgtagatctcattcgaggaaagcaagtcggtgaagctattgcgattttgcgcaacacaaacaaagctgcttctccagtagttgagaaagtgcttaactctgcgatcgctaatgcagagcacaatcttgagttagaaccgaacaatcttacggtttctcaagtgtttgtggacgaaggagtaacaatgaaacgtttccgcccacgtgctatgggtagagctagccgcatcaacaagcgcactagccacatcacagtcgtggtatcagaaaagaaggagggataacgagtgggtcagaaaattaatccggtaggacttcgaattggtgtcattcgtgattgggagtctaaatggtacgcagacaaagattacgctaaccttttacacgaagatattaaaattcgtgaatatattgaaaaacgtttgaaagatgcatctgtttcagctgttgaaatcgaacgtgcagcaaaccgagtgaatgtaacagtgaaaactgctaagcctggtatggtaatcggtaaaggtggttctgaagttgagtctcttcgtaagtctctcgcggaactaacaggtaagaaagttcacgttaacattttcgaaatcaaacaagctgacatcgacgcaactctagttgctgataacatcgctcgtcaacttgaaaaccgagtttcattccgtcgcgctatgaagcaaacaattcaacgcgctatgagatctggagctaaaggtattaaaacgcaagtatctggccgtctaaacggtgctgatattgctcgttctgaatcatacagtgaaggtactgtacctcttcacacacttcgtgctgacatcgattatggtactgcagaagcagatactacttacggtaagcttggtgtgaagatttggatctatcgtggtgaagtccttccaacgaaaggaacgcaaaaagaggaagggggaaaataaatcatgttgttacctaaacgtgttaaataccgcagagaacatcgcggaaaaatgcgcggacgtgctaaaggtggcactgaagtagcattcggcgaatacggtctacaagctcttgaagctagctggatcactaaccgtcaaatcgaggcagctcgtattgctatgactcgttacatgaaacgtggcggtaaagtttggattaaaattttcccatcaaagccttacactgctaaaccacttgaagtacgaatgggttccggtaaaggtgctcctgaaggctgggtagctgtagtaaagccagggaaaatctgttttgaaattgcaggcgtatctgaagaagtagcgcgcgaagcacttcgccttgcttctcacaaattgcctattaaaactaagttcgtaaaacgcgaagaagtgggtggtgacacaaatgaaagctgaggaaattcgtaacttgaccactgccgaaatcgagcagaaagcgaaatcgtttaaagaagaacttttcaatcttcgctttcaacttgctacaggtcaactggaaaacccagcccgcattcgtgaagtccgtaaatcaatcgctcgcgcaaacactgttttgcgtgaaagagagttaggaatcacaaacggttaatatgaggggaggtttgcgaaatgagcgaacgcaataatcgcaaagaatacactgggcgtgttgtctctgacaaaatggataagacaattactgttttagttgagacttacaaaatgcaccctttatacggtaaacgtgttaagtattctaaaaagctaaaagcacatgacgaaaacaacactgcaaaaatcaacgacgtggtaactattatggaaactcgtccactttctaaagataagcgtttccgtcttatggaagtagttgtagaagcagttattatctaaatgaactcggatcattgaataatgtccgaagggaggtctttctagatgattcaacaggaatctcgtttgaaatcagctgacaactctggtgctcgtgaattgctttgtattaaagtacttggtggctctggtcgcaaaacagctaacatcggtgacgtaattgtttgttcggtgaaacaagcaacacctggtggcgttgttaagaagggtgaagtcgtaagagctgttattgtacgcagtaagtctggcgttcgtcgtcaagatggttcatacatcaaatttgacgaaaacgcagcggttgttatccgtgatgacaaaggaccgcgcggaacacgtattttcggaccagttgcacgcgaactacgcgacaaccagtttatgaaaatcgtttctctagctccagaagttctttaatcatttgaaaatagatgccttgtaaggaggtgcgcgaccttatgcacgtaaaaaagggagataaagtaaaagttatttctggtaaggataaaggtaaacaaggtgtgatccttgaagcttacccgaaaaaagatagagttatcgttgaaggtgtaaaccttgttaagaaacactcaaaaccatcccaggctaatcctcaaggtggaattattgagcaggaagcagcgattcacgtttctaacgtaatggcgcttgatccgaagtctggtgaacctactcgcgttggatacaaagtagacaacgggaaaaaagttcgtatctcaaaaaaatccggtgaagtactcgataagtagttcgtagcgaaaggaggtcaatccgatgaatcgtttccaagaaaagtatcaaaatgaaactaaacctgcattgatggagaaatttaattattcctctgttatggaagttccaaaacttgataaaatcgtaatcaacatgggtgttggtgacgctgtacagaacccgaaagctcttgatacagctgttgaggaacttgagttgatctcaggtcaaaaaccactaatcacacgtgctaagaagtctatcgcaggctttaagcttcgtgaagatatgccaatcggtgcaaaagttactttgcgcggcactcgtatgtttgaattcctagacaaactaatttctgtatcacttccacgtgtacgtgacttcagaggtgtgtctaagaaatcattcgacggccgtggtaactacacacttggtattaaagaacagttgattttccctgaaattgattacgataaagtaaataaagtacgcggaatggacatcgttatcgtaacaacagctaatacggacgaagagagccgtgaaatgttgactaacctaggtatgccatttcaaaagtaagtaaggagggaaaattgtggcgaaaaaatcaatgatcgcgaaacaacagcgtgaagctaagtttaaagttcaagaatatactcgttgtgaacgttgcggacgtcctcattcagttattcgtaaatttaaactatgccgtatttgtttccgggaacttgcacacaaaggtcaaatcccaggcgttaaaaaggctagctggtaaacccgaaatagggaaggaggtaattactaatggtcatgactgatccaattgcagatatgcttacaagaattcgtaatgcgaacacagttcgccacgaaaaactagagttgcctgcatcgaattcgaaaagaaacatcgctgaaatcctcaaacgtgaaggttttgtacgtgatgttgaaatgatcgaagacaacaaacaaggaatcatccgtatcttcttaaagtacggttcaaataacgaacgcgttatcactggattaaagcgaatcagtaaacctggtcttcgcgtatacgctaaagcagacgaagtacctcgcgtacttggcggcttaggaatcgctcttgtttctacttctaaaggaattatgacggacaaagaagctcgtcaacagcaagtaggcggagaagttctagcgtacgtttggtaattcttaaagcagaatggaggtgtcaatatgtcacgtgtcggacttaaaccgattgaaatcccaagtgatgtaacaatcgatatcaaaggagacgttgtaacgatcaaaggacctaaaggggaactttctcgtacatttagcccagatatcaaagtaaacattgaagagaacgtgctaacagtagctcgtccttctgatcataaagagcaccgtgcacttcacggaacaactcgcagcctgatcgctaacatggttgaaggtgtgactaaaggctttgaaaaaggtcttgaaatcatcggtgttggttaccgtgcaagtaaatctggtcaaaaattaatccttaacgtagggtactctcacccagttgagatggtacctgaagaaggcattgaaattgaagtaccttctaacacaaaagttgttgttaaaggtatcgataaagaacgtgttggagctgttgcagcaaacatccgttcagtacgtactccagaaccttacaaaggcaaaggaattcgttacgaaggcgaatatgtacgtcgtaaagaaggtaaaacaggtaaataggtaaaaacctagcggaaaggagtgacgtttaatgatcactaaggccgataaaaacaaagcgcgtcaaaaaagacacgctcgcgtacgccgcacagttaccggcactactgaacgtccgcgtctaaacgtattccgttctaacaagaacatctatgctcagcttatcgatgacactaaaggtgttacaatcgttggagcttcaagtatggaacaaggaattgacgttgaacacggcggtaacacagaagcagctgtgaaagtcggagaagctatcgcaaagcgtgctgttgaagcaggttattcagaagtggttttcgaccgcggaggatacctctatcacggacgtgtaaaagctcttgcagacgcagcgcgtgaagcaggactgaaattttaataaaaaggaggttaactcatgcctagcattgatgctaacaaactagaacttgaagaacgcgtagttaccgttaaccgcgtagcgaaagttgttaaaggtggacgtcgtttccgcttcgcagctatcgtagttgtcggagataaaaacggtcacgttggattcggaactggtaaagcacaggaagttcctgaagctattcgcaaagctattgaagatgcgaaaaagaacttaattactgttcctgttgtaggaactacaatccctcaccaaatcacaggtcatttcggagctggtaatgtactattgaagcctgcttctgaaggtactggagttatcgctggcggacccgttcgtgcggtacttgaacttgctggtgtaggtgacattctatcgaagtctcttggatctaacaatccgattaacatggtgcgtgcaactcttaatggccttgaaaaccttaagcgcgctgaagacgttgcgaagcttcgtggaaaatctgtagaagagctactaggttaagggagggaaaatagatggctaagcaattagaaatcaccctcacacgtagtgtgattggtcgccctcaagaccaacgcgtgacggtaaaaacacttggacttaagaaaatgcatcacacggttgttcataacgacaatcctgcgattcgcggtatgatcaacaaggtatctcaccttgtaactgttaacgaaattgatgcataaaaaatctatacattgaggaggtgcccacaatgaaactacacgaactaaaaccatctgaaggttctcgtaaagaacgcaacagacttggtcgcggtattgctactggtaacggtaagacatctggccgtggtcaaaaaggtcaaaaagctcgttctggcggcggtgtacgcgtcggtttcgaaggaggacaacttccaatcttcaaacgtctaccgaaacgtggatttacaaacatgaaccgtaaagagttcgcgattgttaatcttgattcgttgaaccgttttgaagatggaactgaagtttctccagaacttctattagaatctggcgtagttagcaaagaaaaagctggaattaagattctaggtaatggtaagcttgagaaaaagcttaccgtgaaagcccacaagttctctgcttctgcaaaagaggcgattgaagcggcaggcggaaatactgaggtgatctaatgttccaagcaatctccaacattatgcgcgtaggtgatattagaaacaaaattatcttcaccctactcatgcttgtcgtgttccgaatcggaacattcataccggttcctggtgtgaacagagatgtattacaattccaagatcaaatgagtctcttcggagttctcaacacctttggcggtggagcgttgcaaaacttctccatctttgccatgggaattatgccttatatcactgcttctatcattgtgcagcttttacaaatggacgttgttccgaagtttaccgaatggtctaaacaaggtgaagccggacgtaaaaagctaacacaagttactcgttatggaacgattgtgcttggacttgttcagggtattggtctttccatcgggtttaacaatattgttggtggtcagttgattagtaatcccggtgtactaacgtatctaaatatttctctagttttaacagccggaacggcttttttgatgtggttaggcgaacagatcacagcaaaaggtgttggaaatggaatctcaataataatctttgctgggattgtagctgcaattcctccagggcttaatcagctttacgctcagatgtttgagggttctcaggatgagttgttcattaacatcgtcactcttgcaattattgcacttgcagcacttgcaattgttgtcgctgttatctttgttcaacaaggtcttcgcaaaattccaattcaatatgcaaaacgaactgttaaccgcagacaagtaggtggtcaatccactcacttaccgattaaagttaatgcagcaggtgttattccagttatctttgcgatatcactgatcattactccaccaacgatcgccaggttgttcggagataatacggtaacggaatggatcatcagggtgtttgactatacacaacctattggtatggtcgtgtatgcgttactcatcattggatttacgtatttctatacgttcgtccaggttaatccggagaagatggctgagaatctgaagaaacagggtggatacattcctggtattcgtccgggtaatgcaacggaaacgtacattactcgtattctctaccgtttaacgtttgtaggagcacttttccttgctgttatatcgattattccggtatttttcacaaccgtagcaggactgccgcagacgctgcaaatcggcggaacaagcttgctgatcgttgttggggtagcgcttgatacgatgaagcaaattgaaagtcaattaattaaacgtcattataaaggctttattaaatcttgaggataaattgggaagaactttcttcccctccttcatcctcgattgggtgacgtgcggagggattagatgaatctagtattaatggggcttccgggtgtcggaaaaggaacccaggcagaaaagattgtcgaaaagtatggcatccctcatatctctactggagatatgttccgagcagcgatcaaagaaggaacgcctcttggtctaaaagcgaaagagtacatggattctggaaacctcgtacctgacgaagtaacaatcggtatagtacgggagcgtttaggaaaagatgattgcgaaaaaggttttctactcgatggatttccaagaactgtcgcacaggctgatgcacttgaaacgatcttatccgatctcggaaaaaaacttaactatgttattaacatttcagttgaggaagatcagctcatgcagcgtttgactggacgtcgcgtttgccgaaattgtggagcaacctatcacgcagtattcaatcctcctaaggaagaaggagtttgtgataagtgcggtggagaactttatcaacgtgatgatgataaagaagaaactgtacgcactcgcctcgaagtcaacaagcagcaacagcagccattgttgaccttttatgaaggcaaaggctatcttaaaacgattgatggcaatagagacatcaacgaagtgtttgaagatgtcgatcaactcctcaaagggttgtcgtaatgattatttgcaagactcctcgtgaacttgatattatgcgagaagcaggcagaattgtcgcgttaacacatcaagaactacagaagcacatcaagcctggagttacgacaaaagagctggatacgattgccgatcggtttattcgtcagcttggtgcaattccttcctttaagggttacaatggatttactggaagtatatgcgcttcagttaatgaagagcttgtacatggtattccaggggatcgcgtgttggcggaaggagatataattagcattgatattggtgctaagtataacggttatcatggagattcagcatggacctatcctgttggcactatctcagaaaaagacgaacggttgttaaaagttaccgaggaatcgttatataaagggttggatgaggcgaaggctggtaggaggctttcagatatctctcatgcgatccaagcatatgccgaagctgagggtttttcgattgtacgagaatatgttggtcatggtgtaggtcaggaccttcatgaagatcctcaaattccccattacggtcctccaggaaaagggccgcggcttaagcaggggatggtccttgcggtagagccaatggtgaatatgggctctcgctacgttcgaacactttcggataattggactgtagtaacaactgacggtaagaactgcgctcatttcgagcacacaattgccgttacggaagaaggatatgaaatactaacaaaggcctaagtgaaggtgatggttcgtgaaagagtcggataccgttcccgagatcggtcagatcgctcggaataaacggggaagagacgctgatcaatatagcgtgattgtagggattgtagatgaacgttatgttttcttagcggacggggataaacgaaagtttgatcgtcctaagcggaagaacctcgcacaccttgagctggtagagtatatatcccctgaggtaaagcgaagtcttgaagaaacgggccgtgtcacaaatggcaagctacgtttcgcgatctcaaagtatttgagtgaacacgtcattgatttaaaggagggagagcaagtagatggctaaagaagaagtaattgaaatggaaggcacggttatcgaacctctaccgaatgcaatgtttcgagtagaactcgaaaacggtcataagattcttgctcacgtatccggaaagatacgcatgcattacattcgtattttaccaggtgacaaagtaactgttgagctttctccatacgacttatcacgtggacgtatcacgtatcgttataaataagaaattaatctccgaatacaaggagggttaaaataatgaaagtaagaccgtcagtaaaaccaatgtgtgaaaaatgtaaagttattcgccgtaaaggtaaagttatggttatctgtgaaaatccaaagcataagcaaaaacaaggctaatatataaggaggtgcaacgtaatggcacgtattgctggtattgatgttccacgcgaaaagcgcatcgtaatcgcgttaacttacgtttatggaatcggtaaaacaactgcgaaacaagttctagttgacgctggtgtttctgaagacactcgtgtacgcgacttaactgaagaagagctcggaaaaatccgtgaagtagtagacaaaattaaagttgagggtgatcttcgtcgtgaaatctcacttaacattaaacgtctaatcgaaatcggttcttatcgtggtatccgccaccgtcgtggtcttcctgtccgaggtcaacatacgaagaacaactctcgtactcgtaaaggccctcgccgtacagtagctaacaagaagaagtaagggaggtaattaacaaatggctaaacaacgtaaagcaaatacgcgcaaaaagcgcgtgaaaaagaatgttgagagtggagtagctcacatccgttctacttttaacaacactattattacgattactgacactcacggaaatgcgatttcttgggcaacttccggtaacatgggcttcaaaggttctcgtaagtcaactccattcgctgctcaaatggctgctgaaactgcaggtaaaactgcacaggagcatggcatgaaaactgtagaagtttctgttaaaggccctggagctggtcgtgaagctgctatccgtgcacttcaagctgtaggtctagaagttactgcgatccgtgacgtaactccagtacctcataacggctgccgtccaccaaaacgtcgtagagtctaaggtagtagagagttcaaaaacgtagatattccccttcgggagaatgcctggttttgaacaatctcttatggaaagattcaatctatcggtatacaattgatgaacatgtcaataatgataatgtataaattgttgacggttgacgaatcataattaggttgttggtattttgaccgcctaaggggattattcggttagacagcatgtctaaccgaagttcgacgttttgaaggagggtttgttggatgatcgaaatcgaaaagccaaaaattgaagcggtagctatcaacgaggatgctaaatacggaaagtttgttgtagaaccattagagcgtggttatggaactaccctgggtaattcccttcgtcgtatcctgttatcttcactacctggtgctgctgttacatctgtacaaattgaaggagtactccacgagttctctacgattgaaggcgtacatgaagatgtaacaactgtcattcttaatcttaagaaattggctatgaaagtttactctgaagaagagaaaacattagtagttgatgtgcaaggcccaggtacggtaacagctggagatattactcatgacagcgacgtggagatcttaaaccctgaccttcatattgctaccctttctgcaaatgcacgtttccaaatgcgagttactgcaattcgcggaagaggctatgtacaagcagaaggaaacaaaaatgatgaacagccaatcggtgtgattccggttgactcgatcttcactcctgtttctcgtgttaactaccaggttgaaaacactcgcgttggccaggtaactaattatgacaaactaacccttgatgtttggacagatggaagcattcgtcctgaagaagctgtttcgctaggtgcaaagattttaaatgagcatttaaacatttttgttggcttaacagatcaggcacaaaatgctgaaatcatggtcgaaaaagaagaggatcaaaaagagaaagtgcttgagatgactatcgaagagcttgatctctcagttcgttcatataactgcctgaagcgtgctggcattaatacggttcaagaactaactcaaaagtctgaagaagacatgatgaaagttcgtaaccttggacgtaaatcacttgaagaggtacaagagaagcttgaagagcttggacttggacttcgtaacgaagaatagatatttaagttgttgattttataaacaacaaaggagggaatacttcatggcataccaaaagttaggtcgtacgagtgatacgcgtaaagcgctattccgtgaccttgttacagatttgatcatcaatgaacgtattgaaacgacagaatcgaaggcgaaagagcttcgttctttcatcgacaaaatgattacgcttggtaaacgcggggatcttcacgcacgtcgtcaagcagcttctttcatccgtaacgaagtagcggatcaagaaagcggtcaagatgcagttcaaaagctattcagcgatatcgctcctcgttatgcagagcgtcaaggcggttactctcgtatccgtaaacttggaccacgccgcggtgacggtgctgaaatggttatcatcgagctagtataagacgcacttgattaaaagggcgggacaggatctcgacattggatactgattctatgcccttttttcgtgcgtttttttgtttaaacgcacatcctcaagtggttgcatgctgctagccattaaagaaagcctggcagatgccgggctttttttataggattaagcatttctagaggcgttgccacgatcaatatgctgataggaaaaagtggcggtttgctgcccgcctttttttcgcaccagtatcatgtgtctgaggcgatgaccgcttgaatttagcagaggtaggaggaacgagtatggaagaacttatcaccgttcaaggtgtatcctttcgatatcacgaagatcagccccacgtgttacgtgacgtgtctctctccgtttataagggtgaatggttagccattgtaggacacaatgggtcagggaagtctacccttgccaaactattaaacggtttgcaacttcctgagcaaggtgatgttctcgttgaagggtacaatagccgagatgaggaaagcatttgggagattagaagaagagttgggatcgtttttcagaacccagataatcagtttgtcggcacctccgttcgggatgatgttgcatttggacttgagaatagtgggatggctagagaactaatgttagagcgtatcagtgagagcgttcaaaaggtccgaatggaagattaccttgaccaggagccacatcgtctttctggtggacaaaagcagcgtgtggccattgctggtattattgcactaaggccttcgattgttattttagatgaggcgacatccatgcttgatccagctgggcgtaaagaagttttgcaaacgatgcgtaagttgaaagaagaagaaggcatgactgttatctcaattacccatgatcttgaagaagcggcacaggccgatcgccttgtggtaatgaatgcaggtgaagttattgacgagggacttcctgtggaagtttttaaaaaaggggacatgctcgagcaaatcggtttagatctaccgtttccactacaggtgcagcgagcacttagtgagaagggatacgatttctcaaggcttactttatctcaggaggaactggtgaacgagctatggacattacaatcaaagaattagagcattcgtacagtaaaggaacaccatttgaacgaaaagctctttcaaatattaatttatcgattccatcaggcacgtttcaaacgattattggtcatactggttcaggaaagtcaacgttaattcagcatttaaatggacttctaaaacctacacaaggaagtattcaaattggtgagtttttcatacaagctggcgtaaaagagaaacgtttgaaagcactgagaaaacatgtagggatcgtttttcaatatccagaacatcagctatttgaagaaaccattgaaaaagacattatttttgggccgcttaacttcggggtttcagaagaagaagcaaagaagcgagcagcaagactaattcatcaggtgggacttgatgaatcttatcttagtcgctctccctttgatttaagtggggggcaaatgagacgggttgccattgctggggtactagcgatgaaaccatccattcttatattggatgagccaaccgctggcctcgatcctcgaggtagacgtgaaattatggatctcttttatcgcctacatgaagaagaggggttaacgacgattcttgtaactcacagcatggaagatgcagcgcgtttttcagatgacattctgattatggaaaagggtggaatcgccctgcaaggtggcccggagactattttttcaaatcctgaagctttaaaaaaactaagccttgatgtcccagaaacggtacaattcattcatcgcctggaagaacgttttactaaaaatcttcctcacagtgtctttacacttgatgcagcggtagatgcagcgttatcgattttgcagaagggagaggaggattcctaatgcaaaatatcattattggacaatacgttccgggacaatcctttattcataaacttgatccgagagctaagcttttaactgcgtttctttttgtcattattgtatttttagcgaacaattggattacctatgcattgcttggtgcttttaccttactggcgatttttgtctctcagctacctcttcgctatatttataatggtctaaagcctatcttgctcgttatcatattaacgtttctccttcatgtgtttttaacaaaggaagggaccttgctgtttgattggggatttcttgaagtgtatgaaggtggagtgaagcaggggatttttatctcgcttcgtttattgtttttaattatgattacttctcttttaacactaactacgacaccaattgatattacggtagggattgaaacgttgcttggcccaatgaaaaaagtgggcttaccggttcatgaatttgcactaatgatgtcgattgcgcttaggttcattcctacacttcttgaagagacagagaaaatcatgaaagctcaatctgcacgtggtgcccaattctcaagcggtccgattaaagaacgtttgaaaagcatcgtgccacttcttgtaccactctttgttagtgcgtttaaacgagcagaagatcttgccatggcgatggaagcgagaggttaccgcggcggagaaggtagaacgagcatacgtttactaaaatggtctggaaaagatactactttattcgtgattcttctcctgctctgtattagtttactactgctaagaagttaggggagaatgtgtgatgcaacgtataaaaatgacgctctcttatgatgggacggcttttaatggttatcaggtgcagccaaatggacgcacagttcaggaggaactgcagcgtgccttaaagcaaatgcacaaaggtgaagccgtccaggttacggggtctggaagaacagacgcacgggtgcatgcttttggtcaggtgattcattttgatacgacactgtcgattcctcttgaaaattggacgaaagctttaaatgcgcagcttcctgatgacgtgagggttttacattcagaaaccgtatcaagtgattttcatgccagatatgacgttgttcgaaaaacctaccaatatcgggtgcacaatcgtgcagcgcttgatgtttttagaagaaactatgcggtgcatgagccacagacgcttgacctcatggagatgaagcgtgcagctgcttatcttagtggtgagcatgacttcacatctttttgtgccagtaagacagatgtaaagaataaagtaaggacgatctatcgaattgagattgagcaagtgcaagatgagcttgtttttacgttcgaagggagcggctttctatataatatggttcgcattctaatgggcactttgtttgagattggaaaaggccgccgttcagctgatgacattccgatgatccttgaagcaaaggaccgaaacaaggcaggaaaaacggctcctccccatggactctatttatggaaagtctcgtattcttaaaaaaggaaagaaagttctcaaacacttgacatttgtctcccaatattataagatattctttggtatttctacatccacttgccccggatttagaaatctgactgacaactgacaatgaatattctgtggtagttttaaaataaattggattgattttaggagggaaactcatgcgtacaacatttatggctaaaggccacgaagtcgagcgcaaatggtacatcgttgatgctgaaggtcaaacacttggccgtcttgctagtgaagtagcagcgatcctacgcggtaaaaataaagtaactttcacacctcacgttgacactggtgatcatgtgatcatccttaacgctgagaaaattgaactaactggtaacaaacttaatgacaagatgtactaccgtcatagtggacacccaggtggtttgaaatcaagaaatgctctagaaatgcgtactaaccgttctgagcaaatgcttgaacttgcaatcaaaggtatgcttccaaagaacagccttggtcgccaaatgattaaaaagcttcacgtattcgctggtagcgagcacaatcaccaggctcaacagcctgaaaaatacgaactaagaggataattaaaaggagggaatcaacttggcacaagtacaatacaacggcactggccgacgtaaacactctgtagcacgcgtacgtttacttcctggtaacggacgtatggttattaacaaccgtgagatcgacgactatttcgatcttgaaacactaaagcttatctctaagcaaccactagttgaaactggcactgaaggcacttacgatattttcgtaaatgttagcggtggtggattcactggacaagcaggcgcgatccgtcacggtatcgctcgtgcactattgcaagctgatccggaatcacgcgcaacacttaagagcgctggcttcctaactcgtgatgctcgtatgaaagaacgtaaaaaatacggtcttaaagcagcacgtcgtgcacctcagttctcaaaacgttaatttgttttatacaaaacctctggcttctagccggaggtttttttgtgtactgctttatacattgagattggcaacatccctaagactgaaggaattaccagttcttatatcgcatactccatgacgcttgagtgagactaaaacaaaacgagtcgagaggatgggtgagatggacaatgtgattaccgtatttaaagaacgccagcgtcataagcgccttgaattcgaacggagagtcttaatcgaaatatcgctgaaggagttatcagataacattagggatatgttttctccatttttctctgaggctattctctacaaaggtgatgtcgaaaatgtctgtatggacattgcaatcgaagcgtatttactgggtgcagagtatagcaagttttcctattatggagaaccgatgtcggtggtgcataaacgttgctttaaattggagaaagcgctcatagaggctctctttgactattggcttttttggaaaacgtcagcagtgtatgaagaatctttgcaaataacgtgtgaagtatttgtttcaaattggtggaaagcaggttgtgaaaaagggatgatgagacgtcgccttcgcttgcaataatccgtaaagtttaaagactaattccttcacctgtcccatatagataatgtaggacaaaataaggggcggtgttggaaaagaatgaagaagtggtataagcgatttggcgttgccactggtatcatcgtgctgctatttattattaattacaaatttgcgattgattcttcatgggatgcctggcatctacctttatcaggtcaggttattgtgattgatcctggtcatggaggggccgatggaggagcggtaggtgataatgttgttgaaaaagacattgcacttaaaatatctctaaagctaagggattatcttcaggaagcaggtgcccttgtcattatgacaagagagacggataccgatttagcatctgaaggaacgaaagggctaagcaatcgaaaagctgaagatttaagaaaacgcgttgaacttattaacgaaggaagccatcatctttttgttagtattcatttaaatgcgattccatcgtctcaatggagtggagcgcagactttttataatcctgtaaatgaagaaagtgaggcattatctcgttttattcaagatgaaattaagcggaatttagaaaataccaatcgactggctaagaacatggaaagtgtatatttacttagggaggctgaaattccaggatctcttgttgaggtaggctttctttcaaatccctcggagagagaactgttgaatacggacacctaccagaacaaagtagccgcttctatttatcaagggattattcgctatgcgacaaacgagtcagtgccagaagaataagcactgactcgttttagtatttaaaatccatgaatttcacgtgaagcaccgtagtcaaaactctctgaatgatatgttatactaacaatgtaatcgaattcagagaaggtggtgcctacatgttaacgaaagatcaggtcgttgaattactacaaaaggtgcaagatcctattttacataaaagtatcacgattcgtgatgtgaaaacgaaggaaggctatgtaagtgtgaaggtagctcttgctcaaacggaatcggctgagcaaatgaaggtacagcaagagattgtgaatacgttaaagggtgctggagcggaatctgttgggttacgatttgaacaattagcagacgaagaacttcctgagggaacttcagctaatcctgatcttcctccattgctttctccggaaagtaaaacacaatttgttgcggtagcaagtggtaaaggtggagtagggaaatcaacggttacagtaaaccttgcaacgtcacttgcgcgtctcggaaaaaaagttggtattattgatgcggatatttacggatttagcgttccagatatgatggggattgaaacgagacctaaagtagaaaatgaaaaaatctatcccgttgagcgttttggtgttaaagtcatgtcgatggccttctttgtagaagataatgctcctgttatctggcgtgggccgatgcttgggaaaatgctaaataacttctttagtgaagttgattggggagaattagattaccttctacttgatttaccaccaggaacaggtgatgtcgcgcttgatgttcatacgatgcttcctgcttcaaaagagatcattgtaacaacgccgcatgcaacggctgctttcgttgcagctcgagcgggggcaatggcgcttaagacgaaacatgaagtccttggcgtcgtggaaaatatggcttattttgaaagcaaagtcactggtgagagagagtatgtatttggtcagggtggcggagataagttagcttcagaattatctacggatattcttggcagacttcctctcgggcaaccagacttcgatgaagctgaatttgctccgtcagtttaccaagaagaacatccaattggcatgcagtacctccaaattgctaatgagattatcaaaagaactgcagaataaaacgaaaggacatgccttgaggcatgtcctttgtcctttcgttcggttattcctgtccagaatttgagctttctccattctttgaatcagaattaccacttccttcttccttaccaccaccggaagatttcagttgctctgacgtaattcctgtaagcatttcctgaatcttagcttggaataatgggctttcaaaagtttcggaaatcaagtctttgatttgttggcgagactggttgctttcaaggagttgtaaatagtgcttttccatgactggatcttgcaacagatccatcatcttttcctgaaagtcaggatcatccatcagggatttgaacaattccttattctcttcctgaatgtttttagcaaagttttcaacgaaagtagggtctttcaacatttcttgccagtatgcttttccttcttcagttgtaagcaccttttgtatggtttctttcacaaatggttgttccataacaagttgtttctttatttctgcatctgacagtacttcttgaatggctttcttgccttcgtccgacttcagaaggtcgacaagcattttcttcgtttcttcataattggcttgagatccttcagcagaacctgtggcacatcctgcaatcagaagaataacgaaacatagtgtgagtagtttgaaacgctgatacatatagatgcgctcctttctcaagatcttattcttaatattaggcgaaactgtgaatttatacccggtgaataaaggaagggtggcaatttaaaagtggcattggtacaattcaacatagaagcaccattaacgttcacgggggtttgattttgaaaacaagaaatcttgtttatttattttttacaacccttctgattggatcaacagctggtatgcttacaggtcttgttttagactggtcacaatactgggcagatctgaaaaatggagaaatattatcgttcctaatcgtcatactttggttattaggagtatcgagcatctttagtttgattagtcagatggggttttttgcttatttaacgattcaccgatttggtcttggtattttcaaatcagtcaaactctggaatacaatccaggtagtgttgattgcagtagctttatttgatttagtctatttccgctatgaggtatttgcagaagagggagaaagtgtgattagctacatactcattgcgttatttcttttagctgtcggacttgttacggcatatgtgaagcaaaaagaaacgaataagcaggcgtttatccccgctcttttctttatagtcgttgtcaccatcctcgaatggattccaggactacaaagcaatgatccaaagtggctctggcttattttgatccctctcttagtaagtaatgtatggcaattgctaacacttcatcgtttaattcaaaaagacgcataaacgaaagccgctttccgattggaaagcggcttattttacttctttactattgatgttggcgttagaaacaagttcactcaccgttgcgaaagaatagcctttcttctttaaagcagcaatcacttctggaagagcttctgccgtctgttttgctgaatcggaagcatgcataagaataatgtcacctgggtcgatctctttcgttacattttccacaatgttctctacccctgggtttttccaatcttcagaatcaagactccagtgaataagggtatagttaaatttgtctgaaatcgtgagaacacgcttatcaaagtttccgttaggtggccttagcaattgtggttcttcatcggttactttttttatagcttcgctcgaacgaataatatccttcttgatctcctcatctttcatggttgtgtagttctcgtaccgataaccaaggttaccaatttcgtggccgtctttcgctatttgttcgactacttcaggatgacgctctgcccaagcgccagaaataaaaaaagaagctttaacattgtgttgttttaattcttcaagtatcgggatcgcttttgtttcaccccaactaatgtcaaaggttaaggcaaggcgtttatcatcactctttacctgatccacagcgagcggaacatcattatttgtaaaaacagcgaggtctccaccttcgacaaaaagaataatggcagcaaagaaagcagccgctacaataataaggccttgtttaattctgatcccattccaaatccaaaaaaacttcattatgcaccccctttgtcccattcatatgcgaaaagtttcttaactatgtacaaactgttaaggacacacataaatcacaaatcacctggtcatactggtgtgaggaaggagtggttttaaatgatgggctttttagttaactttaaagaaatgaaagaaatagagtatttgctaaagcgagaaatggaagagctactgttggatttggataacagtcggattgatggtctaattaaaagagcgatggaagaacgttatcagcttctgttaggtatctataaaagaacagctacacaagcggaaatagcgaagtacgtgcgcattttgaaaaaaagttcaaattaatttaaattacctcttgtcaaatagagaaactacctgtatatttatataggtcgccgcaacaacgcggttgacacaataaacaatttcaaaaaagttgttgacgccaactgagttaatgtgttacattaataaagtcgctgaaaacgacattgaaagaaacaaattgctctttgaaaactgaacgaaacgccatgtaagtagttgtttctacggaaacataaattgttttaaaagctagattaagctttctatcggagagtttgatcctggctcaggacgaacgctggcggcgtgcctaatacatgcaagtcgagcgaagagatgggagcttgctccctgatcttagcggcggacgggtgagtaacacgtgggcaacctgccctgcagactgggataactccgggaaaccggagctaataccgggtaatacatcgcaccgcatggtgcaatgttgaaagttggctttctgagctaacactgcaggatgggcccgcggcgcattagctagttggtaaggtaatggcttaccaaggcgacgatgcgtagccgacctgagagggtgatcggccacactgggactgagacacggcccagactcctacgggaggcagcagtagggaatcttccgcaatggacgaaagtctgacggagcaacgccgcgtgagtgacgaaggccttcgggtcgtaaagctctgttgttagggaagaacaagtaccgttcgaatagggcggtaccttgacggtacctaaccagaaagccacggctaactacgtgccagcagccgcggtaatacgtaggtggcaagcgttgtccggaattattgggcgtaaagcgcgcgcaggcggtcttttaagtctgatgtgaaagcccacggctcaaccgtggagggtcattggaaactggaggacttgagtgcagaagaggagagtggaattccacgtgtagcggtgaaatgcgtagatatgtggaggaacaccagtggcgaaggcggctctctggtctgtaactgacgctgaggcgcgaaagcgtggggagcaaacaggattagataccctggtagtccacgccgtaaacgatgagtgctaggtgttggggggttccaccctcagtgctgaagttaacacattaagcactccgcctggggagtacgaccgcaaggttgaaactcaaaggaattgacgggggcccgcacaagcagtggagcatgtggtttaattcgaagcaacgcgaagaaccttaccaggtcttgacatcctctgacaatcctggagacaggacgttccccttcgggggacagagtgacaggtggtgcatggttgtcgtcagctcgtgtcgtgagatgttgggttaagtcccgcaacgagcgcaacccttgatcttagttgccagcatttagttgggcactctaaggtgactgccggtgacaaaccggaggaaggtggggatgacgtcaaatcatcatgccccttatgacctgggctacacacgtgctacaatggacggtacaaagggcagcgacaccgcgaggtgaagcaaatcccataaagccgttctcagttcggattgcaggctgcaactcgcctgcatgaagccggaattgctagtaatcgcggatcagcatgccgcggtgaatacgttcccgggccttgtacacaccgcccgtcacaccacgagagtttgtaacacccgaagtcggtggggtaacctttatggagccagccgccgaaggtgggacaaatgattggggtgaagtcgtaacaaggtagccgtatcggaaggtgcggctggatcacctcctttctatggagaattacgaaggtaacttacgttaccaaccttacatgagcgtttcgtttagttttgaaagaatgatttattctttcaaaacaggtgaagtgatgagcttacgctgattcaaacagtagccttgttccttgaaaactagatagcacaaacaacgacatccaataattattttttatgcaagaacttagtaataactgatgcgttacggcagcaatgcctaacaaatcgaaggttaagctactaagggcgcacggtggatgccttggcactagaagcctaagaaggacgggacgaacaccgatatgcttcggggagctgtaagtacgctttgatccggagatttccgaatgggggaacccaccatctttaataggatggtatccatttctgaatacatagggaatggaaggcagacccggggaactgaaacatctcattacccggaggaagagaaagcaaatgcgatttcctgagtagcggcgagcgaaacggaatcagcccaaaccagagggcttgccctctggggttgtaggacgtctctttggagttacaaaggcacggatagacgaagcgacctggaaaggtccatcagagaaggtaacaatcctgtagtcaaaatccgctgccctccgagacggatcctgagtacggcgggacacgtgaaaccccgtcggaatctgggaggaccatctcccaaggctaaatactctctagtgaccgatagtgaaccagtaccgtgagggaaaggtgaaaagcaccccggaaggggagtgaaaaagaacctgaaaccgtgtgcctacaactagttggagcccgttaatgggtgacagcgtgccttttgtagaatgaaccggcgagttacgatcccgtgcaaggttaagctgataaggcggagccgcagcgaaagcgagtctgaatagggcgaaatagtacgtggtcgtagacccgaaaccaggtgatctacccatgtccagggtgaagttcaggtaacactgaatggaggcccgaacccacgcatgttgaaaaatgcggggatgaggtgtgggtagcggtgaaatgccaatcgaacctggagatagctggttctctccgaaatagctttagggctagcctcgcggcaagaatcttggaggtagagcactgattggactaggggtccttaccggattaccgaatccagtcaaactccgaatgccaacgatttatccgcgggagtcagactgcgagtgataagatccgtagtcgagagggaaacagcccagaccaccagctaaggtcccaaagtatacgttaagtggaaaaggatgtggcgttgcttagacaaccaggatgttggcttagaagcagccatcatttaaagagtgcgtaatagctcactggtcgagtgacgctgcgccgaaaatgtaccggggctaaacgtatcaccgaagctgtggattgtcttacgacaatggtaggagagcgttctaagggctgtgaagtcagaccgaaaggactggtggagcgcttagaagtgagaatgccggtatgagtagcgaaagacaagtgagaatcttgtccgtcgaaagcccaaggtttcctgaggaaggctcgtccgctcagggttagtcgggacctaagccgaggccgaaaggcgtaggcgatggataacaggttgatattcctgtaccacctcctttccgtttgaacgacgggggacgcagaaagatagggagagcgcgctgctggaaatgcgcgtccaagcgattaggctggtgaataggtaaatccgttcaccgtgaaggctgagtcgtgatggcgagggaaatttagtaccgaagtccttgattctacgctgccaagaaaagcctctagtgaggaaagaggtgcccgtaccgcaaaccgacacaggtaggcgaggagagaatcctaagacgatcgggagaactctcgttaaggaactcggcaaaatgaccccgtaacttcgggagaaggggtgcttcctcgggtttatagcccaggggagccgcagtgaaaagatccaagcgactgtttagcaaaaacacaggtctctgcaaagccgtaaggcgaagtataggggctgacacctgcccggtgctggaaggttaagaggaggggttatcccttacgggagaagctctgaatcgaagccccagtaaacggcggccgtaactataacggtcctaaggtagcgaaattccttgtcgggtaagttccgacccgcacgaaaggtgcaacgacttggatactgtctcaacgagagacccggtgaaattatagtacctgtgaagatgcaggttacccgcgacaggacggaaagaccccatggagctttactgtagcctgatattggattttggtacagcttgtacaggataggtaggagccatagaagtcggaccgccaggttcgatggaggcgtcggtgggatactaccctggctgtactgacattctaacccagcaccgtgatccggtgcggagacagtgtcaggtgggcagtttgactggggcggtcgcctcctaaagtgtaacggaggcgcccaaaggttccctcagaatggttggaaatcattcgcagagtgtaaaggcacaagggagcttgactgcgagacctacaagtcgagcagggacgaaagtcgggcttagtgatccggtggttccgcatggaagggccatcgctcaacggataaaagctaccctggggataacaggcttatctcccccaagagtccacatcgacggggaggtttggcacctcgatgtcggctcatcgcatcctggggctgaagtaggtcccaagggttgggctgttcgcccattaaagcggtacgcgagctgggttcagaacgtcgtgagacagttcggtccctatccgtcgcgggcgcaggaaatttgagaggagctgtccttagtacgagaggaccgggatggacacaccgctggtgtaccagttgttccgccaggagcatagctgggtagctacgtgtggaagggataagtgctgaaagcatctaagcatgaagcccccctcgagatgagatttcccacagcattaagctggtaagatcccttagagatgatgaggtagataggttcggggtggaagcgtggcaacacgtggagctgacgaatactaatcgatcgagggcttaacctaaaaacaaaagtgatgtgagcatgtctcactaaacttaatattattggaaaacgttgcgcgtgctatctagttttcaaggaataatatttttcttgatctttacaaagaaatatagtaagatatatcttgtccttggttaaacactttctagtggatcaaccattgattagtctggtaatgatggcgaagaggtcacacccgttcccatgccgaacacggaagttaagctcttcagcgccgatggtagttgggggatctccccctgcaagagtaggacgttgccaggctgaccaatattccacagtagctcagtggtagagcaatcggctgttaaccgatcggtcgtaggttcgaatcctacctgtggagccattatgcttccatagctcagcaggtagagcacttccatggtaaggaaggggtcatcggttcgaatccggttggaagctccaggacatggcccgttggtcaagcggttaagacaccgccctttcacggcggtaacacgggttcgaatcccgtacgggtcaccaatatcaatttttactctgtggaggattagctcagctgggagagcatctgccttacaagcagagggtcggcggttcgagcccgtcatcctccaccatttttcttataataattaacttactttcaggagtactcgatagagtgcactgttttttatttgtaagttagattgattttcttcaatattctttgccggcctagctcaattggtagagcaactgacttgtaatcagtaggttgggggttcaagtcctctggccggcaccattttttctcacttgtggaggggtagcgaagtggctaaacgcggcggactgtaaatccgctccctcagggttcggcggttcgaatccgtccccctccaccagtaagagccattagctcagttggtagagcatctgacttttaatcagagggtcgaaggttcgagtccttcatggctcaccataagcggaagtagttcagtggtagaacatcaccttgccaaggtgggggtcgcgggttcgaatcccgtcttccgctccaaactttatatgcgggtgtagtttagtggtaaaacctcagccttccaagctgatgtcgtgggttcgatccccatcacccgctccaaatggggccttagctcagctgggagagcgcctgccttgcacgcaggaggtcagcggttcgatcccgctaggctccaccaatttccttaaaccatgtttagggttttttttatgtttaaaatacacctccatttcgttcttttccaagctctcctgatatctccaagtttatcttttacattttctctttagagttttttattcctccacttatatttatccgtaaaaaggtccaatttgcgtaattgtatgaatatttattcgtgttttatgtccagttgagtcatttgtcgagatctgggtaaaatagagctagactaggatacgaggaggactacataatgaatcatgaactttcaattatcggtgtaccaatggatcttggccaaatgagacgcggtgtcgatatgggaccaagtgccattcgatatgcaggaatagtcgaacggttaacaaaattgaattatgatattgaagatcttggagatattgaaattggtagaccagaaaagcgacctgaggatcaagatcatcagctgaagaacttaaaagaagtggctgatgctagcgagaagctttctaacgttgttaatgatgtcgtgaatcgaaagcgttttccgttagtgtttgggggagatcatagtatcgcaatcggaactcttgcgggagttgcgcgtaattacgataatttaggagttatctggtatgacgcacatggagatttaaacaactcagaaacgtcaccatctggaaatatacacggtatgccacttgctgtaagtctaggaattggggatgattctttaactggaatttcaggatactctcctaagattaagcctgagaatattgtgattatcggcgctcgttcacttgatgaaggagagcgagaacttattaaagaaaagggcattaaagtttatacaatgcatgaaattgatcgaatgggtatgacaaaagtaatggaagaagcgattgagtatgtatcgaaggatgcagatggtgtgcatttaagtcttgatctggatggacttgatccacacgatgcacctggagtaggaacgccagtgcttggagggatcagctatcgtgagagtcaccttgcgatggaaatgcttgcagaagcaaatattctaacatcagctgaatttgttgaagtgaaccctattttggatgaaaaaaataaaacagctacagtggctgtagcattaatggggtctttattcggagaaaaattaaaataacataaaaacggctgctttcttcattagaaagcagccgtttttttatttcgacgctgatcgtattcgtttaaaagataatcaaggtaagtgctaatttctataatttcagtagagctaagcggcttgtttcgtgctaataaattcattttattgcgtgaagcttcaatttcttttaataaaaggtctttttccgatccgatttgaaagcttatctttcgattcaacctttccatgagccgaaccaccctctcaataatttataggcttaatacccaaattgctaaaaagataaactgcttttcctagaaaattatgtatttccgttataaagaccaattcaaacgtggtagaataggaaaggataatataattttttttgaaataatgaaactttgtttttcctgatacgtaactataatagccgcaggaatcagcgggggttgagaaaatatggacgcgatagtaaagcgaatcgtactaaaagtaagaaaaggggatcataatgcatttggggagctggtagagctctataaagatcgagtctttgcccttacttatcgaatgctaggaaacaggcaggaggctgaggatgtggctcaggaggcgtttattcgtgcatatacgaatattgatcgctatcagatcgaccggaaattttctacctggttataccggatcgccacaaacttatcgattgatcgaatgcgtaaaaagaaaccggattattaccttgatgctgaagtatcgggtacagaagggttaacgatgtattctcaaatttcgacagatgagccgttacctgaagaagaagtggtatctttggaagcgcaagaagggatccatcaggcgattttaagcttgccagccaaatatcgaagtgctataactttaaagtatatccaagaactatcgctcaaggagattagtgaaattctcgatttgccaataggtacagtcaaaacccgtattcatcgcgggagagaagcacttagaaagaaacttcgggagcagtgagaaagggggaggagctatgaaatgccctgcagaaataattgtgctcatgcatgaagtacttgatgaagaagctacgaatgaacaacgtcgcgagctatttgatcacctgcaaacatgttatgattgcaaagagcattatgaagaattgaaaaaaacggaatcgtttctcctcagctcgccttctatgaaggcacccgatggttttacatcaaaggtaatggagcagctacctcaggaaaagcgtactgtttggatgaaacgctggatgaaatcacatccatttgtaactgctgctatcctattccttgttttgatggcaggttccgtttattcatcgtggacgagtgaggatcaattgtctgctctttctgggaatttaagatttgagcaggatacaaatacagttattgtgcctgaaggtgaagtggttgagggcgatttaacagtaaaaaatcgcaaccttgaaatagaaggtcaagttaaaggggatgtccttgtcattaacggagaacagtacatggcgtctgcaggacaggtaacaggtgagattgaagaagtcgaccatattctagactggacatggtatcaaattaaaaacctcttacaagatgtgggtaatcttttttctagtgaagaagaaaaaaagtaaatcgtctaataggcgatttactttttttatggagttgaggtaattctttcgatcgtatatggcatccttattgaacgatcaatcaaggagagcgatttagtgagtgggtagtcgctttttttgaagttgtcaaaaatatgatataattaaaaagttacaaatgtattttagcgatgcatttgaagtgaacttcaggctaaatacaatatgtttggaggaagagccgtgctgcctgttggaaatgtaaatgtacttgattacataactgagattattgatattttactcgttacgtatgtgatatataaaattattatgcttattcgcggcacgaaggctgttcagcttctaaagggaataaccgtcattattgcagcctggtttttaagtagcttcttcgaactaaatactttgcattggattttggagcgagtcgtgctctatggacttcttgccattattattattttccaaccagagcttcgaagggcacttgaacaattaggacgtggtcgactgtttgctcgttcggcagtagaagaggaagagacgaataaaatggttgaagcgatcattaagtcatcatcctacatggctaagcgaagaatcggtgctttactctcaattgagcgtgaaactggactgaacgattatgtagagacagggattcctatgaatgctaaactgacttcggagcttttaattaacatttttattcctaatacccctcttcatgatggcgcagtgattttgaaaaaagatgaaattctagctgccgcctgctatttgcccttatcagaaagcccttttatttctaaggagcttggaacgaggcatagggcagcgcttggtataagtgaagttacagatagcttaacacttgttgtttctgaagaaacaggtagtatctccctgacaaagaatggagagctacatcgaaatttatcagaagaggctttgcgtgatctgcttaatgcagaattaaacccgtccgtatcaaaaaccgagtcttccaaccgtttcagtaattggagggggaaaaagtaatggataaattattgacgagtaattggtttgtcaaaatcatctcttttcttctcgctcttatgctttacacgattgttgctatgcctgatgcctcaacgtcaaacacgaatgatgtgcttcagcctcagactgaatcagaacggattccaaacatggagctcgaagtactttatgatgaggagaacgtggtcgtatctgatttacctgaaaccgtagatgttcttgttgaaggtcggacagatggcttaatgctatcaaagctaacaaacaaagaaatttatgtggatttacgaaacctcactccaggtcagcatcttgtgacagtaaagcatagagattttccagaaaacgtggatgtgacgattgatcctgttcgtgtgtctgtcacgatcgaagagaaaaaatcgaacacgttccaggctggaatcaatttattgaaagcagaagagctacctgagggctattcgacagaagaaccaattgtttctccaaaaaccgttaccgtcactggtgctagttccaagcttgaacaagttgccttcgttagaggatacgtgaatgttagcggggcaaaagaagaagtgaacgaaagaattacactaaatgtgtacgatgcgaatatggaagaaatacaggggttatcgattgaccctgccgtagtggatgtaaaggtaccagttacagccccttttaagaaggtgccaattaagcttgatcaaaaaggcaagcttcctgaaggcaccagcatctcgtcgattgaacttgagccaaaagaggtatctgtctttggtccagaagaggaacttggaaagttagaatttcttgatggtattccactagatttatcagaaattacgaaggacacaaccattgaacttgatgtgccggtgcccgatggaatgaagaaagtagatcctgagacagtaaaagcaaagattacagtcggtaaagaggaagaaaaagcatttgaagatgtaccgattaaagttaccggcatatctgaaggcctagcggcgaatatttcagaaccgaagcaaggttcaacgaatatgacactttacggtgtatcgagtgtgcttgatacgattcagaatggggattttcaagcttatattgatgcaagcggcctatctgaaggagagcatgaacttgaattacaatggaacggaccatcttatgtacgctggtcaggttcagataaaaaggttaagctcaaaatagagaatagttcgtcctaaataatgggaactgcgtcataataaaggagagagtaaaacgatgggtaaatattttggtactgacggtgtaagagggatagcgaatacagagcttaccccagaacttgcatttaaattaggccgttttggtggtcatgttttaacgaaagatgcggaaaaacctaaaattctaattgggcgcgatacgcgtatttcaggatacatgcttgaaggggctttagttgctggtcttctttcgattggagcagaagtcatgcgtcttggtgtgatttcaacacctggtgttgctcatttaacgaaagcacttagcgcacaagcaggtgtgatgatttctgcttctcataatccagttggtgacaatgggattaaattttttgggccggatggatttaagttattggatgcacaggaagccgaaatcgaatcccttattgatagtgacgaagatcatgttccacgtcctactggtgctgacctcggtattgtaagtgattatttcgaaggttgccagaaataccttcaatatttgaagcaaacagtggacgaagatttttcagggcttcatattgcgcttgactgtgcacacggtgctacatcatctcttgcagcacacttattcgctgatcttgaagcagatatttcgacgatcggtacgaacccaacaggtacgaacattaatgacggtgttggatcgacccatccagaaacgctggctgaatttgtgaaagaaaagaatgccaacgtaggctttgcttttgatggtgatggtgatcgtcttatcgctgttgatgaaaatggtgacattgttgatggcgaccagattatgttcatatgtgctaaatttatgaaagatcaaaaacgtttgcgtcatgatacggttgtttcaactgttatgagtaatcttggtttccataaagggatggaagaatcaggtgtgacgtcgctgcaaacaaaagtaggcgatcgttatgtaatggaagaaatgcgtaaagaaggctacaaccttgggggagagcagtctggtcacattattttccttgatcatattacgacaggtgatggtatgctgtcagcgcttcagcttgctaacattatgcaagtaacaaacaaaccattgtcggagcttgctggggaaatgaaaaaataccctcaatctcttgtgaatgtaaaggttacggataaaaacaaagttgattcaaatgagcgtatacaagaaacgattcaacaagtcgagagcgacatgaatggtgaaggtcgcattcttgtacgcccatctggaacggagccgcttgttcgcgttatggcagaagctcctacgaaagaactttgtgatgagtatgtcaatcgtgttgtgtccatggtgaaagaagaacttggagcgtaagcgacaaaaactaagattttgtacgaaaggtatgcatgtgcagcacagaaaaagctgcatgtgcatacttttttatatagagaaatttgtttactaagatgaggcaaactagagcaagttaggataagagcgaatggctctatgaaaaaaagaattgaccatctttttacagttgatataatatagaagtatgtttggtttttattcaagaagggaaggagagggaagttaggttactttgaaaaaaagcgcctggactgtttttcgaacggaagaaaacagttgacgaggaagaggtttatcgatcatcggcggatacctctcgattgcttcaccacaatcgaatggttttgtgaaaaacagagaggtgactttctgaacaaaagcaaaactatggtgacaaaataggaattaatcggaaaagaaggggcaggtctgccccgatgtacacctgctccttcaaatgaaggaggacttttacatgtgcggtattgttggatatattggaaatcaagacgctaaagaaattctattacgaggtctggagaagcttgaataccgagggtatgactcagcgggtattgcgcttcttaacgacggtggtcttcacctttttaaagagaaaggtcgcattgccgatctaagaaaaaaggtggatactagtgtggaagcaacagcgggtatcggacatacacgttgggcaacacacggtgaaccaagtcaggtgaatgctcacccgcatcagagcacaactgaacgtttcactcttgttcataacggagtaattgaaaactatcaacaaatcaaacgtgacttcttatccgaagttgattttgtaagtgcaacagacacggaaattgttgttcaactgattgcgagtcttgttgaggaaaaaaatatgtctgttgaagatgcttttcatcaaacattgaatgaacttcacggttcttacgcacttgcacttattgacaatcataatccagaaacgctatacgtagcgaagaataagagtccgcttctagtaggaatcggcgatgatttcaacgtagtagcaagtgactcaatggctatgcttcaagtaaccagtaaattcatcgagctaatggatgaagaggtagtaatcgtgaagcgtgattcagttacaattaaagatatgaatggaaacgtgatggagcgtgagccattcacggctgaaatcgacgctagtgatatcgaaaagggaacataccctcactacatgctgaaagaaattgacgagcagccgcttgcaattcgtaacattattacgaagtacaaagatgacaatgataatatcaagctagatgaagatatccgtgacgcgatgaaagaaacggatcgtatctacattattgcatgtggcacaagctacaacgcgggtcttgttggtaaacagttaattgagaacatagcagaagtgccggttgaagtgcacatcgcaagtgagttcttatacaatatgccgcttgtttcagagaaacctctctttatctttatttcacaaagtggtgaaacggcagatagccgaggcgtccttgtgaatgtgaagaagaaagggtttaagtctcttacaatcaccaacgttcctggatccacactgtctcgggaagcggattatacgctgcacacgcatgcaggcccagaaattgcggttgcttcaacaaaagcctatactgcacaaatggctgtgctaacattgcttgctgttgatacagcgcaggcaaaaggcatgaagcttgatttcaacccaattcaagaacttggtatcgttgctactgcaatggaatccatgattgatcaaaaagaaatgattgaaacagttgctcgtaacttcctttcagtaacacgtaatgcgttctttattggacgcggcgtagattactacgtatgccttgaaggagctcttaagcttaaggagatttcatacattcaagcagaaggatttgctggcggtgagttgaaacacggtacgattgctcttattgagaaaggcacgcctgttattgcacttgcaactcagaagcatgtgaatggaagcatccgttccaacgtacaggaagtggtttctcgtggcgcatccccttgtatcatctcccttgcaggacttgaagaggaaggcgacaccattgtccttgatgaagtgcatgagcaccttactccactcgcttcagttgtgccgcttcagttgcttgcttactatgcagcgctgcacagagaatgtgatgtagataagccaagaaatcttgctaaatcagtaacagttgaataaacattgatagataagagcggccttttccaattggagaaggccgttttttgtagggaaaatagtagatagaagttcaactctttctttcgactacttacaagcatgtccgaatacaatggatacgaatacgacgaagggtggaggcgtatgagtatctttattagctacatctttttaggactatcactttcagctccaatggggccgattaatgcggcgcagctggacaggggaatacgatttggatttatgaatgcctggctggtagggtttggagcgatggtagcagatggtgtatttatgatgctgatttactttgggctcgctcaagttattgaaacgccatttatgaaaacatttctgtggctgttcggtttttttgtattaacgtataccggcattgaaaatattgttaaggttaattccattggagttaagcaaataagtactcgtaatgagtcaaatcgcaaatcatttcgcacgggtttttttattgcgatatcaaatccactaaatattttattctggcttgggatatatgggtcgattctagctcaaacatccagcatggttgatagcaagctgctgttgctttatagtacaggcatttttctaggcatcaccttatgggacctcaccatggcgagtgctgcagcaggcgcacgtgcatgggttaatccaagtgtgttgaaacgaatatctatgctatctggaataacattaatcggttttggtttctattttggaatacaagcgatcaagttgttcatcggatagactggcaccactttctgtccctcctaataaaataacgcgtgtcgtgttaaggagggattccgtttggaactatatacgaaatcatggattgatgaacatgaagaagaaatggaaggttggaagcacactgcatttactcacatgggggcaatgttaggagaccgtgaaaaaccttatccctgtattcctggaaaacaggggttttatcaagataatttgcgtttcgggttcgcagatgatccaacaacagatagcgcatgtactcagttagctactttgttagaaaattacggagaagtagccagggacacaggtaaatatgcctctcttgtcgttttttttgattcaaggaggttacagcaacaaaatgctgatgtcgagcagtataaatcactcttctggtcgctattaaaccgagtacatgaacttgataaggaagcgtggccggagcatattcctatagatcctcatgatcctaaatgggaattttgcttcaacggagaaccgtattttgctttcagtgcgaccccagctcatgttgttcgacagagtcgtcactttccttgttttctaatcgcgtttcaaccaagatgggtttttgatgaaatcaattcggaaaccacttttggccaaaagcttaagaaagcaattcggcagcgattggtttcttacgatgggattccagcccaccccgctttgaagtggtacggtcagcaagataactatgaatgggagcaatatttcttatcagatgataactcttcgctttctaaatgtcctttcatggcgatgaaacagaaatggaagagcatccgttcctagtgctgtttccttttcattttaaaaaaggtagccgaagcaatgagtagaagaaagcatagactgacaaaaaaacctgctctactaatacgatcaagtaacgttcctgaaacagctgtacttattagaagaatcccaatgatgagttttatcttatctttgaatgtggtctgggttaatttccgataagaaaaaaggataaacatccaattgtataacagcattaaaccagcggcagtcgttaaatactcaaaaatgttttcaggtaataagagtgcgaaaccaattgaaagtatgacaactagggttgtaagaccaaaagcgggaagggaaatcttcctgcttttttttgcgaaaatcgcaggcgcatcattttcttcagcgagtgttacaagcatggttgtaacggcatagagagaagcgaccattgttgaaaatccagcgataattaaaatcgcattaaatacatgagggatccaggggagatgaaattgagtgagtgctgttaaaaacgggctttccttcggggtaatgcttttgatgggaataagctttaaaacaacaatgaacgaaagaatatatagaatggttaagacgatcagcatcacttttccagctctaggagcgttttttggatcttcaagctcatttgccatcattcccattacttcaatcccaccaaatgcatagaaagcatatacaagagcaacccagagcccgattttattacctgaaaaaaagtcggatgaagcgatagcttcgtgatcttgtttaggatcaagccatccaagtaaggcagcggcaccgattgcgagaaacgtgacgatggcagcaattttcattatcccaaacacgttctccattttttctacgagctggacccctataaagatgatgagtagaccaagcgaagcaaatacggatgcattgagccacagaggagtactcggaaaccagaattgagcaaatagcgcaagtgctgttaactggcttcccataataagcatttcagaggaccagtagacccaaccattgctaaatccagcccatgccccgaaagcttgtttcgcatatgttcgaaatgatccttttgttggatgcttagccgttaggtttgaaagagcttcataaacaatccaggttccaatcgcagctaaggaatatgccactaaaatgagatagcctgctttatcaatgacgatgctagatccaagaaaataccctgtccctatgatgcatccaacaccaacgaatgacatttgccaccaggttaattttttttcttgagctgtctgtttacccatcctaacaccctcctcttctagactagtttgagaattgaagataaggtttatgtgtgaatcagtttgtagcatcatttttgagggtgaggagaaagtaagaagaccatggatataaaggagtttagtgagatgaacattgaaccaaattgttggaatgaatatggacagttaaaagcagttatcgtttgttctccgtcaattttagatgtacctgatcaacagacagcgacagacgtgcaatgggaaaaggcagtgagacaaaaaaaggcgagagaaaaccatgaggtaatgattgaatcgatggaggaagaaggagtgaatgtgatcgattactctgttcatttatcacgagacgaacttttactaaatgaaaaattaatcaaccgcattttcgtccgcgatcttgcatgtgtgtttggaaatattattcttcccggggcagctggaacgtctatgagaggacctgaatattttcaaagtcacaagttatttcaacaatggtttgataacaagacgtttcgtgtggaagcaaataatgatttgaaggcgctcgaatatggagatgtgatgatcctgaataaagatgctattttgataaatgcaggcattcggacaagcattgaaagtgtagaagctttgcaggaaactttgttcaaggctggtttctcagaaattggtgtcattgatctaccacgtcgaccggatacaattcacctcgatatgaattgtaacgtggttggggaagaactttttattgggaaaagctacatgaactatttaccggttcaggttataacaggaaatgggtttacttatgaaatgcttgaagcttttataaagcgacatgggtatgaaacagaatggacttctgacattaaacataccgtggcagatatcaatttcttaaatcttaatccagagacgctgttaatcagtacaaaagctaataaatcaatctttaaaaaccattctattcttaaaaagaaaaagctgattgaagtagaagtagacgaattagaaaaagggggcggtggcatccggtgtatgacgttgcctttggaaagagaataagaaaatcctactttatgtaggttttttttatgaaacgattcagttgacacttatacctaaggggggtatattagatgtaagtaaatttggaggagatgattcgaatggcagacttgaacattcctttgcagccagagaaaaaaccaaccgaaccgcgaacggaagaagaaaaacagcagcttcaaaaccgcttgaaacgtattgaaggtcagatccgtggtattcagaaaatggttggagaagaccgctattgtgtagatattctcattcagttatctgcgattcaggcagcattaaagaaggtaggctatactctcctagaacgtcatacaaaaacgtgcgttgctaattcaattaaagaaggtactggcgatgatcaaatagaggagttaatgaaagtgattcagcagttctccaagtagggaggtgaaccaattggaatctaagaagcagatctcacttcatgttacagggatgacgtgtgcatcatgttcaacacgaatagaaaaagtattaaacaaaatggatggcgtcgatgctaatgtcaatctgacgatggaaaaagcaagcgtcgcttatgatggagataaagtaaaggcggaagaaattgttgggaaaattgaaaagctcggatacggtgtacgcaaagagaaagttgagctcgatattcacggtatgacgtgtgcggcctgctcgacaagaatagaaaaaggcttaaaccgtacaaaaggtgttgagcttgcttccgtgaacttaacaacagagtctggtgttgtcgaatatcagcctggagaagtaacgttagatgaaattctccaaaaggtgaaaaagctcggttatgaagcggtagtcaaaaaggatcgagaagagcaaaaatctcacaaagatgaagaagttaaaaagaaaaaacgtcgcttgcttatctcagcgcttctttcgttaccgctactcttaacaatgctaggtcatctacctggcggattagcacttccggtgccccatcttctcatggagccctggtttcaatttcttctagctacacccgttcagtttgtaattggagcaccattttattctggcgcttatcgagcactggttaataagagcgcaaatatggatgtccttgttgcgcttgggacatctgcggcgtatttttacagtgtgatagaaggcatgagaagttatctaacggaaggctacaatccgtctctttattttgaaacaagtgctattctgataacgcttattttagtcggaaagctatttgaagatcttgcgaaaggcagaacgacacaggcgattacaaaattgcttaacctccaggcgaaagaagcaagtatcattcgagaaggggaagaagtgaaagtacctgttgatcaagtacaggtaggagatcacatcgttgttcgtcctggtgagaaaatacctgtagacggtatcgtagaaaaagggaattcatccgttgatgagtctatgattacaggtgaatccatcccaatagagaaagaagtaggagaaagtgtaattggttctacaatcaatgaaaacggtacgttaaccattcgcgctgaaaaggtcggaaaagacacagcacttgccggaatcattaaaattgtagaagatgcacagggatctaaagcaccaatacagcggttagccgatgtgatttcaggtgtttttgtcccgatagtagtcgctattgccgccgttacgtttttcatttggtattttcttgttgatccatacaatttacctcaggcgcttgaagttggaatagccgtgcttgttattgcatgtccttgtgcactaggtttagctacaccgacatcaattatggttgggacaggtaaaggtgctgaacaaggtattctttataaaggtggcgaatttctagaagccactcataaaattgatgcgatcttacttgataaaacagggactattacaaaaggaaaaccagaagtaacggattttgttacttttcaaagtgatgagaagagcgtgctggaaaaattggtagcggctgaaaaagcttctgaacatcctctggccaagtccattgtagagtatggtttgaaccagaagattgaagtagctgaagcagagcagtttcaagctattccaggacatgggattgtggcaactgtgcaagaaaagcaaatcctggttggaacgcgcaagctgatggagcgggaacatatttctttttctgcttatgaagagcaaatgactacgtacgaattggacggtaaaacggcaatgtttattgcatttgataacaaagtgcaagggattatagctgtcgctgatactgtgaaaaaaacgtctcagaaagctattgaagaaatgcgtgcgcttggcatcgatgtgtatatgatcacgggtgacaaccaacgcacagctgaggcaattggaaaacaagtaaatttaaatggtgtgtttgccgaggtgttacctgaggaaaaggctagtaaggtgaaagagttacagggagaaggcaaacgagttgcgatggtaggagatggaattaacgatgctcccgctcttgcgacagctgatattgggatggctattggtacaggaacagatgtagctattgaaacagcagatgttactctcgttggtggcgatcttcaaaacattccaaaggcgattcatttaagtcagaaaacgatgcagaatattcgccagaatttattctgggcgctattctataattcaattggtattccaattgctgcgctcggtctactagctccgtgggttgctggagcagctatggcatttagctctgtatcagtcgtagcaaactccctccgtttgaagcgagtcaaactttaagaattgaaaggagaatgaaaatggaacaaacaacgttaaaaatcaaaggtatgacatgtgatcattgtaaagcagcagtaaataatgcattaacagagctcgaaggagtagcagaagtagacgtgaatgtaaaagaaggaacggcaaaagtttcttatgattcttcaagtgtttctgtttcagaaatgaatgaagcggttgaagaacaggggtatgatattgtctaactgaaaaggccgaagaaaggatgcaatcctttcttcggcctttttatcatacataagttgacctccccgctaataaaatgcgctaataggacaagtgggtagaagagaaggcctcttcaattcatttagggggaatgcagtcatgatgacgtcattgttaactctttttatgatcggctttggaggacttataatcggctcggtcgcagggagaatggcatttacatattatcaacatcgtatggaagctctttaccttatttgcggaggaatgctcattggtgtaattacgtttgaattaatacccgaaagcatacgtacttatccgttttgggccctcatggcaggagcatcgttatcggtctttttctgtatttttacggatcacgccatacatgggatgtttagtgataaaagctatcttcctgtgttcgctttcgtgctagccattatttttcataatatccctgtaggaatcgcgctaggaatgacattagggaaaggtatcggcatatcattgcttattgctctatttattcatcatttaccagaaggggttgccctatatatcctaatgagaatgaacgggattaaacgcacttttgtaatcatcgcggcgagcttcgtaacgatagttttaacagtggcagcgtggtttgggatggtttccagtcaatctattcttattaacggcgtatttatgggcattgcaatcggctctttaggctatgtagccgttcacgaaatgatcggtcatgttgtcgggaaagttttaaaaagagagttgtacttgtatacgtgtttgggaatacttttgttatcactctacctacaggtggctcacgaaatcttttgacaacgtgcaaaagattcagtaaaattgtacatagattaatatgaacacatgctcatatattgaatacgatagataaatgaacgaagaaaggagtaaaacacgatggaagaatatcgtcttaagggcttatcttgtcccaactgtgctgctggcatggaacaacagattcaaaaacttgagtacggcgaatcagctcaaattcagtataattcaggtaaactaaaagtagataaaagagttaacattgaacaagtcgagaaaatccttgattccgatcatgcttctatagtgaaggaagagaatggacatacccatgaacatgctcacgctagtatgaagtggcttctaggcatttcaactggtatctttctattcgccctgctattagattccgtcacagctgttccagctgttccgttttatcttactgcgattattttaagcggttatcaaacgtttatgaaaggtctccgaaatttaacgaagctaacgtttaatattgaaaccttgatgacgattgcgttaatcggggctgtttccattggagagtggaaagaaggaacgcttgttgcgattttgttcggattgaatgaatacttagaaggacttggaatggagaaggcaaggaagtcaatggaatcccttcttcaaatcgcaccgaaagaagcgcttcttatcagagatggaaaagaagaagtcgttgcgattaacgaccttaaagtggatgatcttgttctcgttaaatctggcgcgaaaattccttcagatgggattgtctcagctggaaatagctcagtgaatgaagctgcgataacgggagaagccatgcctgttgaaaaaggtgctggtgaatccgtttttggtggaagtattaataacgagggcattctgcacgtgaaaatcacaaaggcctatgaggattcttcgctcgcaaaaattttgcatttagttgaagaagctcaagaaacgaagacaccaacagagttattcattaatcgtttttctaaatactatacaccaattatcatgatcatctcagccctagttatgcttgttcctcctttattatttggtgggatttgggctgactggttttatcaagggcttgccgtcttaattgtaggttgtccgtgtgcccttattctgtcatcacctattgcgaacatctctggtattacaaggaatgcgcgtaacggcattcttgtaaaaggatcggtttatcttgagcaactgggtaaaattgatacgcttgcttttgataagactgggacacttacaaaaggattcccttatgttgagacatatgaaagctatcatgatgagaagtttttatctgtagcagcagcggtcgagaagcattcttctcatccattagccaaagcaattatgaagaaagtagctgattttccttatagaaaattcgaagcaaccaatgtcgaaacggtttcagggcaaggcattattgcagaggttaatggaaagagacattgggtaggaaatgaaaaaagcgttcgtcatgttaccatacctgagaatgttcaatcatcaattgatgcgatgaaaagagatgggctaacgcttgtcattgtagccgatgaaacaaagatacttggtatgtttggtattgcggatgaaattcgcgaagaaagccagtctgttatacgtgatttgcatcaagcaggtattaagaatacagtgatgttaacaggagatcatgagaaaacggctgagaaagtggcaaatcgtgttggtgttcgttcttatttcggcggtctcttaccagaagacaaagttgctaaagtgaaagaattaacaaacgaaggcaaagtagccatgattggtgacggaattaacgatgcaccggctcttgcttcagctgatcttggaattgcaatggggaaagggacagatagcgcgattgaaacagccgatattgtattgatgcaggatcatctcggtaagctgccagaagcggtctcgatcgccaagcgcgtgaatcgaacgatccgagtcaatattgcgctagcccttggtttgaaactcattgccctactccttactattcctggattattgaccctatggattgcaatattatcggatatgggggcaacgattcttgtgacattgattagtttaacaattttatgggagcggaaagaaaaagaaaagccaacgataaagaaggaagctgaaccccagcatacgtaaaacctctggttatccagaggtttttctttatgagtattttagaggatttacctaaatttcaggcggttaaaggtgtttatttaatcatgtcaacaagtgttgcgccgaattcgagtttggatttcattgtatatgactcaaaacgctcgtatgataagaactacagaaagttgcactgggataaggatcctatataagcgttcatatttactgattcaaataagaaacgtacaaacaaaatgaaaacgcttttaaagtgcggatgaaaaggaggaaatacgatgagtgaacagaacacagagaaatctggattcaaagtaaaagttcagcggttcggaagttttcttagcagtatgatcatgccaaatattggcgcgtttattgcttggggactgattactgcactatttatacctacaggctggacgccaaatgagagcttagctgagttggttggcccaatgattacttacttgctacctctattgatcggttatactggaggtaaaattgtccacggtggccgaggcggagtggttggtgctacagctacaatgggtgttatcgtcggtgcagatattccgatgttcctaggcgcaatggttatgggtcctcttggtgggtacgcaattaagaaatttgatcaggcgatccatgggaaaatcaaatctggttttgaaatgcttgttaataacttttcagcaggtattatcggtggtattttaacaattctagcatctatagcaattggtccggttgtactaggtctaaacaaagcattagcagcaggagtacaagtaattgtggatgcaggtcttctacctcttgcaagtattctaatcgaaccagcgaaagtactatttttaaataacgccattaaccatggtattttgagcccgcttggtatcgagcaagcagctaatactggtaaatcaattctattcttattagaatcaaaccctggaccaggtcttggaattttacttgcattttggtttgcaggaaaaggaactgcaaaacaaacggcacctggtgcagctatcattcatttctttggtggtattcatgagatttacttcccgtacattttaatgaagccagctcttctattagcagcaatacttggtggaatgagtggcgtctttactttaacaattttcggtgctgggcttattgcaccaccttcaccaggtagtatctttgcactaatgattatgacccctcgtggagggtatctgggagtactagcaggtgttgttgtcgcaaccgtagtttccttccttgtggcttcctttattctaaaacgctcaaaagatagcggagaagatatttcagaagcaactgaaaaaatggaagcaatgaaagggaagaagagtagcgtatcgtctaatctaaaaacgaatgcggaagagccaaaagtagaagcatcttcttatggtaacatcgctaaagtagtctttgcatgtgatgctggaatgggatcaagtgcaatgggcgcatcagtacttcgtaacaaattcaaaaaagctgggttaacagacattgaagtaacgaatacatcgattagcaacctgccgaatgatgctgacctagtcgtcacgcaccaggatttaacggatcgtgcgaaggataagcttccagaagcgaatcatatctcggttaaaaactttatgaatagtccaaaatacgatgagcttgttgctgagttaacttccacaagcgaaacgccagtaaaagaagaaacaaaaccagaacaagcagagcagaaagaaattaataaagtagtctttgcatgtgatgctggaatgggatcaagtgcaatgggcgcatcggttctacgtaataagtttaagaaagcaggacttcaagacattgatgtgacaaatacggctataagtaacttaccagatgatgccgatttaatcataacgcaccaggacttaacagatcgagcaaaagcgaaacgccctgatgctgagcatatctcagttgcaaactttatgaatagcccgaaatacgaagagcttgttgatagactaaaaaaatagttatagccagaattcgaggtgaaccacgtgtttatttcagcaagggaacgaagaattcttcagcttctattagagagtgatgactattatacggtcaaagggattgctcaagaacttgaggtgagtgaacgaacggttcaccgtgacttagtcggcgtagaggatattctcactcagtatgatttaaccttacaaaagaaagctggagtaggcgttcaaattgatggtcaagaatctagccgagctgagttgaaaagctatctagttgatctcaccattacagaatatacgcaacaggaaagggtgacgctgattctatgcaagctattggaatcagctgatcctattaagttagttggtctagcaaatgacttgaaagtgacagttgctactgtcagtcatgatttagacaaagcggaagaatggcttgaaaaaatgcagctttcattaataagaaagcggggatatggcgtgcaagttgaaggagctgaggccttgaagagacacgccatgagctccttgcttgcgcttgagtttaatgattcagacttttttacattgttaaagaagtcgatccaaaataaatctcaaggcagtgatctccaatctgcttccgaacgattgctagggttagttgatcgaaccaagcttttgaaggttgagacaatcgttgatgatgttaacaatgagctaccatatatgatcgctgacagcgcatatattggtttgatcgtccatctgacccttgctgttgagcgtattcaaaagggtgaaaaaatcgagatagacggagagtatttaagtaccctagtgaatacgaaagagtttggttttgctagcataatcggtagaaaacttgaagaatcttttaatgtcttaatacctgaagctgagattggttatatcaccatgcatttacgcggagcgaaattgagaaataccggagattactatttggaagaaacgaattatccgattctcgttaaaacaaaggagttaatccgctatgtagataaccacctcaatgcggatttagcaacaaatgaatcacttctagaagggttagtgacacacctcggtcctgctacgcatcgtgttaggcagaacatgaatattcataatcctttacttacaaaaataaaggcagattatgctgatttattccaactgctagaagaagcgttaaaagaaatttttccgggggtatccattcctgatgaggaagttggttttcttgttttgcactttggttcagctcttgaaggccgctttcaacacaacgaagtgaatattcttgctgtatgctcaagtggaatcggtacatccaaaatgctggcgactcggttgaaacaggagttgccagaaatccagaccatcaaaagtgcttctttatttgaactgcaagatgaagatcctgaaagctatgacctaattgtttcaaccattcctcttcctgattatgaaggcgagtatattaaggtaaatccttttttaacggaggaagaggcaacacgcattcgctcgacacttcaaaagaagtcgatgatgaaaaaaagaagcacggtagagaaacctaagaaggaaaaggaatctttatttatttcaaacgatgaggcaaatatctggtttcgtaaagctgcattatatagcacgactatatcttcggtattagaattatttcgagtaaatcaatctgaacacaaaaaggtcgagaaactcttagaagaagagtgtatgcgactagaaaaacttaatgcgatcagccaatcatcagaagttaaagaggcgcttctgaagcgtgaagccattagtggagtgggtattcctgagacttcacttgcattgtttcatacgcggacacctgaagttaaaaagtctgtgtttacaattggtcgattgatggaaccgattcagagaaaggcaatggatggttcacttattgaaatggatactgttcttttacaactggcaccagaggattcgccagcggaaagtattgagatcatgagctacatcagttcgctaatcattgaatcaaatgaaagcatcgcacttttttctgagagcaatcaagagtcaattgggttataccttgcaaataaaatgaaaagttatgtagaaaaactattaggatttaaaggagacgattgaaatggcaaaagaaattctatcaactgagaacgtattactaaacgaaacggcagcaacaaaagaagaggctatccgtatggctggtcaaatccttgtcgacaacggttatgttgatgaaagctatcttgaacaaatgcaagaacgcgaaaaaatcacaacgacttacatgggtaattttgttgccattcctcacggtacagaggatgctaagaaagcagtaaagcattcagggctatccatcatccaactacgtgaaggcgttgattttggagacggaaatattgcgaagattatcattggtattgctggtaaggataatgaacacttagaaatcctttctcaaattgcgattgtttgttctgaagaagaaaatgtagaagagttgattcaagcggattctaaagaaacgttaatctctatgtttaacgaggtgaattaatcatgcttgccgttcattttggtgctggaaatattggaagaggctttattggaaagcttctttctcaatcaggatatgaagtatgcttcgtagatatcaatgagactgtgattaacgagcttaatgaacgaaagagttacacggttgaaatattaggtcaggataaggaacagattgttgttgaaggcgtgagaggtattaacagccaacaagatcctgaagcagtagtcgatgcgatctatcaagctgaccttattacgaccgctgttggtcctaccgtattgaaattgatttcttctgctattacagaaggcatttcaaaacgtatcgcagatagaaaagctcccgtaaacgttatagcatgtgagaatatgatcggtggcagtacaatgctccgaaatgctgttgaagaaaaaatggatgaagcagatcgcaaagcccttgatcaatacgctggtttcccagatgcagcagtggatcgcattgttccgaatcaaactcatgaagatccgttaatggttgcagttgaacctttctatgaatgggtcgtcgatcaaacgatgatggttggagaggttcctgatatcgctggtcttacgtacgttcaagatcttgctccttacattgagcggaagttgttcacagtgaatacaggacatgccgtgacagcttaccttggttatcaggcagggtatgaaacaattaaagaagcactagacacagaagctatctatcatgatgttaagaaagctcttgaagagtctggtgaattacttcagcataagcatggttttgaaaaagaggagcatgaggcttacattacgaaaattcttggtcgttttctaaatccacatctagtggatgaagtgactcgcgttggaagagctccaattcgtaaaattggacccgacgaccgtcttgttggcccagcacgtcagcttgcggaattaaataaagaaccaaactatcttgcaaaaggaattgcagcagcattacgatttgatcccttacaagatgaagatgcagttaatattcagagcaaaatcaagaatgagggtctttcaaatgcgattactgcttttacgggagtaaacgagggcgaaactttgtttgatttaattagcaagcactataaagaaatgtcaatcagctaatagaacggagaagctcatttagggcttctctttttttgtatatttcgtatatttttgttacgattttgcattaggacttgtgtcaaactcaatacaattctactattagagtatgacatgagtcatatccattttttaatgggaaggggaacacgaatgtttaatattttattacagtctcactcaggttcatgggcgattcttgttttgcttttagtgattagttattttgcacctaagcaaaagatctcgctaatgcttcaacgcttattttatctgattatgcttactacaggtatcgtaatgctctttattcttggttttccactgatctatgtacttaaaggaattctggcgattgtgctaatcggtgttatggaaatgattgttggaagaaagaagcgtggcgagtcaacaaagatgctttggatcgcgtgtattgttctaattttagtgattatttctatcgggtacaactggatttaatacgaaaaagcgacgttccgtttacgggacgtcgcttttttagcgataatctatgcttttcgggactaaccggtcacttccgcttttgtttcatctagctgcaggaccccagtccctcgatcgcttcaccatatgaaatgaacacaaagggcgtgttcttttcatatggctccagcgcttttcgggcctcccggggcccttccgcttttgttattcccagggtttttgggtggttaggaggccggctagttctttactggcttgtctgtgttctcttcgtttttctgctcttgctggtgctgtttcgtgtagatttgtttcttcttctgattctggaattacttttgggacgggaagtggttttttattttcatccagtgagacaaaagtaagaaatgctgttgctccgatatgtcgctcgcctgataagagatgctccgcaatgactttcacaaatacttccatagaagactttccggtgaatgtcacgtatgcttcgagacaaacggaatcgtctggtgtaattgggtgtaagaagtcaacagagtccgttgaggctgttacaacttcactacgacagtggcgcattgctgcaattgatgctatatcatcaatgtctctcatcagttgaccaccaaataaggtgttgtggttgttggttgcttctgggaatacgtggcttgtttttactacacgtgattcacgaatatatttagattccatagtcgtctctccttagtatgcttttcttgtagtctatctttactatgcccttgattgagaggtgaaaaacctctgtctttacgaagaagcgaagaggttatcaaaaatagctgttatatagatgattccattcatcgtcgtttacgttaaagacttttttgtaatgattttgagtgataacaagtgaatcatttgtaagggtgatccgtccattgtttgtcgcaatcgtcactattgtatgattcgtaaatggtgaatttggatgagtttgaacaaatgagcttaatggttcatattcagccaacgttcgaggctcggttgagaagcgtatttgagttttccaagtgtcgttgctaactgcttgttgaagatcatacacatcatttgaacgatggacaattctatattggtgaaacccatcatcaacgatttcacccgagagaggaatcggtgtttgactcgagtttccaaagcctacatcggttaagtaagttgttccttcgagttcgacaaggttagttaagtgtgtattttcttttccccaattcttttcatcaatcgcgacagtaccagtaaccataactgttgtaaatccaagttgagtaagaagccagttaaagagaggatttagttcaaagcacagtcctccgcgcttgttttcaatgatttttgcatacatactctcaagatccaaatcgatccatctttttctagaaatatcgaggttttcaaaaggaatctggtgcatgtgatttctctgaagtgattgaagagaatgaaaattaacctgcacttgctggatgctaattcgcttaagatacttctcaacattcatacaaaaactcctttctcttcattttctattttcgtgcagatgggttcagaacgcaatgaatttacctgtgtagtcatgaagcattttccttagggaataataaagtgaaaaagggagtgagagtgtgaagaagtgggtttttattatgttattggttatgtaccttccaacgcaggtaggtgcagaagagaatcgtgagctggctatcgttattgatgacttcggaaacgatatgggtggtacggaagaaatgctacgacttcctgtaacattaaccgtagcgattatgccatttcttgaaacgactgaaaaagatgcggaagaagcgcataagtttggacatgaagtgattgtgcatattccaatggagccattgaaaggaaagaagagctggcttggaccaggagcgataacaacagacttatctgatgatgaaattgagaagcgggtaattgctgcaattgacgctgtgcctcatgcagttggtatgaatcatcatatggggtcaaaagcgacagctgatgaacgagtgatgaaaatcgttcttgaagcgtgtcgcgaaaaaggtctttattatttagatagcaaaactacggggaaaagtgtcattcctgatcttgcagaagaaatcggggttccttatcttgaaaatgaacttttttttgatgacgtctatacgattcagcatatgagtaaaaaggctcaagagcttgcggtaaagcttaaagataatcaggcacatattgccatcgggcatgtggggatagccggtgaaaaaatggttgcggttttaaacgagtttattcctatgtataagaatgaagcagtgattgtaccactatctcagatgataccaggatttgaaatgattgatgagagtatgccttaattattcttcctaaacttatttttaaatgttaacattaatattatttaagttaacatttaaagggggagaacgatgatgaaacaaaaaaagcttcgaatgacgattatatgtgccttttttgtagcaattacagctattcttgctcaaatggaaattcctttaccacttgttccaatcagtgggcaaacattggctgttggcttaaccgcaacgattcttggtcgtaagtatggtgcgatttctatgattggttatgcagcgataggagcaatgggtgttccagtatttgcacaagccaaaggtggattaggcgtattattaggaccgactggtgggtatatttttgctttcattgttgcagcatatgtaaccggtcttattcttgagaagacatcatttacattaatgtatgcgatgatcgcgaacactgtagcgatgattattatcttgttgctcgggacaattcaattgaaattcattgtagatttaagctggaaggaagcgatgatttcaggagtttatcctttcattatcgttggtttgattaaagcatttcttgcaagttggttaggaattactattcgtagacgtcttgttcaagcaagacttttacaacgtacaatgggatcaattcaatcgtaaactgatccatgaggacacctcattcgttagctaggaaacaaaagtgaggtgtccatggtgaaagaacgaatagaatggggcttattatgtggtcgcatgatacttggaattattatgttagctcatggcatacaaaaactaggtgcgatggagaatacgattgcgatgtttaataagattggtcaacctgcagcacttgcatatgcagcagcgattattgaagcaattgggggagtattcctgattactggaatctttgtcataccatcagcgatccttcttggattaacgatgattggtgctattgttctggcaaagcttcaaatggggcttattggaggttatgagttcccactttctcttcttggtatatcagtaattttagcttttactggtagtcgaaaatttgcgatatctgaagttatcacgaagaaaggttgagtaactcaatagcattaaataaacgtttgtttcattttattagttcaaaaaacgccctatcagatgagagggcgttttagtctatttaagaaaaaaggaatagatctcgaatatcactactatttatggaatatcataccccattgaactagtaaggatttcaaaccactgatcacgagttaatgagtacgaaagggcatcaactgcactatcgatacgctcaggcttacctgatcccacaattggcataatgtttgccggatggttaaggagccaagcatatagaacttgatccataccttcagcaccgatttcagatgcgaccttcttaaccgtgtcgcgaagacgtacggctttttcgtcattcgaagtgaatacattcccacctgcaagaggagaccacgccattggcttcattcgtttttcctgacagaggttaagtgtaccatcctcaaaattctcaaggttataagcagaaagctcaagctggtttgtaatgagaggctgctcaacatacgattgaagcatgttaaattggtggtgtttaaagttagaaacgccaaaatgacgaacttttccttcttgttttaatgtagaaaaggcttcagccactagttctgggtccataaatggatccggacggtggatgagaagaacatcaatatgatcaataccaagtgaggtgagcgattgttcagcagaagcgataatgtgctccttacttgtattgtaatgatgtgattggtgagctggtctgtttggtgattcaattacaataccgcattttgttacgatttccatttggtcacgtaaggaaggtttcagagcgagtgcttttccgaaaagctcttcacattcgtaacttccataaagatcggcatgatcgaaggttgtaatgccacgatcaaggttatgttcaatgagtgaaagggtttcttcactcgtttgattccaatctgccagtcgccaaagaccatgaataatacgagaaaaagataagtcttctgttaagtgaacacgctgcatagatagtccccctattttttatgtacttttcttataatagaggaattaaaccgcttgcacaactaatgagtcttaggtgaaatgtgcttgatgttaatgataatgcttctcattatcattgagccgtgctataatgaaaaaaacattcaaataagaggtggataaaatggttgaaacgttacagatatccatgtttttgttcattttgctcttgtctttcacagcatttgcgctagttttgagagcagaagcggttaaaaatggatatggacgtgagaagaaatcaagcgcatttgaatcaacaccttcgatttcatttaagaaaagttattgactttgtaattgataaagattatcattatcatcatagaagagaatagacatagtgttccccgacacaaattgtcctatataattcaaacaaagccaaagaagttcccccttctccaattgtttgatgatcgtagctgccaacgccggcagctatttttatttgtcaaattttataattatacaaagcttatattgtatcaggcttcaaaagaaattattatccatttattctcatttacaaaataaaatttagtgctaaactattttttggaagtaaacatcaatagggggtttgacatatgaagaagttattatctgttttaagtttatccatgcttctaatcgtagcagcgtgcggttcaaatacaaacagcgaaagtgaaacgagtggagaaacagagcaagcagatacgaaaagtgttctactagattttcaatcagaagtggtgagtgttcttaagaaacataatgacgcaatcgtcgcttatgaatcagcaaaagctgcttttcatgacagtgaaacacctgaagcagagaagccttcaacagaagagcttgaagagttaaaaggaagtgctgttgaagctagtaaagcaacagtagaaggtattaaaggtctatctgttccagctgaactagacgactctaaagaggaaattgagagttcatttgacgatttaacacaagcatataccattcgcgcagaacaagcggacattgctgatccttctgtacaagagaaggcgttagagcaatttacgaaatttgaagataaaatgggtaaggtttttgaagatactggtcttattaagccaagctttgcgaaagagttacaatagatatgccaggcccctgcatgtaatgcgggggttttttgtgtattaatagagtgaacagaattcacttatgataagctaggagagggaaagtagaaagaagcttaatttatataaaggaagtgtcactatgaacacacgtttatcaaaaatgacagattggcttattgaacaaaatcaagactttgcttatattcattcaccttcgaatgtcttttacctatctagttttcactgcgaaccgcatgaacggttacttggtctttttatcgttcctaaccaagaaccattccttgtagttcccgggatggaagtttcccaggcgcgagacgcaggatgggaatatgagatcatcggctatagcgattcagaagatccttttgactttattcatgaggcattgaaagagcgtggtgtgcatcaaccaacaagtgcttcaattgagaaaggaacgcttgcctatgaacgtgctgaagaattgcaaactcgctatccgaaacttcagtatcattcagcagagcttggtctgaatcaatttcgtcttattaaagatgaggaggaaattgaagtattgcgcgaagcagcagcacttgctgattttggtgtagagaccggggtaaaggctttacgcgaaggcgttactgaaatggaagtactcgctacgatagaatttgagttgaaaaagaaaggtattcgagagatgtctttttcaacgatggttttgtttggagagaaatcaggtcaaccacatggtaaccctggggatcgtcaattgaaaaaaggtgacctcgttttatttgatcttggtgttgtccttaacggttattgctctgatattacccggacagtagcattcggtaaagtgaatgagaagcaagaagaaatctataatacggtattacgtgcccaaatggaatcactttatatttctaagccgggaactagacttggcgatattgatcttgcagcacgaaatgtgatttctaatgcaggctatggtgattatttcccacatcgaatcggtcatggcatcgggattgaagtacacgagtttccatcgatgagtgagaaaaacgatagcttgctccaagaaggcatgacttacacgattgagccgggcatctacttgccggacgttggtggggtaagaattgaagatgatgtgcttgttacggagaatgggtatgagacgttaacgaaatatccgaaggaattacaaattattgaataagtgaaaaagccagggccgactctgataaggagtcggctttgtaatcgtattgtcacgtttcatctttttaaaagtcgattgctgtggtgtataatgaaactacattttggtgtgaaaagaagagaggtacagctgtgaaacctgagcaaaaaagtgagtatctgttatttggcgcctgggctacttcagtccttgcccttgctggaagtttgtatttttctgaagtaatgaaatatgaaccatgtgagttatgctggtatcaacgaattcttatgtatcctttagtcattttccttggaattgctatgataagaaaagatgcgtcgcaatggttatatgtcttgccgttatcggtcattggtgtatgtgtttctctttatcattatttgattcaaaaaacatctttttttgcagattcagcgccagcttgcgggagagttccgtgtaccggagagtatattaactacgccgggtttatcacgattccttttctagcactcattgcttttctttcgattacgatgatcatgttgttgttaaataagcagacgaaaaaggagaaaaacgtatgaagaaagccattatttttcttggtatcattatcgtattatttggagcgctcgcatttgttacaaatttaagcaatagcgaaaaagcagagggaaatccttacgggaaagactcactagatcctgcaacgatcgatcagctcgatgatccgctttaccaaaatcaaattcttcctgatgagctcgataaaacactttcaaaagaagaagatgcatttgtttatttttatagcccaacttgcattcattgtaaaaacacctctccgatacttgtgccactcgcagaagatatggatattgacctaaagaagtacaatgttctggaatttgaacaaggttggaatgactatcaaattgaatcaacgccaacccttgtccgatttaaagatgggaaagaagtcgatcgcattgttggcacccaaacagaagaaacgttcaaacaatggattgaacaaaataagtaacaaacgaaagcacctggctcaggtgcttttttatttgggcacatccgaatgtttataggtgtttcaatcgggaactagagtggtgtagataacatgaaaggtggattatcatgagtcatattaatggaaaagtcgttattattactggagcaagtagtggaatcggcgaagcaacagcaaaaaaacttgcaggcgacggggcgaaggtagtccttgcagctcgacgtggggatcggctagaagaactgaagaaagaaattacaaatagcggcggagaagcgatcatccaaaaaacggatgttacttcgagagagcaaatgcaggctctagctgataaaacaattgaacagtatgggcaaattgacgttattatcaataatgcaggattgatgccgttatccttcttgaataaacttaagattgatgaatgggataaaatggtcgatgttaacataaaaggagtactttacggtattgctggcgttcttcctcatatggaagaaagaaaatcaggtcatatcattaatgtttcttctgtcgcggggcatgaaattatgccagccggtgcagtgtattgcggtacgaaatttgcagtaagagcaattacagaaggactacgaaaagaaatgtctccttctacaaatatccgagcgacaatcatttcaccaggggcagtagcaacagaactaacgaatacaattactgatgaagatgtacaagagaagttaaacaatcgtggtccaaatggtctcgatccactcgacccccaagcgattgcagatgcaatctattacgctgttggccaacctgacagtgtatccattaacgaagttcttgttcgacctacttcacaaggataaaggtaaagaaaaatccgtccccctagaggaggacggatttttctttgtaaaagaagctaaaacattgtggcgaccattctagccaattgagcacagagaacagctgcatagctaccaacaacgttacctacaattcccatcaatagcccaaccggagcaagtgagggttgaaagacagaagcaacgattggagctgagcttgttccacctatatttccttgtgatccaacggctacaaagaaaagtggcgcacgtagtaatcgtgctgcaataaaaataacaagaatatgaatactgagccatacaatacccatcagtacatattgtggtgaatcgactacatatgcaagatcggctctagccccaattgttgcgagcaaaaggtatatagcagtatagccgactttactagctccatatccctctaactttttaacaggggtgaaagagaacagaataccgatagctgaaataatcataacggtccatgtagttgtagaaagaacggctgtctgcgggaggttctcagaaattttcaatacgatgtaagagacaccaaatgcaagtccaagtaagcctaatagctgaggaacttgaataggacgttcattcttacgttgaatatcattcatttctttattcacgctttgaataaccgagtcatctgctttgttccatttattaaatttatcttggaatcctgcaaggaaaatcataatccccatccagctataaccaacaaccgtatcgacaacgataatgggtgataatatttcttttggcgttccgactgcttcgatcattgctgccatgttcgctgatccaccaatccaacttcctgctagagcagcaacacctgtccaagcattctctggtaaccatggttggaaaatggcaagtgcaatcggcccaccgataatgacaccaatcgtaccagcaaggaacatgagtagtgcttttggtcctaatcggagtgtagcaggaacgttagctgataacagtaacagcaacaatccgacaggaagaatatacgttgaaacaaatccatataaacttgactcttgcggaataatagcaaaagtcgttgagagcattggaataaagtatgtccaaattaacggaggtgcgtaatggaaaatcttttgcataacggcgttttttgactcgccaagcataaagataaatccaacgacaaccgttagatagacaaatacagccatcggatcctcaattaagggattagcctttgaccaggctagggcaaatgtcatgattgttcactccttgatgttagactatagtcgcaaagaaacattatatcatctatcacgcttgcgacgcttttataaaaaattatagaaaaattacaaccattaaaaaaattcatagcttgtatgaatgacgcatacatattgtgtagagtgaggttaaaggagtgaattcccatcggtctattaaatgaattccgtcattttgctattagaggaaatgcagctgatatggggataggtattgttctcggtgcagcatttagcagttttatcgattcactcgtttcagatattattcttccgccagtcggtcttgttttagcacaaatcaattttgcagatttgtatattagtttgaatggtcattactatccttccctctccgatgcgaaagaagcgggagccgcaacaattaattatggtgtgtttctaacgacctccatccgctttttaatcatttttttctctgtctttctagttgttcgtcaactaaatagatggcgtaaacctggacaggatccaataaattcaatgactcgcaaggaatgcccttactgttgtacacccattccttctaaagcggtgatttgccccaattgctcgacatcgcttcgagaagaaaagaaaacttctttatcgattcattatggaaaaggatcaaaagtttcaaagcgttaaaaaatagattgggaagaagcacaataaccggttaacttttttctcctagtggtattataaaaagtaaactttaggaggaaaggtgagggaacgaatatgatcggttgtttgctcatacatggatttactggtgcaccttatgaagttgaaccgctggcagaatattttcgaagccatacaaattgggtcgtttcatctccaacgcttccagggcatggtgaacaagattcgcttcgcggtattactttccagcaatggattgatacggctgaatctcatctccaacacttactagaggaatgcgacactgtatacgttataggtttttctatgggcggcgttctagctggttatttggcgacaaagtatcaagtgaataagcttgtcttattaagcgcagcgcttcaatatattcatcctattcaaatggttaaggacattggagggatggtaacggacctatgtaggggacaactattccaaaacgaattgtttattcgctatagtcgaaaggtgagaagtacaccatttgttgcttcgttagaatttcgtaagctggttcaacatcttaagccttcgtttgaatctgttttcactcctacgatgatacttcaaggaaaacttgatgggctggttccttataaaacggcagatgcgatatacaatctcatcggttcagaagagaaacaggttagggtgatggagaattcaaagcatctcatctgtcatggggcagatcgtgacgaggtaattgattccgtttattgttttttaacaagtgaaatcaataaaaataaataagtagaaaagaacgacggacctgcttcgtccttgcaagattttcctaatggtcttggtgaaaaggagaaaatgagatgagacatgtactaatcactccactaatgattgaaaaatatgcaaaacgtcttgttgatcgattgaaaagcccgttgttaaagggcgttgtgattacgggaagttttgcaagaggagaagcaggtccatattccgatttggatatttggtgcttttataacgagtcgctgataaagtcaccttctttgccagaattaatgggtatttctctagatatgagagaagtatgcttgaaagattttagagatgtggctgatggttcgaaagaatatgtagcaccgtgttttgagcaattaaagatctacggagagacaccgtttgtcctcccttcaagaaatgagataaagaatggtctaatgacattattgctctctattgacagtcgaataaaacagtttgtttcaccaatgaactcttacgaattactaaacgatcttatgtacattcttcgcatcgaacgttttttcgctacttctcaatatccattaacgctttcagaactctattcgatgcaaattgaggcgagcgatcgctttcttgttgagctttattcggcctttttatttggtcataatcatcatcaaagaacggaagaagaaattagattcgctgtgcagcgatttgttcagaagcgcttaagcaggaattctcttatggaacgagaatctgattaagagtagataaatgctcctgaaatagtaaaaggcagggtgaacagtatggcaacgtttgatgattttatgaagcttgatattcgagtaggcgagattattgaagtcaacgattttaaaaaggcgaaaaagccagcttatcaattaaaagttgatcttggtgaggaaattggcataaagaagtccagtgcacaaatcaaggatctttacgaggttgaagatttagttggtaaacaagtgatggctgtcgtaaactttcctccacggcaaattgctgattttatgtcagaaatccttgttcttggtatatatggggaaaaaggtgttgttttgatacagcctgatcaaaaagtaaagaatggcgataagctaggataaggagtgtgctttagcactcttttttgttgttcatcagccttctttttttcgctaggtaatgatcgattttgatgatggattggagttggggagttgaaacaggaagaagcagtaagagtcataacagatcatcttatagaggacccgctcgtaaaagcggtatttcttaaaggatcgatgggacgggacgagcatgatgagaattcagatatcgatctctattgtctcgttgatgagggagacgtgggagcttttctaaagaaacgaaaaagctatttagaagcctatagtagtcttcttttctatgatgaaatctttattattgcgccacaagtgattgccgtgtttgataatttgttgcaccttgatttgtttacagtaactgttgaaacattaattgaaaaagatttttgcagagtgctttacgatccacatcgatgtctaagtcattttaacgaacagttactattatcgaaacaggagtttattgatcatgttgatgatacggcatttttcttatttcaatatgaaaagtccagaagaagaggaaatgacatttggtcggttcatctgttgaatcaggtcatggttcactattcaagagtcgttctccaccattaccatcctgagagagcgcagctgggattaaaagcgctccacacaacacttaaagaagtgaatcttgaaaaaacgaatgaaatcttccagcatatgacgatacacgagcatgaaaaagcagtacgattgataagaaattggctcaaagacgaggaggactggatacgaaatcagcttcaaggaacaacgtacagtaatgcatttcttaaacggatgattgaattaaattgattgaaaatagaaataacaaaaaaggtgctctaagcaccttttttgttatgaaagttactgaacagaaattgtctcaggttcaaaagcaattttcgctccttcatagatcgctcgcttagcatcaagctctccagcaagtcgtgcaccaccgatcacagctatatcgatccctttttgtgataggttttcatattcctcaggtatgttcgactcctgtccagcagccaggatgatggtctcagctttcaggaattcttgctcatctgtctcactgtttgtaatctttaatccttcaggtgtgatttcttcatatgaaaggttggttctgaacgtaaccccatttttcttcaagtcttgtagcatcgcccattttgtcgtctttccaagcccttctcccatttttccgtttcgtctcagaagaagaatgtcgtgaatccctttttcgatcagaaagtgtgagacatcacacccaattccacctgcaccaatgataataactttttttccaacttctcggttcccagaaagaatttcagggtatggaatggcgtgtttaatcccagggatgacaggcagccttggaacaacacctgtcgcaagaacgacgagattaggtgagtgggctagcaagtcatctgcatttggtttatgattaacgtaaatttgaacgcctaatcggtttagctctgttgtgtagtaacgaatggtctcatcgaattctttttttattggaatttttcttgcaagattaaactgaccgccaatggctgcatttgcttcgtaaagcgtaaccgtatggcctagttcagcatgggctctcgctgcctccattccggcgaccccgccaccgataacaaccactgtttttgttttgtccgcttttttgattgtccatttatgttctcttccagcacgagggttaacaaggcaggagacggcttttccttcaaaggcatgatcaagacacgcctgattacaagcaatacaagtattgatttgatcaagagcttgtccttttgcttttgctagtaaattagcgtcagcaaggaatggtctcgccattgaaaccatatcgagtttgtaaagcagttcttctgctagaagtggatcattaatccgattgctaccaatgaccgggatgttaacagcttctttgattttgagagcaggttcaatgaagccagcgcgcggcaccatcattgaaattgtcggaacggtagattcgtgccaaccaataccaatgtttaaaatatcagcctcatgctcttctagcttctttgcaagttggattgtttcctcaggtgttgaagaatcaggcacaagatcgagaccggacatccgaaaaataattggataatcgtccccaacagcgtttcgaacggatttcagtacttcgatcgcaaaccgggtgcgattcttaaaattgcctccccatttatcagatcgcttattcgtcctaggtgacaggaattgattaattaaatacccttcagaacccataatttctacggcatcaaagccaacagctttcgcttttcttcctgcttctgcataggattcaagcaaattgagaatatcgatttcagttaattcttctggaacctctctgtgtataggcgattttataggagagggggcgacggatggcactccattcatttgtgaataggcatatcgaccagcgtgaaaaagttgcgcagcaatacgtccgtttgcctcatggacgctgtctgttagtcgtttcatcactctaagatcatcttccctatagaaccctagaaaatgatgtccaccatctccttcgggagaaacggaaatgccgccagtaacaatcagtccaggaccgttatcacctgaccgttcagtatagaaggaaatgagtgcatcctcctgatccttacttccttccattccaaggtgcatggaccccatcatcactctgtttggcaaggtcagtcttcttaattggataggttcaaataatttttcccacttcatttaccattcaccacacttcttcgttttgaacacatttcgatgaatggtcattcatttcctgtaaagaaagcgcttttttatttattttttataaggaaaaatgataagaaatcaaaaaagagcgccagcggcgctctttctaaacatgctttttagtttttcttaaaggcgactaaaagtccgccttctccagcgtatgttccaataagaggtcccatggttgacagaatcacttgtttaaacggatagcgttcttgaatttgttcgatcaaagctttcgctttgtcttcgcagttactatgagcgaccgcaatcactttatcttcaagattatgtccatagtctccgattttctggataaattgacgaaccgctcgtttattcccacgaattttatcaaggacttcaagtgagccatcgtcatcacttgctttcataaggagtttaatattaagggcagaagcaatggttcctctcactcgatcaaggcgtccccccttgataacgttctcaagtgtatctagtaaaaacatcgtaagcgtatcttctgtatactcatgtgcttgttcaacaatgtcattaaagctatgaccatcgcgtgccatctccgccgcatgataaacaataatcccaagacctgatgaagctgttttagagttgatcacttcaatgtttcgatcaggatgttcctcatgaaacatttttttcgctagaacagcgttgtcatacgtactactaagtgcttcagaaagcgctactacaagaatatcgtcttccggacttgtttcttcaaattttgtaagaaagtcctggggcgatggggcagaagacttaggaagttcttttgatttttttagtttctgatagaacgtcggtgtgtcaagatctactccagctttgtattctttgtcaccaaagagaaggttgagtggaacgaccgttacgttcaattcatttagcagttcttcagggaagtcaacactgctgtcagtaatgattcgagttgccatacaattacccctttttcgttattacccgcatccaggtattacgtctattgtaccatgcttccactcctaatcgaggggaagttattgctcatggatgaagagtgaaatggacagcctaatagaaagatttttgagaggtgagaacgaattgacaatcattcaacttggctatgtcgctatgagtacagaacttgtaaacagctctccgtctcagacgatgacttacgcgcaatttcagaaaatcaaaaacacagaagccgcgattcgaaagcttgagcggatcgctaaatcaaacttagaaaattgtctcagacttttaaaacataataaagggaatgatattcacttctttcggttaagttctcgcttaattcctcttgcaaaccatgaggctctggaaggatgggattatttaacaccgttaaaaaatgagttaaaagaattgggcgattatgcaagaaaagaaaaaatgagaatcggttttcacccggatcattttgtgctgcttaattctcctaaaaaagaaatcttacaagcttctgttcaaatgcttgctttgcacgttcggcttcttgaggggatgggtatcgattcgacccatcgatgtgtcttgcatgtgggcggtggttatgacgacaaagagctgtcgcttgaacgctttatccataattggatgtataccccacagaaaatacaagaaaccattattttagagaacgatgatacaaccttcacacttttggatacgctctatttatgtgagaagttaaatgttccaatggtttttgactatcaccaccatatggcctgtcatgaaaccaaagagtgggagaagcattgggggagagtggttgatacttggaagaactcgccactccctgtgaaaatgcatatttcgtcacccaaaagtgagcaagaatttcggagtcacgctgattatgttgacgttgattggttcttttcattcttgaacaaagtaaaagggagtaccgaacaggttgattgtatgattgaagcgaagcaaaaggatgcggcattatttcaattaatggaaaaaattaagaagcgagatgatatcgagctcattgatgcgtctacatttagaataaagtaaaaccgggcatgctttgcccggttttactctgtgattcttttgcttctttgttttgttgagggttttgtttcattggcatggtcaactgcctgagaaagttctttcttcattccacgtttttttccctttgccataaaatctcctccttacatgaagttagcgtgtccgattcggcgagttttatccgttagcggcacttcttaaacgtgattctttcgcaacttatgtcaacgacccaaatggagaagagatggaatggattgaaaaaatgcgtctcccaaatgatgagccacattagcttaagtatgaggtaatggcttgataacacgcctgtttgtaagcctcgtgttgcgaatggtctccagtcatcatccattgaatcatatatccgtcaatcatggttcgtatggctcgaccagccgtttcgaaatcgttgacaacaaaggtcttttccttcgctccctgcgttaaaatctccttagagattgaagcacaattttggtaaaagcgttcgttaatttcacgatatcggttgttttttgtagcctgtgctagaaagtccaaataaacacggtagaatttctcgttttcttcagcactaacaaacacagtatttatataagcttgaagcatgctttctgcagatgattctttttcaaccgcttctttttctttctcataaatccgctccgtaatttgagcgagaagatgagcaaggacatcttctttgttttgaaaataataattcggaacgcctttacttacattggcataatccgcaatatcttgtagtgttacggcttcgtaacctttatcagaaacggcttgataagctgctttaataatttgttgccgttttaactctgctttacggttcatctgagtcctctccttacagagcttattatacaggaattcaaataaggattaaagaattcagattaattgaccggtcagaataatttctgttaagcttataccgaatgaaagatcaaggaggaataaatatggatcaatttaaagcattagttgttaataaagttgaggatgatacaaatatagcgattcaggaatttacgaaggaagacctacctgaaggtgatgtgttgatcaaagttcattattcgagtgtgaattacaaagatggattagcagcgcatccaaaaggtaatatcgtaagaaactatcctcatgttccagggatagatcttgcaggagttgtggctgaatcagatcatccagattggaaggaaggagaccgcgtaatcgttacgagctatgaattaggcgtctctcattatggcggctttagtgaatacgctagagtaaaatctgactggattgttccgctccctgatggtttatctcttaaagaagcaatggtttatggaacagctggctttacggcggcgctatctgtttaccaacttgaacaagcaggaattaagccagacaaaggccctgtccttgtaacaggcgctaccggtggagttggaagtatggctgttgcgattcttgccaaaaagggatatgaagttgcagctagcacagggaaagaatctgagcatagctatttaaaaaagttaggcgcaactacgattatgagcagggaagaagtagctccagaagggtttaagccaattggtaagcagaagtgggctggcgtagtggatccagttggtggagaaacgcttgcagctgtactaagtaacacaatgtacggcggtgctgttgcggttagtggtcttactggcggggccaaagttccaacgacagtatttccttttatcctaagaggcgttaatttactcggaattgattctgtgtactgtccaatggaaaagcggaaagagatttggaaaaaagctgctgatgaatacaaaccttctgagcatcttgaagctattcaaaacgaaattactcttaacgaactaccagatgtattacgcaacattttaaatgggaaagttcgtggcagaacaatcgtcgcattttaaaaccgggaggcggagcaaagctctgcctcctttcttttattactgttaaggttttactcggcaaatggtaaggccatcacaaagaggcaggagcattgcttccactctctcatcagtggcaacttgttcgttgtattcgcgtatcgcggttacatgattagtggttacattttcatcaaaaacgttgtcaccctggagggtattatcagctacgataactgctccgggtgtagctaattttagagcggcttgaaaataatttgggtaattgactttatcggcgtcaataaagaaaaagtcgtactgctgaccagcgctatgtaaagactccatgttctgaagagctggaccaatcacatacttaactttatcgccaagacccgccctattcaagttgtctttcgcgacatttgcataagcttcctctaattcgagcgacgtaagtgacccttctttatcaagtgcgctagcaagcataatgccactatagccgcctaaggctccaatttccataatgtttcgtggcttagcaatgctgacaagtaaagagagaaagcgcccaacctctggtttaactgagatagcaggcataccatttttacgaatactttcattgactgattgcagtgcttcgtcttcatttccgaatagatgttgaatatactcatcgtggttacgtgccaagcaaatctcatccttcctcgtattagtggattcgtactcattgttatgcagtcaaaggtggctgtcaaggttaaagtgttacttttgaaggagcgtcgaaaggaaaggaaacagtaaaagaactcgcttcattctaatgctgaggagtaaagacctattagtttccacaatacttgggaaagtaggaaacgattcacgctaataatcctactaaagttattgttatttcccaatacccccttcacgaattgtttgttaaactagtaataacagcaaggatcggttgcaaacatctatcctttttcctacttgcctcagcggaagaaggcagctgattacgaagggagcgtttagaatgccgtttgagcaagggagcaaagcactaaaatctgatgggcataagcacactacccaaacatctgagcgggtcaatgtacccaaactaccaatcgcaagtgaagaaggcttctctaatgttgtgagggattcaaaccaaaattattggtttaccaaacaactttcgcctactcatgtcgaggtttacgtctttgttcatagccttgctcaactaagaacgttccaagtaaacggtaaaccaagcttctatgaatatcctgaaaccatttgtattgcttgtgaaggagaagaatggaacggttggatttatgagttttcaaaggaagacccaagaatgacacatcagtggcacgtgaatggaattttttgtgacttaaaaagaagaggaaatcagctcattgtatcatcgtaccatgttgaaggggatgaggccctgttaacaacgtttggtgattctggcaaaaaggtgattcccttagaagctggctattctccggtaagcatgatggttgctgaagagggcgtttatgttgctgctttatcgatttctgcttcttaccaggatcaggttcttttacttgatgatacgtatcaaattaaaaacacctttaaacttgatttttcaccgcgaacgattcattcctggaacgggagtttaattgtccatggtattaacagaagaactggtaaaagtgatcagcttgtttacatctgttccaaaactggtcgacaggagaaattcccaataccaagttgtgagctagttcagtgttcagagcagcatttaactttttataatgcagatactaaaatattatcgatctgggaccatcaacaaaaagaaatcgttagtatgagagaatctgaacggccttacgtatcaaatcacttttaataatagtaaataaaacttgagctgaaaaaagctcaagttttttgttgttatgcaacctttcttatatgaaacagaggaatagaaggcataacctaagaatgatataattgttctaatacttaagagatgattacacattcaatagaaagtgaggaagcggatgcgactggaaccttcaaaacgaattgacccaaaagggttgaaagtatggcaaataacaggggggatggtttcacttatttccatttttctcctgagtggtttgtttgtcgttcatgtcatcgtacgacctctccctttatggattatagcgttaggttgtgtgcttgctcttctatttgtcattctccagacatggttgctaccaaaactgcgctggaaaaaatggagatatgaagtcactgaacacgaaattgaacttaaacatggcgtcattattgtgaaacgaactctcattccgatggttcgagttcaacatgttgatacgagacagggaccgctgttaagagcttatcatctgtcgtcggtaacgatttcaactgcagctacgacgcatgaaataccagctctttcaaacgaagttgctgatgagctaagaaatcggatctcgattctagcaagggtggcagaagatgatgtctgagaaaaaacgcctgcatccagtagcaatgctgttatcttttgtaaagtacgctaaagaagcggctattccgttaattttctttgtttttgttggaggaggaaatggttacacgtggtggcactttctaatgatcggagcacttcttctattcactataggaaatggagtgctaggatggtttttttatacatatcacattgaaaacaacgagctacgcatccatcagggatttatcttccgcaaaaagagattcattcctcgggagagaattcaatcgattgatttttctgaagggttaatacagcgtgcatttggactcgttaaagtgcaaattgagacagccgggggcgggggagaaccggaagtggtgatgtcagcgttaaaacggaatgatgcggaaatgttgaaaagcaatctctaccagaaaagaaatgcgatcgccgatgaaatgatggaagaagtggaggagaaaccgtcgctgctttataaactttcatggaaagaattactgatcacagcttcaacttcaggtggtataggtgttgttctttccttcgtagcggcaattgcctcgcaagtagatgatttcattcctaatcagttctatgaaagtgtaacagagcgggtgatggatgctacgcttccatttctattacttgcagtcgcctttctgctcttgatatcatggtttttctcagtcgttggtactgttctaaaatacggcggctttgttcttacgcgacaagaggatgatttaatcattagtagaggaattcttgaaaagcgtcagttaaccattccagttcatcgcattcaggggattcgaattgtggaagggctccttcgtcaaccttttggttattcggtactatacgtagaaagtggcgggggcggaggaaaagaggaacagttttcaactgtattatttcctctcgttaaacgaaaaagagtgaaaatattattaggggaaatcctacctgagatggccattcatgacgaatgttcacccttgcctattagagcaaaaagacgttatttcattcgattccttctgcctgctgtattaccattaggattaataacctactttgttccatacggtgctttctcactcttgttattgccaatttgctgtttcatcggttatttccattatcgtgatgcaggttggggtatcaaaaaagatgtcgctcttctgcaatttagacaaatttcaaaaacgagagtatacgtagcaaggaaaaacattcaagcaatggagttggagacaacttttcttcaagagcccaaacaattaaccacctttaaaatatcgattttatcaagctttgcgggaaaacaatttagggtgaaagatattgaacatacaaatggagaagaacttttaaattggtattcttactctgccaaaaaaaatataaaagaagaggtataacatttctgtaaggagggaatatatgtacattgttaattcggtgattaatgtaccagaagaaaaagtggatgaagtgatcggtatctatcagtcacgttcgcggcgggtggatgagtttgaggggtttgaatctttccgacttctccaaaatgagaataaaccttcagaactcaccgttcaaatgaagtggaaaacgaaagattcttttttaacatggattaaaagtccttcatataaagaaatacatgaccttgaaaagaaatatcctgatcaggaactagccgcaataaaaccaaaagtatctcgctttaaggttgtagctgaatgatgagccaaatcgatgcgattattgaccgagtcgttcagggtatctatcatgatatgcccgaactattagagaagtatggagaacagggtcgtgtgaagtgccgtgaagataattatcatcacatcaaacacctgaattcggcgcgcaacctggattcggatgatttttttgttgattatgttttatggctgaataatattctaactgctagaggtatgaaaaccgagcacttaattgataatttcaagcgtctggaaaatgaattgcgtgcatctgagtcgttcgaagagaaggaagattatcttagaacgttgaaaaaaggtcttgcagagctggaagaactaacagttgatagttcttcgtatacaaagaggtgagcatgtgtcgatagatataaaagggttaacagatgactttcttgaaggtgatcaagatcaagcatgggaaagaataacagcgcagtctgaattgatgacaaatagccatttaacctttgaagctcttacgaaagccatgcagcgaattggtgagttatgggaaggaaatgaaatatcagttgcggacgagcacttagctacaactacgtgtgattatgttctttctcggtatgcccatttcaggaaaattacgaataagaatgaagatggcccgaaagccctttttctttgtattgaacaagaacagcattatttaggcttgaaaatgatatcgttactctttcaagagtatggctggcaaacaaagctgtttggagccaatttacctcttgaatatgccttagagaaaacggagaaatggggagcatcagttgttggtatttcggttgcaatcttgtaccatgctgagcgattaaatcgttatgtcactgatcttgaagcgttggaaaatcctcctgaagtcttagttggagggaggcttacctcacagtacaacttgtctaaatattgctctgaacatacaacgttggttcctgatttacatcatgttcgtgaatggctggaagcgaggaaagggagtatgaataatgttcgatataaatgatcatccactccctgcttttttagttgatgaggaactaaacattctttcacaatcaaagcttgcaacggaagctttttctcctcgttcttcttttttggagcttgttgatatcgatagtcgaacgaaagctgccaaaatgctgaacccgcttttgaaagaaactgaagttgaattagttatgggcactgcccagtccccttattctctgtttcatgtttatgcaaagtggtccatgagtggtggaggacagctggtgtgtgtaaggcaagatgaacgattggaaaaactatcaaaggcgcttcaaaaacagcaggaaagactcgcggatacgaactttgatttattggataaaaaagaagagcttgaagcagctttagtgaaagtgaaaaagctttctagccccttcctccccatttcagcgtcactctgtattattccattgtttggcgagcttgaggaaaatctttttcgagttaatgagcatcagctgttacaaacgcttcagaatggcgattatgaacgtgtgattctagattttagtgggattggtgaagtacacgccagtggtgtgcttgcgttgctttcgttttgtagtatgctcgaagttgtgggggtttctccgattttatgtgggataaaaccgactcatgcccgacatctagcgaatcacgattttgtgttaaaccaacattttgatatcacgggaaatttaaaaaacgccgttcgctattatttaaatgactctttcatgtaaaagaccagtgatgagatcactggtctttaataatatcatttccgttataaatatcttgctataaagccaagtataacaagaccgataaaaatgccccagatgatttttccaccaccagaaggtccagttcggatttttcttcgctgccatcgatttggcttaaagcgaatttctccactatcggctgttctccttacgcgaacgatccctcggttaataaaaggcttcgcaccaattaaaagaataggtgcaagtgccgctcctccaatgaagccaaagaggtgtccaagaatattaatatttggactaataaacgtcatgacaagtccaattccaaggatcataagtatgagttgggaatttgcctggtctattaattctttacgatagaaagccatgtaaaaatagatgccgaacaatccaaaaatagcacctgaggcaccgacatgactaaagttactatcctgcaaatagaatgtagcgatgttcgcaataattccagccccaaaatagccaatcaagaactttgcttttccgagcatttgctcgagagcgggtccaaagaggtaaagtgaaaaggaattaaagaggacgtgggcaaatccaccatgcaggaagattggagtgataagtctccagtattctcctagttcgatcgccctgttgtaacctacccctaacctaagtattgagaacattccaaacaggtttactagaacgaagaggaggatatgtataccaataagtatggagatgataggataataacgaataaatgagcgaaaatcttcatttcgcacgaacatatgtcgaccacctttcttaggaaccaaagtgtaaatgttagaattgactgctcgttttatataaaattgaaatgggtatttcttataagtttagcatagcaaaaggaaaaatcactattgaaaacactatgctaacttttaatgatttagtacgaaggggttttatcatgattaaaggtattgggattgatatgattgagcttgatcgaataaaaaaagccattcaacgaaatgcttcgtttgcaaagcgcattctaacagaaagtgaattaagtacttatcacttacttactggacatcgaagtgttgaatttttggctggccgttttgctgcaaaagaagcatacgcaaaagcaagaggaactggtatcgggaaactgagctggcaagatatttgtgtacagaaatcaactcaaggcgctccctatatcgaaacaaaagaggaaaatgagatcgtacatatttctatttcacatacaaagcaacatgctgttgcacagatcattattgagtgctcgtcaagctagtctgcatatgatggagacttgcctcatataatttaccacggtcaggagggacctgttgtgagaatcgtatccggagaagaaatgtatgaagcggaccggtttgccatggaggagattggaatagctggtgccatgttaatggaaaacgcagggaaatctctatttgaagcgatgaaaagcaaacttcataagaatgagcgtatagcgctgttaatcggcacaggaaataatggaggcgacggttttgtacttggaaggtatttgaaagagcatgggtatgatgttgatctttggttaattcccccatattcaaaagtaaagggagatgctaaaacccatctagatatctttcaaaatctgacctacacgtggaaaccgtatgaagatggcaaagcatttgtagaatcacttcccgagtatggtgttatcattgattgcttactagcactcggtttatctggggctgttcgtcaaccatatgatgatgtcattaggcaagtgaatcaaactcatgcgacggttttgtcagtcgatcttccaagtggtatacaggcaaatggtggttacaaagaggagtgcgagcctattcgtgctgatattacgtatactattcaatgcccgaagcttggagcctttctttaccctgatgctgaattttatggagaaatggagatagttgatatcggtcttccacaagccgctttctcatcatgcgatagagcactctggcaaaaatcagacgtacatcgcacgctttctgatcgatcggcatcctctcataaaggaagccatggaaaaggtctggtaattggcggatcaagaggaatggttggcgcaccaattatgacagcaaaagcagcctatcgaagcggagccgggttaatacaagtttctgttccagaggaaatcctgtcgatgacagctggtgccgtagttgaaacgatttttcaagggtacccatctcgtaatggatttttctctggtgaggtgtccgaggatctcgctccttttgacggcattgcggttggtccaggtcttggaagacaaccaggatgcaaacaaatcgttgaaacgatattagcgacagattcgctcctcattttggacgcagatgccttgtaccacttagctgagttgaaagagcgccttaaggcaagagaagcaccaactgttttgacaccgcatcctggtgagatggcgaggttaacggggctgtcgatcaaggaagtgcaaaggaagcgattcgacatctcgcgagtgtttgctaaagagttcggtgtttatcttgttttgaaaggcccttatacgattgtaactgctcctgatggaagtcagtacgtgaatacaacaggtaatcctgcacttgctaagggaggatctggtgacgttttaactggcatgattcttgcctttgtcatgcacagcacgtctcttcaagaggggataagcaatgccgtgtatttacacggtcaatcagcagatactctggtgcaaacagctcattctactcttgatgtactggcaactgacgtcattgctacaataccaaccgttctgcattcatttctcgagccacaccacggataggtttttcaccatacaggaacctcctttgtcgttttaaatgaggcaaaggagttggggatagagtgaaaaagttcggtgcagttttattaattgggatattgattgcggtgcttgcaggttgcggacaaaaaagtcaggaagacgttgtgaatgcccttgataagaaattgaacgaaatggaagggtataaagttaacgctaaaatgacgcttgaaacgggagaagaaccacagcgttacgatgtagagatctggtaccaaaagccatcttattatcgagttgaattgaaaaacgaatcaaaagagcaaagtcaaatcatcttgcgaaatgatgaaggagtctttgttctcaccccagcattgaataaaagttttcgattccaaagtgattggcctgaaaatggtagccaggcctatctgtataatacgctcgtgcaggatattttaaatgattcaggagctcaatttgaagctaaggaaaatgattatgtttttacaacgaaaacgaattaccaaaacaagaacttatcgacccaatcgattcaattaaataaaaaggaccttgcaccagaaaaagtaaccattatgaatcaagatcaaaagccccttgttgatattgaattttcagatatgaaattcaatgcttcttttgataaaggcgcttttgatatggagcgaaacatgactgcagctcaactagaagtgccggtgcttgcgactacgaatgagccttttgaagtcgtgtatccaatgtatgagccacaaggaactggtttaactgatgagaaagaagtggcaaccaacaaagtgatgctaagttttacgggagaaaaatctttcactttaatagaagagaaaagtgaggctgccgttgaaacgagtgctcctgtcaatgtaagtgacgggcaacccattgatttaggatttacgatgggagttatgactgatacgactgtctcttggcatcacaatggagttgatttcttccttgcgtcagatgatttatctcaagaagaaatggctgccgtagcaaggtctgtgtacggcatgacagaaattaaataatacttcaaagaggttcagctatgacaaatggctggaccttttttggaaataagagataccgaacccaccacacttgagattcgccttaagctagtcggaactaaacaagacgcttgcgcttttcattgtctagcttcagcgtctagttcctcgaatcgcttcagcttttgaccagaacacaaagagcgtgttccgttcaaaagcttccagcgcttgtcagaactaaacaagacgcttgcgcttttcttgtctagcttcagcgtctatcccctcgaggtcttaagtcaaatctcattgtggtaaaaatcaccacattgagattcgtcttaagctagtcggggataaacaagacgcttgcgcttttcttaaaatctcctaaaatagagggcagagtgtattgttgtgggaggaagttggaatggacaatcaagtgttttatcgcgggacatgggctgaggtagatctcgatgctatcgaacagaatgtaaagtcttataaacgatatgtatcggatgaagttgggattatggctgtagtgaaagccaatggatatggacacggggcggttgcagttgccgagaaggctttacacgctggggctgaatatttagcggtagcgattttagatgaagcgattgctctacgagaagcaggcattcaatctcctattcttgtattgggatgggtgccgcctatttatgctaaagtagcggctatgaatgagatcacccttactgtttttcaagaaaaatggttagaggaagcttttggagtattggacggaatgatactgaacgttcatctaaaaatagacactggtatgggacgacttggaataaaggaaaaaaaggaagccaagcaaatcatcgagtgtttgaatacctatgcttcatttcatatagaaggcttttatacgcattttgcaacagcagatgagcctagtaattcgtttattgaaacgcagatagagaaatttgaagacatcacttcctttcttaaggagaatggtttgcaaccgaagtggatccatcttggaaatagcgctggatcgttacgtgttcccgaacggattgggaatcttattcgtctaggcatttcgatgtatgggctaagtccatctcaagaaatgaagccaatactaccttttgcattaaagcctgctttttgcctctatagtcagcttgtgcacgtaaagaaaatgagggctggagaaccgattagctatggctctacgtatcacgcagctgaaggtgaatggattggaacgattccgattggatatgctgatggatggatacgcaagctaggtaaagcgtatgtgctcgtaaacggtgagcgtgctccgatcgttggacgtatttgtatggatcaattcatggttcgcttaccttcgcaagtagaggttggtacgaaagtgacgctgataggaacagagggcgcagaagaaattacaatagatgacattgctgagcgacttgagacgataaactatgaaattccttgtatgatcggaccgcgtgttccgagactttttcgtgaaaatggagaaaaaaaaggcgtaatgaatacaattttaaaaaaatagtaaaataaaagaaggattttgcaagaatatgatgaaatagtcttgtggaaagttgttttgcaatgcgccgcgcgcaatggtaagattaatggtggaatacaatatgagtagcagtgcttcggaggtgtatgtttgtgtcagaggcaaacaaaaaatcgattgttgtaactctcccacaacatattttaaatgaggtggatggtattattcaacaggaacagcttgatcgtaacgagttcatatcacaggccacgacaatgtatattcgcgaacgaaagaagcgacaaattcgtgacgccatgcgccagggatacatggagatggctaagattaatttgaaccttgcagcagaagcctttcttgttgaggaggaagcagagcacaccgtggaccgcttagtaagcggggtgtaatggcttgattgtcaaacgaggtgatgtgtattttgctgacctttctcctgttgtaggttctgaacaaggtggcgtaagacccgtcttgattattcagaatgacattgggaatcgttttagtcctactgtcattgttgctgcaatcactgcgcaaattcagaaagcaaagcttcccacacatgtcgaaatcgatgcgaagcgctatggatttgaacgtgattcggttatactgctagaacaaatccgtactattgataaacagcgtctaactgataaaatcactcaccttgatgagggtatgatgcaaagggtacaagaagctttgcaaatcagccttggacttattgatttttgaaaacgtataataccaagcgaagctgctcctatgagcagttttttttttatcaatccattcaaatgtcagttaattatggtgaatatggaaaagattggtcccttctatttccgaacatttagtgtggccgacagcagggaattttctagttatgtcgaaaagtgtgttaagatgaaaatgatgtaatgtgctaagactaggaaagcataattattgcgagacgttccttgcaatgagaagataaatgaatgtagaaagatcgtagggaggagcaagatggacaagttagtcatacaattattgaatgaaagtcgtgaacgaatctacaccagatggatggatgagatggagagggttcgtgatgagcatcggctacaatcaataacggatacagcctatgaagaaacgaacaaagagctttttgaaatcatttatacgcatatagagcaaaatgttcataagccaacagatcgaatgacagggtttgctgaacatctaatgaagattggatggagacttagctatataacgcaaggtttgcaaaacttccgtcgaattattttagcagttctactagatgcgaatcaatctaatgaaaaagtatacagtatgtatgatgaaattgatcgttggattgaccctatcgtgaaccagctgattaatgaaagtgcaaagaactgggaaaacaccgtttcaattcaaaaggttgctcttcaagaattgtcggcaccgctcattccagtatttgagaatattagtgtcatgccactgatcggaaccattgataccgagagagccaagctgatcatggagaatttgttaaccggtgtaattaaacatcgatcacaagtggtccttattgatattactggagttcctgtagtcgatacaatggttgctcatcatattatacaggcagctgaagcagttcgtctcgttggggcgcagtgtattctggttggaattaggccggagattgctcaaacaatcgttaacctggggatcgatcttggtcaattccctacgaaaagcacattatttaaaggcatgaaaactgcattagaaatgacaaaacgcaaaatgattgagattgagtaaggggggaagacaatgcgaattcctatattaaaactgaatcaatatttactaattacaattcaagttgatctcgatgacaaaacagcacttcaatttcaggaggatttgctcgagaagattcatgaaacaggagcaaaaggcgttgtaattgatttaacatctgtcgatatgattgactccttcattgctaaagttttaggcgatgtggtgcgcatgtcaaatttaatgggggcaaaagtagtgctcacaggaatccaacctgctgttgctattacgctaattgatttaggtattatgatgaaaaacgtcccgactgcattagatttagaacaggggttagagaaattacaacaggaattggggggataagttatgaatatccaatcctgtgtggaagtacgaaatgagtgggatatcgtgaaagcgaggcagtctggtaggaatattgctaaagaacttggcttcggtacggtcgatcaagctcgcattacaactgctatttctgaactcgcgcgtaacatatacctctatgctggaagtggcgaagtagccattgaacgtgtagaaaacggtggaaaatttggtcttaaaattgaagcatccgactcgggcccaggaattaaagacattagaaaagtaatggaagatggttttacaacctctggtggtcttggagctggtttacctggtgttaaacgattgatggatgagtttacaattgattcgaaagagaacgaaggtacagttatcacttctattaaatggctccgttaaggaggatcgagcataatggacgaccgagatcttcaatatcaaaagtataaagcaatattagaaaactatttagaagagcaatctgagcaaaccttatataagggacagcagtttagtcggaagatgattgaacaaaagatctcccctgaagaagcagtcagtctccacgtaagtgttctagaggaactatttcctgatattcctgagccgcttaaaaactcgtatgattttttgcttgaaatgatgattgggtacggatttgcctatcgagagcatcaaagtcttcgtagtcgacagcagcagttggaatctgaaattgaaattgctgcaaatatgcaacaaacgttactagcgggcgataaaccggaggtaccgaatcttgatattggtgccattagtaaacccgcccagaaaatgagcggggattactatcattttgttcaagacgaaaatgattgtgttagtgtagcgattgcagatgtaattggaaaaggtattcctgctgcactttgtatgagtatgattaagtacacaatggatagcgcaccagagcagcgaatgcagcctggagctgttcttgagaaccttaaccgcgtagtggaacaaaatgttgatcctaatatgtttattacgatgttttatggattatatgatccgagggtgcattcattttattacgctggagccggtcatgagccgggctttttttacgatgcggaaaaggatgaatttgaagagctctttacgagaggacttgttcttggtgtttcaaagaaaacatcatatcaagaataccagcgagtacttaatggaaatgatatggttatcatgctttctgacggtgttaccgaatgccgttcgaccaatggttttattgaacgcgatgaaatcgtagcgttgattcgtaaatatattcacctctcagcacaagaaattgtggaagaggtttaccgagaacttgagcgtctgcaggagtttgaactcagagatgatttcacccttgttattttaagacgtgaggtttaacttctttctaaaagtggaataaggaattaatgactttaactaataattagaagcaacctaacagggggtaatgttatgaatttacagatcaaacaagaagatcatgagaatacacatcatttacatataggtggagagattgacgcttacacggcgccacagttaagagaggctttacttccgctaactggaaaagaaggtcatgagacgctcgttcatcttggtgatgttaattatatggatagcacaggtttaggtgtatttgttggtgcgctaaaatcttccaaagagcacggtagctcgttgaaactaactggaatgacttcgcgcgtacagcgtctttttgaaatcactggacttgatgaagtgatcgacattgaagacgtaaaggggggatcaaagtgataaacatttcagattttgttgaaatgaaaatccctgctcaagcagaatttgttggtgtaacaagattaacggtttctggaattgcgaatcgcatgggctactcctacgatgaaatcgaagacattaaaatcgcactatcagaagcatgtacaaacgctgttaaccacgcatataaagaagatgaaaaagggcaaatcaccattgggtttggcatttatgaagaccgtttagaaatgatggtccttgatcgtgggcaaagcttcgactatacaaaggtttctgaaaaactaggaccagttgatagcgagaagtcagttgaacaactcagtgagggaggattgggactctttctgattgaatcactaatggacaaagtggaaatcagtggagaggacggagtagtagttatgatgacaaagttcctccacagagatggggtggaagtagatgccgatacaatctcatcatccccgcaataacaataacaacgaagtatatgagtggattgaacaataccaaaaggatccaacagacgaagtcgtgcaactaaagctagtggagcgatatcaagatctcgttcagtcactcgcccgtaaattttctaaagggaaaagcattcacgacgatctttctcaagtaggtatgattggattgcttgctgcgcttcgtcgatatgatcctgaatttggtaggagctttgaatctttcgcagtacccacaatcgtcggggaaatcaaacgatttatccgagacaaaacgtggagcgtacacgttccaagaaggattaaagaactaggacctcgtattaagaaggcagtcgaagaacttactaatgaacttcaacggtctccaaaagttgatgagctcgctgaatatttaaatgtatctgaagaagaagtacttgagacgatggaaatgggcaaaagttatcaagcactttctgtcgatagttcaattgaagctgatcaagagggtagtacggtcacattactcgatcttgttggcgatcaagaacaaggatttgatcttgtcgaccagcagatgcttcttaaaaaggcttttgcagtactcacagaacgagagcaagaaattttgaactgtacgtactttgagaatatgagtcagaaagaaacaggagagaagttgggtatctcacaaatgcatgtttcccgtctgcaaagaagagccctagaaaaattaagacaggccattcgaattgaacctacggaggcattctagtcatgatccaccatcatgattttgagaagctcactgttgctgcgtatcaaaagccgaaggcaggtaatcagatgtgcggggacagctattttgtggctgaaacatccgattatttcatttgcgctgtagcagatggtcttggcagtggtgacatggcaaaggattcttctttagctgcgattaatgcagtgaaggactatcaagcagaagacgtagaatcgttaatggtacgagcgaatgaagagatgcgaggaaaacgagggtgtgttctttctgtttttaagcttgatctaaagacgaggcaacttgagtatagtggaatagggaatattaatttgattatctatcaaccagacggaaaaattattcgcccgatttcatattcaggctacttgtcaggaaagcttcaaaaagtgaaggtgcaaaccattgattacccttcaggttcttcgttcgtcacgtattctgatggcgttcaaataagttcgaaaaactattcgatgattgctcgttttgattcagtgcatgagtcgtttcaacatttaactgatacgcttccatctacaaatgatgatattactcttcttgtagggaaaactgtataaaaaagttcttccgtttcgatataggaagaactttttttattttcattaaaaagacatgcacaggattaattgtggttttttagagggaagcttttaacaaatcaacttatccggtaaactgatactagtagagaaggctcttaaggaggaattgttttggaaatgacagtagatcaaaaacaatcggaacattttcgtaaagtcgctcaaaatttgaagcttgctgaacgaagtgtaagagaagtgattacgttattgaatgatgggaatactgttccttttattgcgcgatatcgtaaagagttaacaggcgggcttgatgaagttcaacttagagatatacaggaagcgtggacataccttcaaaatttggatcagcggaaagaagaagtgatccgtcttattcaagagcaggataaattaaccgatgaactaaagaagcaattaaaagctgctacaaagcttcaagaaatagaagatatctatcgtccatataaacaaaagaagcggacaaaagctaccattgccaaagaaaaagggttagaacctcttgcccaatggatactggtagatggaaatagtgatccattacaagttgctaataagtacatatcagaggaaaacgaagtcttatcggtggaagatgcgattcaaggagcgcaggatatcattgcagaatggatttctgatgatgctgaggctcgaaaatggataagagctaaaacattacaacatggactactccagacgtctgttaaatcagaggaagatgaccctaaacaaatttttgagatgtattattcctatcaagagggcatttcaaagattgttccccatcgtattcttgccattaatagaggtgaaaaggaaaaagttttaagaacatcgataacacctccaactgattcaattcacgagtatttaaaaagaaaaacaattaacagtcagcaaaaaagttgcgtgactcttcttgaggaagcgattgttgatggctataaacgtcttattcaaccttccgtagaaagagagatacggaaagaattaacggagagagctgaagatcaggccatccacatcttttcagagaatttaaagcatcttttattgcagcctccactaaaagggaagcgtgtacttggtgtggatcccgcctatcgaacaggatgcaaactagctgttgtggatgatacaggtaagatgctagaagtatcagttatttacccaacgccacctaaatcagaagtagaaaagtcaaaagcagctgtcatacaaatgatcaagaagtatgacattgaaatgattgcgattgggaacggaactgcatcgcgtgaaacagaacagtttattgcagatgtaattaaagaagttgaaaaaaaggtcgtttatctgattgtcaatgaggcgggagcaagtgtttattcagcgtctgatcttgcgcgagaagaatttccggatcttcaagtagaggaacgctctgcagtttcaatcgcacgaagggttcaagatccattggctgaacttgtaaaaattgatccgaaatctgttggtgtcggccagtatcaacacgatgtctctcagaagaagttgaatgaccaactaacttttgtagtagaaaccgccgtaaaccaggtaggtgtcaatgtaaatacagcttcagtatctctcttacaatatgtagctggtctgtctagagctgtagcaatgaacattgtgaagaaacgagatgaagaaggaaagttcacgagcagggtacaattaaaaaaagttccgagactaggtgccaaaacatatgagcagtgtattgggttcctcagaataatgggagggaaacagcctctggaccaaacggaaattcatcctgagagctatgacgctacaaaagcacttttagaacgcattgagtgtaaaccaggggatattggtacagaaaaattagtgcaatctttgtctcagctctcattgaaggatacagccgttgctttaaatgtaggagaggtaactcttaaggatattgtaacttcacttcaaaagcctggtcgagatccacgggatgaactttctcaaccaattctaaagacagacgtattaaaaatggaagatctagaacagggaatggagttagaaggtacagtaagaaatgtcgttgattttggggcgtttattgatattggtgtgaaacaagatgggcttgttcacatttcgaagttaacgaatcgctatgtgaagaatccaatggaagtcgtccacgtaggacaagttgtgactgtctgggttgatcaagttgaccttaagcgtgagcgaattgctctgacgatgcttcaaccgtcctaaagcattagcactgtcctcaggggcggtgttttcttttgtagaaaaaccagcactggtttaataatttaatttggcgtcgatctttctcaaggtaagcttgtttcaattgctttttaaaccaaacaggcaacgtaatccctccttaagtgatgacacatcttaaatgttgatgtaaattagtttatgagaaacggcttgtatgtgttcgaaagagaaaggatgaagagcgtatgaacgaaaaagaattacaacaactagttgaaacgatctctgaggaggtttttggcctcgcttttcgtcataaggcgatattcaatgctcgattaaaaacaacgggaggacgttatatgctcaggtctcataatctcgaatttaatcaaaagcattatgacgagtttggtcaagacgaactcattggtattattaaacatgaactatgccactatcacctgcaccttcagaaaaaaggttacaaacatcaggataaagattttaaacgacttcttaaggaagtaggtggttcgcgatactgtcaggtagtacctgggcaacgtagagttgagccgttcaagcatttttatgagtgtggagaatgtaagactaagtatagaagaaaaagaaagatggacatatcacggtacgtatgtggaaaatgcagaggtaaattaattcaaattaattaaaagttgttattgacgacctagtttgtatgtggtaaattaataaagtctcttcggagagcacgtcttaatcaagcatatggcagttaattaattttaaaaaactgttgactttgtttgcaggatgagttattatattaaatgtcgccgataacggagacaacaacttaaatattattccacagtagctcagtggtagagctatcggctgttaaccgatcggtcgtaggttcgaatcctacctgtggagccaaacggagaagtacccaagtggctgaaggggcgcccctgctaagggtgtaggtcgcgcgagcggcgcgagggttcaaatccctccttctccgccatttttatggcccgttggtcaagtggttaagacaccgccctttcacggcggtatcacgggttcgaatcccgtacgggtcaccaacttattttaataaatgttttaacaacatgatatgtaatcagtcataaaggtctcgtggtgtagcggttaacatgcctgcctgtcacgcaggagatcgcgggttcgattcccgtcgagaccgccattatttctaaaactaatctgattatataacttgttgggctatagccaagcggtaaggcaacggattttgattccgtcatgcgctggttcgaatccagctagcccagccatgttgagccattagctcagttggtagagcatctgacttttaatcagagggtcgaaggttcgagtccttcatggctcaccacttatttgcgggtgtggcggaattggcagacgcgctagacttaggatctagtgtcttacgacgtgggggttcaagtcccttcacccgcaccaatttcttttataaacgaacgtttcatcaagttacgatgtgcggttgtggcggaatggcagacgcgctagcttgaggggctagtgggggaaaccccgtggaggttcgagtcctctcaaccgcaccaaatataatatgcgcccgtagctcaattggatagagcgtctgactacggatcagaaggttagggattcgacttctctcgggcgcaccatattacttttaaaaaatgtcgggaagtagctcagcttggtagagcacttggtttgggaccaaggggtcgcaggttcaaatcctgtcttcccgaccatcaatattgcgggtgtagtttagtggtaaaacctcagccttccaagctgatgtcgtgggttcgatccccatcacccgctccaataaagatgggcctgtagctcagctggttagagcgcacgcctgataagcgtgaggtcggtggttcgagtccactcaggcccaccatcttttcttaaaaaaacttgttgacactgacaaacacatcatggtatgatggtttggtcgctgaaaacgacattgaaagaaaaattgctctttgaaaactgaacgaaacgccatgtaagtagttgtttctacggaaacaaaacattgttttaaaagctagattaagctttctatcggagagtttgatcctggctcaggacgaacgctggcggcgtgcctaatacatgcaagtcgagcgaagagatgggagcttgctccctgatcttagcggcggacgggtgagtaacacgtgggcaacctgccctgcagactgggataactccgggaaaccggagctaataccgggtaatacatcgcaccgcatggtgcaatgttgaaagttggctttctgagctaacactgcaggatgggcccgcggcgcattagctagttggtaaggtaatggcttaccaaggcgacgatgcgtagccgacctgagagggtgatcggccacactgggactgagacacggcccagactcctacgggaggcagcagtagggaatcttccgcaatggacgaaagtctgacggagcaacgccgcgtgagtgacgaaggccttcgggtcgtaaagctctgttgttagggaagaacaagtaccgttcgaataggacggtaccttgacggtacctaaccagaaagccacggctaactacgtgccagcagccgcggtaatacgtaggtggcaagcgttgtccggaattattgggcgtaaagcgcgcgcaggcggtcttttaagtctgatgtgaaagcccacggctcaaccgtggagggtcattggaaactggaggacttgagtgcagaagaggagagtggaattccacgtgtagcggtgaaatgcgtagatatgtggaggaacaccagtggcgaaggcggctctctggtctgtaactgacgctgaggcgcgaaagcgtggggagcaaacaggattagataccctggtagtccacgccgtaaacgatgagtgctaggtgttggggggttccaccctcagtgctgaagttaacacattaagcactccgcctggggagtacgaccgcaaggttgaaactcaaaggaattgacgggggcccgcacaagcagtggagcatgtggtttaattcgaagcaacgcgaagaaccttaccaggtcttgacatcctctgacaatcctggagacaggacgttccccttcggggacagagtgacaggtggtgcatggttgtcgtcagctcgtgtcgtgagatgttgggttaagtcccgcaacgagcgcaacccttgatcttagttgccagcatttagttgggcactctaaggtgactgccggtgacaaaccggaggaaggtggggatgacgtcaaatcatcatgccccttatgacctgggctacacacgtgctacaatggacggtacaaagggcagcgacaccgcgaggtgaagcaaatcccataaagccgttctcagttcggattgcaggctgcaactcgcctgcatgaagccggaattgctagtaatcgcggatcagcatgccgcggtgaatacgttcccgggccttgtacacaccgcccgtcacaccacgagagtttgtaacacccgaagtcggtggggtaacctttatggagccagccgccgaaggtgggacaaatgattggggtgaagtcgtaacaaggtagccgtatcggaaggtgcggctggatcacctcctttctatggagaattacgaaggtaacttacgttaccaaccttacatgagcgtttcgtttagttttgaaagaatgatttattctttcgaaatgtggcttatatgatgaaacagatgtgcacctgcgtcttcgagtaacgctaacgatgttggcttcctcggtgcaaggcagcatagaagtggattcaagtagtggccttgttccttgaaaactagatagcataaacaacgacatccaataattatttttatgcaagaacttagtaataactgatgcgttatggcagcaatgcctaacaaatcgaaggttaagctactaagggcgcacggtggatgccttggcactagaagcctaagaaggacgggacgaacaccgatatgcttcggggagctgtaagtacgctttgatccggagatttccgaatgggggaacccaccatctttaataggatggtatccatttctgaatacatagggaatggaaggcagacccggggaactgaaacatctcattacccggaggaagagaaagcaaatgcgatttcctgagtagcggcgagcgaaacggaatcagcccaaaccagagggcttgccctctggggttgtaggacgtctctttggagttacaaaggcacggatagacgaagcgacctggaaaggtccatcagagaaggtaacaatcctgtagtcaaaatccgctgccctccgagacggatcctgagtacggcgggacacgtgaaaccccgtcggaatctgggaggaccatctcccaaggctaaatactctctagtgaccgatagtgaaccagtaccgtgagggaaaggtgaaaagcaccccggaaggggagtgaaagagaacctgaaaccgtgtgcctacaactagttggagcccgttaatgggtgacagcgtgccttttgtagaatgaaccggcgagttacgatcccgtgcaaggttaagctgataaggcggagccgcagcgaaagcgagtctgaatagggcgaaatagtacgtggtcgtagacccgaaaccaggtgatctacccatgtccagggtgaagttcaggtaacactgaatggaggcccgaacccacgcatgttgaaaaatgcggggatgaggtgtgggtagcggtgaaatgccaatcgaacctggagatagctggttctctccgaaatagctttagggctagcctcgcggcaagaatcttggaggtagagcactgattggactaggggtccttaccggattaccgaatccagtcaaactccgaatgccaacgatttatccgcgggagtcagactgcgagtgataagatccgtagtcgagagggaaacagcccagaccaccagctaaggtcccaaagtatacgttaagtggaaaaggatgtggcgttgcttagacaaccaggatgttggcttagaagcagccatcatttaaagagtgcgtaatagctcactggtcgagtgacgctgcgccgaaaatgtaccggggctaaacgtatcaccgaagctgtggattgtcttacgacaatggtaggagagcgttctaagggctgtgaagtcagaccgaaaggactggtggagcgcttagaagtgagaatgccggtatgagtagcgaaagacaagtgagaatcttgtccgtcgaaagcccaaggtttcctgaggaaggctcgtccgctcagggttagtcgggacctaagccgaggccgaaaggcgtaggcgatggataacaggttgatattcctgtaccacctcctttccgtttgaacgacgggggacgcagaaagatagggagagcgcgctgctggaaatgcgcgtccaagcgattaggctggtgaataggtaaatccgttcaccgtgaaggctgagtcgtgatggcgagggaaatttagtaccgaagtccttgattctacgctgccaagaaaagcctctagtgaggaaagaggtgcccgtaccgcaaaccgacacaggtaggcgaggagagaatcctaagacgatcgggagaactctcgttaaggaactcggcaaaatgaccccgtaacttcgggagaaggggtgcttcctcgggtttatagcccagggagccgcagtgaaaagatccaagcgactgtttagcaaaaacacaggtctctgcaaagccgtaaggcgaagtataggggctgacacctgcccggtgctggaaggttaagaggaggggttatcccttacgggagaagctctgaatcgaagccccagtaaacggcggccgtaactataacggtcctaaggtagcgaaattccttgtcgggtaagttccgacccgcacgaaaggtgcaacgacttggatactgtctcaacgagagacccggtgaaattatagtacctgtgaagatgcaggttacccgcgacaggacggaaagaccccatggagctttactgtagcctgatattggattttggtacagcttgtacaggataggtaggagccatagaagtcggaccgccaggttcgatggaggcgtcggtgggatactaccctggctgtactgacattctaacccagcaccgtgatccggtgcggagacagtgtcaggtgggcagtttgactggggcggtcgcctcctaaagtgtaacggaggcgcccaaaggttccctcagaatggttggaaatcattcgcagagtgtaaaggcacaagggagcttgactgcgagacctacaagtcgagcagggacgaaagtcgggcttagtgatccggtggttccgcatggaagggccatcgctcaacggataaaagctaccctggggataacaggcttatctccccaagagtccacatcgacggggaggtttggcacctcgatgtcggctcatcgcatcctggggctgaagtaggtcccaagggttgggctgttcgcccattaaagcggtacgcgagctgggttcagaacgtcgtgagacagttcggtccctatccgtcgcgggcgcaggaaatttgagaggagctgtccttagtacgagaggaccgggatggacacaccgctggtgtaccagttgttccgccaggagcatagctgggtagctacgtgtggaagggataagtgctgaaagcatctaagcatgaagcccccctcgagatgagatttcccacagcattaagctggtaagatcccttagagatgatgaggtagataggttcggggtggaagcgtggcaacacgtggagctgacgaatactaatcgatcgagggcttaacctaaaacaaaagtgatgtgagcatgtctcactaaacttgatattattggaatacgttgtgcgtgctatctagttttcagggaacaccctgtaaagtctagtgacgatggcgaagaggtcacacccgttcccatgccgaacacggaagttaagctcttcagcgccgatggtagttgggggatctccccctgcaagagtaggacgtcgctgggcaaagatgaaaggcgagagacctgagggtttctcgcttttttgtatggttttatgggtgagtttttactagctcaaagccctcattcatcacgttcgcggaattaatctcaaattcgcggaaatatcatgcgaaagcgcggaataaatccgattttcgcggaattatttgaaatatcgcggaataaacaacataaaaaagtaattcaatctctatcaaaatatagcatttaactttttagagagaataaatcgaaaatttcgaacggtatttcttgaaattaacgcttagaagacgtacagttaatgaaaaagaattttatttaatggaaggggaaaataaatggaatttcattttgatacaaaagcagtacgttttccacgaaaaccgaaagccgatacagcaagtaaagttcagccgatttatcaaacctctgcatttgtgtttgaagatctcgatgatttggaatcattttatgaaggtaaaaaagactatttgtacagtcgcgttagtaatccgaatacagatgatctaggaatgggtgtagcagaccttgagggtgctcctaagggtattgcgacttcttcaggcttatctgctattcttgcgggagtgctgtccgttgtcaaagctggcgatcacattgtcgcatgtgaagatctttacggaggaacctattcgctttttcatggagaacttcctgacttcggaatagaggtctcttttgtggattttacagacagagataaaattgagagtgcgatacgaccaaatactaaattgctttatactgaatctgtcacaaaccctctattaagagtcgaggatttaggacttcttaaaaatcttggccaaaaacataaacttgttactatggtagacaatacgtttgctacaccttatcttcttcagccttaccaactaggaattgatcttgttgtacatagcgcaacaaaatatattggcggtcatagtgatgtaacagctggtgtactagtaggaagagaagatctgatggccaaggcaaaagccaaagtgattaatcttggagctaatcttagtccatttgaagcgtggcttggttgccgtgggttaaaaacgatgagtgtacgaatggaacgtcatgtgaggaatgcagctatccttgcaagtgaattaaaaaatgtaaacgggattaagaatgtctattatcctgaatatgtagctgaaagaggttcgggagctatggtttccattgagctagatgatgaaactgatgtgaaaacattcttcaagtcactaggatgggtaaagattataccgactctggctgggctagatacaacggtttcttatccgattgctacttcccaccgtacagtaccagaagatactagacagaagcttgggatcaataagcagctcgttcgtatttctgtaggaattgaaaacgaaaatgatattgtagatgcattcaaaaatgctgtggaaaaatccctgtaacaggggtttttttcttttgtttctaatgcttgcattcattacatttatctggtatagtattacttgtgtccacatgacatactaatttatgtcataacatgtgcagcatagttacactcatattgtcgcggggtggagcagttcggtagctcgttgggctcataacccaaaggtcgcaggttcaaatcctgcccccgcaaccaattaaaaaaatttaactacgtcgaataatcttcttcgttaaattttaataggagtcccttaggggcaacctagactcacatctagatataacttctttataacgtaagtgagctaattacactcataacttggtctcgtggtgtagcggttaacatgcctgcctgtcacgcaggagatcgcgggttcgattcccgtcgagaccgccattttttcaagagcgattgaatcgctttttttttatacttaaattcatgttaccttataaatatcagaagaaaatataagttttttgaaacaaatatgtgaatttgttgtcaagtaagataaactgatagaaaaagtaccttaggatgaaattcctaaggtttttttataaaatagaaagagagatgagtttggtgaaagatgaatttgcgtttattcaatccattacgccagcttatacatttcgaaaagaattgattcatgggattggagacgatgcggctctttataacattgaatcagaatgggatgaaatcgcctgtacggatactatggtggaaggaatccattttaagaagagtacgttatccccttttcaaaccggtcgaaaagcgcttgctgttaatataagtgatattgctgcaatgggtggtattccgatgttttatcttgtatcgatttctgtgccacaaacgggatggtcatctaaacagctaaaagaaatatacaaagggattaaagagatcggtgacctatatgagatggacatgatcggtggtgatacagtatctacgagaggcgatcttcatattgctattactgttatcggtaaagtcgaaaaaggacgtaaacttcttaggagtaatgcgaaggcaggtgacgtcgtatttcttactggacctgtgggtggttcggctgctggactttcttcattacttaagggtaagggcagtgatggagcatatgttcagttccaccaggatccccatcctcgtgtcaaacaagggcgtattctcgcgaaaagtggatatcgcatttcattaaacgacgtgagtgacggaatagcaagtgagtctcacgagattgctgaagcaagtgacgtttccattgtacttaatcaagacgcgatcccggcgcctgaagggtttgaggcatattcctctttccaaaggttagaatggatgttaaatggcggagaagattatgaattgatcggcactgttgcggaggttgactggccaaaagtggttgaactttttcaagaacaccaggaatccatctataaaattggccatgtagaagataaaggaacaagtgtatggatgagttataaagatcaaaaattcaaattggacaagaagggttacaatcacttctcgtctaaagaataggtgatgaacatgagtggatatgctttcatcatgaaatctccagaagaaacgatggcgtttggcagaaagcttgctgagaagctaaagccaggctgtgtgttaacacttgaaggagatttaggtgctggcaagacaacctttacgaagggaatcggaaaggggttaggggttacgaaaatagtgaatagccctacctttacgattataaaagaatatgaaggtaacattcctctttttcatatggacgcttatcgtcttgaagagagtgatgaagaccttggttttagcgaatactttgaaggagaaggcgtgacagtggtcgaatgggcaaaattcattcaggatatgctgccaaaacaactcctcagagtagaaatttatcatcaaaaagattcagaacgtcggcttatcttaagaccgtttggtcctttttatgagtcgttatgtaaggagttgcaacatgaaagtactagccattgattcttcgaactactgtatgggtgtttccattatggtggatggcacggttgtcggagaactgataacaaatataaagaaaaaccattcggttcggttaatgccagctgttgagcaactgttagaagaagttcaagtgaagccagctgaccttgatcgaatcgtagtggcaaaaggaccgggttcttatacaggactgcgcattggcattagcattgctaagacgttagcgtggacgttatccaaacctcttgtcggagtgtctagtttagaagtactggcgcagaatgggcgttatttctctggagccatcgttccatttttcgatgcaagacgcggacaagcgtatatgagtgtgtataaagcgaatggaatagaagttgaaagagaaacggaagatcagattgtgctatttgaagagtggcttcaggaaaataaagatcgatatgagcgttttttatttattagcggagatctaactatgcacaaagaacgaattgaagaaatattggttgacaaagcagtgttcgcaccctcgagtagtttaaatgctaggcctgctgatcttgcaaggttaggggcaagtcatgaaccggtggaagatgttcatcagtttacaccaaactatgtaagaatggctgaagctgaagcaaagtggctagcttcacagaaaaagtaggggattggcgatgaatgatacggtatcgtttcgatcgatgaccattgaagatattgaggctgtgatgcggattgagcacgcaacttttccaacaccatggagtagatctgctttctataatgaaattgtcataaatcattttgcgacttaccttctacttgaagttggagaagaaatagcaggctattgcggtgtttgggtcattattgatgaggcgcatattacgaatatcgctcttcacccagagtatcgagggatgaagctaggggaagcgcttctaaacaaagcaattcattttgcaaaatcacgcggggcattaaaaatgacgcttgaagttcgcgtgtctaatactgtagcgcaaaatctatatcggaaatttggttttgaagaaggcggcattcgcaaaaattattacacagataatcaagaggatgcgctagtaatgtgggtgaatttaaatggaaaataaacatgaaattattttaggaattgaaacaagctgtgatgaaacagcagttgctatcgtaaaagatgggaaagaagtattagcaaacgtggtggcgtctcagattgaaagtcataagcgttttggaggggtcgtgcctgaaattgcttcaaggcatcatgtggagcagatgacactgattcttgaagaagctttccgtgaatcaggacttacaatggatgagattgatggcattgctgtgacagagggacccgggcttgtgggagcactcttaatcggcgtgaatacagcaaaagcacttgctttcgctcaccagaagccactaatcggtacacatcatattgcagggcatatttatgctaatcagcttgtagcagagttaacttatccactgctcgcccttgtagtttcaggtggacatacggagcttgtttatatgccgtctgaaggtgagtttgaggtaatcggtgaaacacgtgatgacgcagctggagaagcttatgataaagtcgcaagaacgctacagcttccttaccctggaggaccacatattgatcggttggcagcagaaggagaaccatcagttccactgcctcgtgcatggcttgaaaaagggtcatacgattttagcttcagtggtttgaaatcggccgttatcaacactgttcataacgcgaaacaacgcaacgaagaactgaaaccggaggatcttgcagcaagttttcaggcttctgttgtcgaagtgctggttacgaagacgttgagagcggcagaagagtacggcgtgaaacaagttcttcttgctggtggtgtagcagcgaacaaaggtctaagaagttctttaacagaagcttttgaaggtagcggtagagagcttgtgattccaccattgtattattgtacggataatgctgcgatgattgcagctgctggaacgatcgcctatcgaaaaggaaaacgttctagccttcaacttaacgcaaatccgggattagaactgggaatctaatcccggtttttttgttatatagcacataaatgtcgtttgtgtgttgaacgtgaaagagaaagttaataagaacagttatccacaaacgggtgaatagtgtggacattataagagaaagcttactccaatgaggttttttaaaattctcttattttgtggataactagttaaagtcttgttgataatgttaataatttttagaaaatgaggtttgtcagctgtttaattgtgcataagtatgtggatagtgtgaatatgtcggaaaattcttgcctaacaaaaaacagtccactgtggactgtttttttgttaggcttcctgtaattgttcccattcttccatgagtgtttccgtcacataccgcaaatgatccatttcttcatttaacttcattactttttcatgatcttcgaagatgtctggaatgcaaagctcttcttcgattgcagcaatgcgtaattcagcgtcatccacttctttttcaatctcttcaattcgtcggagcatttgacgctcctgacgttttgtttctttatcttgcttaaagctagatttacccgatggaagaggttgggccacttcattgttctgttgttcaagtgctgcaagttcagcaagttcctgctttttttcaacataataatcatagtcccctagataaggtgtaacaccatccgttgaaagctcaatgacacgcgttgcgattctgttaataaagtaccgatcatgtgagacaaataggattgtacctgggaactgaatcagcgcgtcttccagtatttctttgctatcaaggtcaaggtggtttgttggctcatccagaatgagaagattggatttcttcatcattaatttggagagagcaaggcggcctttttcgcccccacttaaatcagaaacgttcttcaacacatcatcgccggtaaataagaagcgaccaagtacggcgcgaatatctttctcatcggtaagcgggaagtcatcccaaagttcttttaaaacggtcttgttcgagtggagattggtttgttcctggtcataaaaaccgatttgaacattgcttccgtaatgaatatcgccatcgagtagtgtctcccctgatacgattgcttttagcaatgttgatttacctattccattaggtccaacaagtgcaacactttcttgtcgctttaaatcaaatgttaaatgatcgtttatcacattgttagggtacccgattgataattctctcagggttaggacgtcgttacctgtctgtttatcaatcccaaaagtaatattagccgatttctcatcgccttttggcttatcaagacggtccatacgttcgagctgtttgcgacgactttgcgctcgtttcgttgttgaggcacgtacaaggttttttgcaacaaattcctctagtttcgcaatttctttttgttgtttctcaaactccttaagttgctgctcataacgctgttctttttcatcaagatagtaactatagttaccttcgaaacgttccgcacgatgtctagaaatctcgtacactttagttacaattttatcgaggaaataacgatcgtgagagacgattaataaggcaccagaatagttttgaaggtagccttcaagccatgtaagtgtttcaatatcgagatggtttgtcggttcatctagaataagtagctcaggttttgtaagcaaaagctttccgagagcgagtcgtgtcttttgtccaccgctaagcgttgagatttttgtactgtaatcaaaatctttaaagttaagtccatgtaatacggtacgaatatctgcttcgtatttataaccaccttgatctttaaaggcaacttgaagctcgtcatattcttttaggattcgctcgtattcaatctgattttcgtacacttttggattacccatcttttgttcatattgcctaagttccgattccatcttttgaaatcgttcaaagacgcttagcatttcatcccagatcgatagtccagattcgagtccggtgtcttgcgccatataaccaacggctacatcttttggtttaataatatcgcctgaatcatatgaaagttgcccggtaatcatctttagcagagtagatttaccagcgccgttccgcccaacaagcgcaacgcggtctcgtgattgtacttctaatttaatattcgataaaatggtatcagcaccaaatgatttagtgagtccatttacttgcaatacgatcatgttcgttcacctctatttccttccttatatccgtaaaaaacggtttgtaaggataagctgatctcctcgtgtatcaccgatcattcggcattatccgacgttcctttaagtttaccgcagagaggacaagctgagcaactaaacgaatgttcatggcttaacaaaaaaagtcatcaaaaaaacagcataatcgtaagaaatggtgtatagtcacaagtagcagcaatatccttcaatcatctcagtatgaggaaaggggcaaacatgagttcatttactcactttaatgaagaaggccgagcaagaatggtcgatattactgataaaactccctctgttcgaacggctaccgcacgtacgagcgttcaggtgagtgaaccaatttactcaggtatccaagcgggaacgatgaaaaaaggcgatgtacttcaagtcgctcaaattgccggcattatggcagcaaaaaaaacatctgatctcatccctatgtgtcatccgatagcgctttctggcgttgaccttcattttgactggcaggatcattcgccatcttatgagctgatcattgaggctcatgtgaaaacgagcgggagtactggcgttgaaatggaagcgctgacggcagcatcagcggcggcattaaccgtttatgatatgtgcaaagcggtggataaaggcatcgttatcggggaaacctatcttgttacgaaaacaggaggtaaaagcggggattatacgcgcgaataaggtgacgatggagcgcggagatcaatatggaggtagtgtatggatattgatcaagcaaaaattccgcaggcgacagcaaaaagactgccgctctattatcgatatttaaaaaatctaagtgcatctggaaaacagcgtgtttcctcagcagaacttagtgatgccattaaggtagattccgctacaatccgcagagatttcagctattttggtgctcttggtaaaaaagggtatgggtacaatgtacattatttgttatccttttttagtaagacccttgatcaggatgaaacgacaaaggttgctctgattggcgtaggtaatcttggaactgcctttctacattacaatttcataaaaaataataatacaaaaattgaactcgcttttgatgccgattccgaaaaagtcggacaggaaattggcggagtacccgtttatcatattgatgaatttcaaaagcgacttaaagaaaatgacgtatcggttgttattttaactgtccctgtccatgtagctcagtcaattgccgatcaaatggatgagacaggcatcaaaggaatattaaatttcaccccagctcgtctaactgttccggatcatatacgagtgcatcatattgatctagcagtcgaattacaagcactcgtctatttcatgaagcattatccagtataacgacatgataaggaggtgacacgcatgggaatgggtggcgcaagtatcgcattagttgccgtggttgctttgataatatttggaccgaagaaattacctgagcttggcaaagcagcaggaaatacgcttcgtgagtttaaaaacgcaacaaaaggtttagcggatgatgacgatgaaccaaatgataagaaaaataacgacaagtaatcggttaggacggatagtgaatggaggatcagaagcaatccatctatgatcatttagaggaattaagaaaacgggttattattactgtcgttttcttaattctttcctttattgcggggctgtttctggctaagccagtcattgtgttcctgcagcatgctcctgaagcgcagggtataccgatgaacgcgtttcatctgactgacccattgaaagtgtatttcagcttcgcctttttaattgcttttattatgacatcaccacttgcgctctaccagctctgggcgtttatatcacccggattgtttgaacacgaacgcaaagtaacattatcttatataccagcggtgttcattttatttcttggcggagtttccttttcctattttgttctctttccatttgtgatcgattttgtgggggaccttgcacaaaaccttaacattcaagagatgtatggagcgaatcaatattttagcttcttgtttcagttaacattgccttttggatttgtctttcaattgcccgtgatcgtccttttctttacaaggcttggtatgttaaatccagcgatgcttgtacagattagaaagtatgcgtactttgtccttctcgttatagcggggatgattacaccacctgaaattatttcacatcttatggtaactgtaccgcttttactactttacgaatttagtattattgtgtcccgatacggttatcggaagaggttacaggctgaagcaaaaaggattcttgaggaagctcaggaagaaggaaatcaataaatgcaaaacaaaaagcggtaggaattcctaccgctttttgttttcatcttttttcttaagttgtgtgatccgttttctaaggacgaaaaaacgaatggcatatacgaaatccactgtggcaagaaccatcaatagaattgtataaaagctccacatttcgccgttactactagcgctttggatcgccaagtacgtaaatagcgacccgagtcctaaatagaaaaaacccataatagttggtgagagtttcatgaaaagagtcctccaataaacgattgcgtctgattaagctgcttttccatctccataatatcatcagcaaaatagacgttaattaacacaacaaatgtattcattgtcatgtgtgcaataatcggtacgatcagacgctttgttttcacgtatagaaaggcaaaggttagacccattgctgtatagatgagtatgtgggaaaagtcaaagtgaatcgctgcaaatataactgagctaagaatgccggcgatccagaagttaaatcgtttgtataatgatccgaaaataacttttcgaaacacgatttcttcaagaattggtccaataatggacgttacaattataaaaataggagaagcttttgccacttcaataagcatttcggtgttctcagaaccaggatcaatgccaaatacattcatctcgatcatagctgcaataatttgggaagcataggccataaatacgcctagcacactccatccgactgcctggccaggtgaaacgcgagcagagcgttcaaatggaacatcaggagtggagcggagaagaaacaacataataatcagggcagtaagaaaactaaaaactgaccaggtgacaacgggatcagcgacgttaagttgctgaagtaaaggaacgcctacaacccctgaaagctgcatgacaatataggtaatcagtatagtccaataatgtttggccaagaatcataactcctttaaatggtttgcatgcctgaaaaggcactgtgcatactcgtattagtttaacacacttttaaaagggaatgccgttcataagacttcataaactgtttagaacggtcgaagcgaaacttatcgaaaagcaggacagaagtcttagtattttatgtcagatcgtggcgagtatggaagaaaagaaaaaactgaaaaaaaaatcaactttactacttgcaaaaggatactgaattatttattatatacatgtgttagcactcgacgatggtgagtgctaaaaaacgaatcaaaccataatttccatctgaggagggtgtttgagttgttaaagcctttaggtgatcgagtagtcatcgaaccaattcaattagaagaaaaaacgtctagtgggatcgtgcttccggattctgcgaaagaaaagccacaagaaggtcgcgtcgtatctgtaggaagcggtgcactaactgatggtggagagcgcgtagctcttgaagtatcagaaggcgatgcagttatttacagtaaatacgctggtactgaagtaaagtatgacggtaaagagtatctaatccttcgtgagaatgacattcttgctgttgtaggtaagtaaacacaaaaataaaagcactacatacatttaggagggtaacaaatggcaaaagatattaagttcagtgaagaagcccgtcgcgcaatgcttcgcggtgttgattctcttgcgaatgcagttaaagttacactcggaccaaaaggacgtaacgttgtcctcgagaagaaattcggatctccacttatcacgaatgatggtgtaacgatcgcgaaagaaatcgagcttgaagatgcattcgaaaacatgggtgcaaagctagtagctgaagtagcgagcaaaacgaatgatgttgccggtgacggtacaacaactgcaacagttcttgcgcaagctatggtacgcgaaggtcttaaaaacgttgcatctggtgcgaacccaatggttatccgtaagggcattgagaaagctactagagctgctgttgaagagcttaaaaacatttctaagccaatcgaaggcaaagagtcaattgcacaagttgcatctatctctgctgctgacgaagaagtaggtcaattgatcgctgaagcaatggagcgcgttggcaacgacggcgttatcactgttgaagaatcaaaaggatttgctactgagcttgaagtagtagaaggtatgcagttcgaccgtggatatgcatctccatacatggttacagattccgacaaaatggaagctgttctagaagatccatatatccttattacggataagaagatcgctagcattcaagatgtactacctgtacttgagcaagttgtacaacaaggtaaaccacttcttatgattgctgaagacgttgaaggtgaagctcttgcaacacttgttgtgaacaagcttcgtggaacgtttaatgcagtagctgttaaagcacctggcttcggtgaccgtcgtaaagcgatgcttgaagacatcggtacactaactggtgctgaagtaatcacggaagatcttggtcttgaccttaaacaagcgaacatcactcagcttggtcgcgcttcgaaagttgttgtaacgaaagaaaacacaacaatcgttgaaggctctggcgaaactgataagattgctggtcgcgtaaaccaaattaaagctcagctagaagaaacaacttctgagttcgataaagagaagcttcaggaacgtcttgctaagcttgctggcggcgtagctgtcatcaaagttggtgcggcaactgaaactgaattgaaagagcgtaaacttcgcattgaagatgctcttaactcaactcgcgcagcggttgaagaaggcatcgtatccggtggtggtacagcactagtgaacgtcgttaaggctgttcaagctgttgaagctactggtgacgaagctactggcgttaagattgttcttcgtgctcttgaagagccaatccgtcagatctctcacaatgctggtcttgaaggatctgttgtggttgagcgtcttaaaggcgagaagatcggtattggcttcaacgcccttactggcgagtgggtaaacatggttgacgctggtatcgttgaccctactaaagtaactcgttctgctctacaaaatgcagcatccgtatctgctatgattcttactacagaagcagtaatcgctgataagcctgaagaaaatgcaggcggcggtggcatgcctgatatgggcggcatgggtggaatgggcggtatgggcggcatgatgtaattcatgctacctactgcttagagcatctgagtggattgaaagcttcctccagttttatgactgggggaagcttttttttatgtttttttgcattaaatgtgagaaggaataagttacatcttattttttctatattacaaaaaatacttgtaacagcaagtctatcagtataaaataaaacaacaggtcatctgatgactcggttttttataacttaaattgaaagcgataacaaattatgaaactaagataacggagggatgttgatgttactacttgttgctttaagtgccattttagccccatttacctttctagtgctccttcgaatgcctgctaagaaaggaatgttcttcagtgcgttaattgtaattatcttagctttttttgtttggggagtagagggagaggttattgttgcatctgttctggaaggatcgcataaggcgttaaccatcttatttattttgttcggtgcaatagttttattgaatacacttcgtcatacaggtgctgtgaatcgaattaatcaagggtttcgaaatatatcaacagacatgcgagtgcaaattgttattgtggcttttttattcggtgcattaatcgagggtgctgcaggatttggtactccagcggcgctcaccggaccgctgttggtagcgttaggttttaccccaatggcagcagcggcaattgctctcattgcagatagttcagcggtatcttatggtgctgtcggtacgccaattcaagtggggcttagtaatctaccagacgcagggttatctttttatcaagatatcggtgttcaaattgctttcttcgatttatttgctggtaccttcattccgtttatattagtcgttgttctaaccgttttttttggtaagaagaagagttggaaagatgcaattgaaatgctcccctggacattattaatcggaattacttatacgtcatctgcttatctctatgctgttttgttcggtcacgagtttgttgccatcttagcttctcttaccgggttagtcgtagcgacccttacggcaaagaaagggtttatgcttccgaaatcttcatggcaagaagcacttcaagaagattttgttatagacgaaaaaggctcaaagatgggattagcatcagcgtggtctccttacttgattattgttggactattgttaatgactcgaattgtgcctgccgtaaaagagtttacgataagttgggtggacttgacgtggacgaatattttaggagttgaaggcattacttccaagtggcaagtattgtattcaccgggaactgtgctcgtgcttgcaacgattttagcggtactcattcaacgaaaatcattccggaatttttcagttgctgcaaaggaatcgattatatcgatgaaagatgcagcgttagctttaatcgccacattggctcttgtgcaagtatttacgaattcaggaatgaatatgaatgatctgattagcatgcctcaatacatagctcaaaccctggcgagtggatttggttccatgtgggtgctcgcagctccatttcttggagaattgggagcgtttattacagggagtgcgacagtatcgacactcacgttttctcccattcaatatagcattgcgaaagagacggggctcgcaaaggataccattctatcgcttcaagttattggagctgccgctggtaatatgatttgtgttcataacgttgttgctgcaggtactgtggttggactttctggaaaagagggagatattattcggaaaacgattttaccagctttgctatacggacttctggtaggagtagctgctttattcatgacagtgctgttttaattgcttcgtcacttttccaattcttctatttagagtaaaataaaagtaacaaacgatgggaagttggagggaaaatggtggaatacaaaccgattcgatcgaaaaagatttatgaacaagtcgcagattctctactcgaatcgttgaaaaatgggacattgaagtcaggagataagcttgatagcgtggaagttttggcaaaaaactttaatgtcggaaggtcggctattcgagagtcattaagtgcgcttcgtgccatgggaattcttgaaatgcgtcagggagagggaacgtatgtcaaaacctttgatgcttcccgtttttccttaccagtatccgttgcatttttaatgaaatcggaagatctgcaagaactattggaagtacggaagatacttgaagtaggcgcagctggggcagcggcagcttcatataagagtgaagatctatccccgatgagagaggcaatcgggaagatggaagaggcaaaaggcagtggtgagatcggggatcaagcggatttagcgtttcatatggcactggtcaaagcgagtcacaatcaaatgctgattaacttaatgaacagtgtttctgaaattatgatgcaggcgatgcgagaaacgcgtaaattgctgcatactccggaagggacagaacgcttgttacaagaacatcaacgaatattagatgcaatcgaaactcgtgatgaggataaagctcgagaagccatgttagcacatcttaacaatgtagaagagtcgttagctaattttatgaagtaaagggatctgatttaggcagtttcctttttatttcatttagtcatctgatgaccttatgtctaaaggggaggtatgatcatgaaagtttctttatttattacttgtttatgtgacacgttcacacctgatgttgggaaggatacggtggaactgttagagcgctttgggtgtgaagtcaattttccagctggacagacgtgctgtgggcaacctgcttataacagtgggtacaagagtgagtcagtcaaagcgatgaagcaaatgatcaaggcttttgaatcatccgaatatgtcgttgggccttcaggatcttgcgtgcagatgttgaaagaatatccgaaagtattggcagaggaaccggagtggcgtgatagagcacgtaacctttcggataaaacgtttgaattaacacagtttttggttgatgtgctaaaagtaaaagacgtaggctctacatttacgggaacggcaacgtatcatccatcgtgtcatatgacgcgtttgttaggtgttaaggacgctccgagaattctattggagaatgtgaaagggctgaaccttattgatttgccaattaaagaggattgctgtggatttggaggcaccttcgctgtgaaaaattctcaaatatccggacagatggtgcaagagaaggcagagcatattgaagaaacgcaagccgactacttaattggtggagatatgggctgcttaatgaatatgggtggacgattacgcagaaatggacaggaagtgaaatttcttcatatcatacaggtattaaacactcagtaaggagggatagagatgagtattaaaatagggcataaaccttatgctgaacgaattcaagacggtcttaataattcctttatgagaaaagctgtttccagtgcgcaggggcggttccgttcaggacgtttaaaagcagcagaagaacttggagattgggaagattggagaacccttggtgaagagattcgttctcatacgatggaaaacctggattattatttgcatcaattgagtgaacaggtggaaaaacgtggtgggaccgtcttttttgcagaaactgcggaagaagcgaacgagtacattcaggagatcgcgaagaaaaaacaagcgaagaaagtcgttaaatcgaaatcaatggtgacagaagaacttggattgaatacagctcttgagcaaagtggatgtgaggtagttgaatcggaccttggtgagtggattttacaattggatgaagatcctccctctcatatcgtgaccccagcgcttcataaaaataaagagcaaattcgtgaaacgtttatgaagaagaaaggctataccggttcggatgatcccgttgagctggccgcttttgctcgtgaacaattgcgccaggattttctaaaagcagatattgggatcacggggtgtaactttgcggttgcggaatctggagcaatcacacttgtcacgaatgaagggaatgcgagaatggtaacctctcttccggatacccaaatttctgtgatgggcatggagcgaattgtgccaacttgggaggacttagaagttgttgttagcttgttgactcgtgcagctgtaggacaaaagcttacgagctatattacagcgttaactggaacacggctcgaagatgaagtagatggcccggaggatttccatcttgtgatcgtagacaatggacgttcgaaaatactaggaactgagtttcaatcggctcttcattgtattcgctgtgctgcgtgtattaatgcgtgtcctgtttatcgtcacgttggtgggcattcatatggatcgatttatccaggaccgattggagctgtacttacgcccttgctggatggatacgacgatcacaaggaccttccatatgcttcgaccttatgtgctgcatgtactgaagcatgccctgtcaaaattccgcttcatgaacatttaatccgacaccgagaaatcatcgtggaacgcgaaaaaatgacgaccaaagcggaaaaaatgatgatgatgggtttcgctaaatgggcttccacaccagcggcctataaattatcgacgaaaatggcgagaacaacgctgaaaccttggataaaagatgactatatcgaaaaaggtccaggtccaatgaaaggctggacggagcaacgagatttcccagctccatcgaaggagcgttttcgcgattggtatcaaaaacgacagcaaaggagtgatcattgatggccattcataaccgggaaaggtttttgaacaacctggctgagcaacttgatcgaacgcgacgaacggaagtggaaccacctgtctattctgtctacccgcaggagcgagtgtttcaaggggcgactcaggatgagctagttgagaaattggaggaacagtgtaaggtgattcacacttcatttactagaacgaacttggatggacttggagaaaccttacgaacggttcttaaaaactatgatgttaccaaagttgttggtgccagtgggccaaggattgaggaaacgggcttaagcaacgtatacaaagaaatccaatctgaaggctatcacgttcacatttgggatgaaaacaaaggacaagaaaacattacgtttgctgaacaagcaggagcaggaattgtgttcagtgatattacactggcagaatcagggaccgtcaccttgtttaacgatcggtataacggtcgatccattagcttgctccctgaaacattcattgccattgttccaaagagtacggtcgtacctcgaatgacacaagcgagtcaattgatacatgaggaagaaaagaaaggaaatcctgtttcttcctgtgtcagctttattactggcccaagcaatagtgctgatatagaaatgaatttaattgtcggggttcatgggccagtgaaagcaacctatatcatagtggatgatatctgattggcgagtataaagacctttttgtaagtttataaaacttataaagggtcttttttacttgtgtgaaaggaatattttgtatgaatcctttctttaggtcgctataatgtaagctaaagatacgtttagcgctagaggaggctagggtgtgcatgagaaacagaataaatcagaaaagaaaggaatgtcttcaacggggaaaatggttgcctggattgttggagggatttgtctttttcttctgatagtgaccggtatcatcatatgggttgtgatgacgttttttagtgggttttttactgatactgaagatgaattaaataagtatatgaaaaagaagtatggggaagagattactctcgtctatgcaggaaatcgtaatgaagccaacttgggagatacagagcataaagtcgctctgaaaaataaccccgactttgacttttggatcgatgttaacggtttttttcgaacaaatgtggaaggggacgacttcgagaaaggtaagaaaacctacgagaagtaccaaacgattgaagacgatatgatggacattagcgaatttggatttactagaatacaagaagggcgatacagtacatatcttgattatacagaggaagggttttatcgcttaaatgttcaggacgatcatttactcagccgctatggattaatagaagaagagttaaaagacatgatggaagcaattgaatggattcgatcaaaaggcgttgatatcggtcaattgatggtatttggtcgcccagatgaagcgaaggaaggctaccagattgagttattagtcaaagatgtccaattgatttcatcgattgcggatttaaaaaaggaaattgcagaagaacatccaagtacgctcagtaaagaaagtgaagaacgaatgatgccaaaagtaaagacgctaaatgaagagcgtattataccgaacgttgccgatcaagatacacatgaagcgcactggatagattgcaatgcaattgataaagaaggcaagtgctcgaatatgcttctaatgctttattatgaaagcgatggattttatccagggcatccatacgttgttcaagatttaacgaaagtgtttgaatggattaaacctgagcttggcgaagatgggaacgtgacgatacaagtaattgaaaaagaagtgcaaaacgaacctttattaaatttaatagagcttgataaacatgatgataaagatatggtaggcgtggtttgggagaatgatcagaaggaatttcaagaattaaaaagacagcaaggtgaaggaagtgattgaacatcgaatccgtcttaaggcggaggggatttcaaaccgtgggtcatcgtcgcatcttactgcttttcgatacacttaagctatcaaaaaagcagaggtgttggggatggcgttaaaggagaacattcttgatcaaaatgaacacacagtgcaagtcgactctatttttagaaacaaaaacttccttctcttatggggagcggcgtttttatcgagttttggtatttccttttttcttttttcggagagctggtatgtcgtcaatgttttaaaccttgaagcttcactcggacttatttacattgcatcgagcataccgagactattgtttatgatcattagcggtacggtagctgatcggatgagtaaaacaaaaatgatgtttgtatccgatttttcgagaggcgttttacttgttgggcttgttctctggtttatctttggtgatgtaacactctggacatttgtaggcgttgcttttttctttggcattcttgacgcttttttctgggctgctgaaagtgctgtgattccatccattattcggaaagaaaacctcactagaggaaattctattattcaaatgacaaaccaggcttcttttattatcgctcctatgctggcaggattattaattgcatttggaagctatgaaatggtatttgcgataacggcgataatgctttttcttggtagtatccttatctatcttatgaagattccaaaacgtacagaggagcaggaaacgagtgagcaatctttttttgagacttttaaagaagggcttctctatgtaaaggaatcaagagttttagttgttgtcgtgctgacgacggtatttatgaatttgtttctcgttggaccgctgtcgatgggacttccgcttttcgttaagacgatcctgaatggtgacgccatgacgtttagtttattagaagctggggcggcagttgggatgttaattggttctattgttgtcggcgttcttaatttaacgaaaaagcgggggaagatcgcattacttgctcttatcttctctgggcttgcttttatcggactgagcttttcgacagtgctttgggtgagtattcttatgcttgtgatttttggtgcctgtctttctgcaagcaacattccttttatatcggccatacaaggcatgattgaagagaaggtgttaggccgagtaatggggctgatctcccttgcctccatgggtcttataccagtcagctacgctatgacagccctgctgctttctaccggaatcggtattgatcagataatggctgggggagctgtcttggttgtattgtatgcttgctttgtttatgcgaagtttcatgagctgagaaatgttgattaacacaccaaattgctgcttttctcctctccattatcaacgaagataatggggttttttatttggataaaaacctaaaaatttgaaaaaacaaggtttgattttagtcagttagggaacccgctctatataagattttacatatcgacatagcgggaggaattagcgtgagcgagaacaataagaaaaaaaagcagttagaaaaatatagcacaaatgataaaggtaaaatgacgacaaatcagggattgaaggtttcggaagacgaattttcactaaaagcaggggaacgcggcccaactttaatggaagattttcattttagagagaaaatgacgcattttgaccacgagcgcattcctgagcgtgctgtgcatgcacgaggtttctcggctcatggtgagtttgaagtttatgagtctcttgaagaaatcacagacgctgaattcttaaaggacacttccagaaaaacgccagtatttgttcgcttttcaacagtagcaggttcaaaaggatcttctgaaacggtacgagatgtgagaggattttcaacacgtttctatacggatgaggggaattacgacttagtaggaaataacattccagtattttttatccaggacgctattaaattccccgatttagttcatgcggtaaaacccgaacctcataatgggatgccacaagctgcctctgctcatgatacattctgggactttattgctaacaatcaagaatcggcacacatggcgctatgggcaatgtccgacagagcgatccctcgaagttttcgtatgatggaaggatttggtgttcatacattccgattcgtgaatgcaaaaggagaagcgcggtttattaagttccactggaaaccaaagttgggcgtacattcactcgtttgggatgaagcacaaaaactctcaggtaaagatgctgacttccatcgcggcgacttgtatgagtccattgaaaatggcgactaccctgagtgggaattaggcgttcaaattattaacgaagaagatgaatttaaattcgattttgatgttctagatccaactaaaatttggccagaagaagatatccctgtcaaaatcgttgggaaaatgacattaaaccgaaatgttgagaacgtctttgctgaaaatgaacaggttgcttttcatccaggtaacgttgtaaaaggcatcgacttttcgaatgatccactacttcaaggacgtttgttctcttatacagatacacagattaaccgttttggtagtgcgaactatcatgagttgccgattaatcgcccagtttgcccgtttttcaacaatcaacgtgatggctttatgcgccaaacgattaacaaaggccaagtaagctaccacaaaaactctcttgctgataatcagccagaaccagctactgaagaagaaggtggctacgttcattatcaggagaaagttgacggtcataaggttcgtgcacgcagtgaaagtttcaaagaccatttctctcaggcagttcttttctttaacagcatgagtgatgtggagaaagaacatattaagaatgcctttagttttgaacttggcaaacttcaaagtaagtccgttcagcaacaagtagtcgatatgctctctaatatcaatctagacctttctcaaaccgtcgctcaaaatattggtgcaaaggaacctaatgaaggtggatcagatattacaaaagcatcacctgcgcttagccaattaaatacaacgtttacgccggatactagaaaagtaggcgtaattgtagacaatggatttaatggagaagaactcattcaagtacttaatgagctgaaagaaaaagggattaagcctgaactaattagcgataagcgcggtgtgaaaacagctactgatggggctgaagccgagattgatcacacattcctcacatgtgattctgtcttgtttgatgcaatttatgcggttggtgggaaccaagaaagtaaaggattctatcaatccgctaattattttattaatgaagcattctcacactttaaaccaattggcggaacgcatgaaggtatgaagtggttagagaataacgacttagtcgggcagtcaggggttgtcactggcaaagatatgaataaatttgtaaatgagttcagtgaagcgattgcgacgcatcgtcattgggatcgtaaactagtttaatggaatagaatgcaaaaaagagagagggggaaatcctctctcttttactttgaaaaaaatgacaaaccttgattactcctctatcatctcttttaacactacagcatgattatgtttcatatccttggcaccaaataagagaacgagtctttcgtttgtagccattttcttgagttcttgtaatttcgtctgagccatcttactttcattgatttcgttttggtatgctttcttaaagtcatcaaacttatcaggatcatgatcaaaccattttcgtaacgaagaacttggtgcgatttctttcatccagtcatctaatttagctttctcttttgatatgcccctcggccatacgcggtcaattagaatgcgattcccttcaagagggtggtcttcttcataaattcgtctaaggataactgacatctaaatcacctttcagttttgttgctttcgttttagtcgtatatcacgaaaaagaagtcaatcctagcgattaggattggcttcttttatgatttacctcttcaacatgccatgtgggtcaatcacaaacttcttcgctacaccactatcaaactcattatacccttgaggggcttcatcgagactgataacggttgcatttacggcctttgcaatatcggcttttccatttaaaatcgccatcattaattgacgatgatactgcatgacaggtgtttgccctgtaacaaaatggtgggcttttgaccagccaagtccaaatcttactttaagggagccttgcttggcatctttatcatctgctccaggatcctccgttacatataaccctgggatccccatctttcctccagcttctacaacatccatcatcgtatttagcacaattgccggctgctcttcattatcagttccgtgtccataagcttcaaatccaaccgcatcgatcgcgcaatccacttcaggtatgccgagaatttgttcgatttgttcacccggatcatggtgttctttgagattaatcgtttcacatccgaagctacgtgcttgagcgagacgttcttcttttaaatcgcctacgatcacaacagcggcaccaagtaactgagcagaatgagctgcagcaagtccaactggtcctgcacctgctacataaacggttgatcctgtcgtcactcctgcactaatcgctccgtgatagccggttggaaaaatatccgatagcatcgttaagtcgaggattttctccatcgctttctctttatcaggaaaagcaagcaattgaaagtctgcataaggcaccatcacatattcggattgaccaccaacccagccgcccatatcaacgtatccgtaagcagcaccggggcgttcgggattcacgttctgacaaatgtgggtatcctgacgcttacacattttgcatcgaccacaagcaacattgaatggaacggaaacaatatctcctttcttaatgaactcaacatctcttccaacttcgattacttcaccagtaatttcatgaccgagcactaaaccagagggagctgttgtgcgaccgcgaaccatatgctggtcgcttccgcagatgtttgtcacgatattcttcaagatcacgccatgttcacatttacgaccagcattgcttttgggtacacctggaccctcacgaagaactaaatctggatagctaatatcctgaacttcaacacgacctgaacctgtataaacgacaccgcgattacctgccatttgtacttcctcctttttgtttttagacgagagggacgagaggcttagcgtgaccttatgtactcacctcgatattatagtttgaagattatgaattcttgtgatgttattctctgtaggagggattccctttttcatccaggctaaaacgatattcgttggtgctagttatcgttttgtatcaaagaaaaatgaaaatataggaaaacgcgcttcttattaacgtcgctaaagtattttttgttacaataaggttatgagtattcagacattttttttatcgtgttatggaaaaatgatagggaatgagacctatttttatactagttatggaagattaagtttattggaggaatcaatgatgagttcatcgtaccagtttgatgcgtaccatccagctgttcagcaagtaattgagaatattgaaaaggtaatggtagggaagcgggatgcaactgaattaagtttagtggcgttgctcgctggaagtcatgtgcttcttgaagatgttccgggcgtggggaaaacgatgatggtccgtgccttagcgaagtccgttggtgctcagtttaaccgcattcagtttacgccagatttactgccttcagacttaacgggggtttccatctttaatcaacgagaaatgaaatttgaatttcggaaggggcctttgttaggaaatattattctagcagatgaaatcaatcgaacatcaccgaaaacacaatcagctcttcttgaaggaatggaggaagggaatgtaacggttgatggagagacacatgttctaccacagcctttttttgtaatggcgacgcaaaatccaattgagtacgaaggaacttatccacttcctgaagcacagcttgatcgctttttattgaagttgcgaatgggctatccttctcctgaagaagagcttgaagtgttgaaccggacagagcacgcccatcccatcgactcgattggcacggcacttgagcttggagagctgcttgatatgcagaaaaaggtgaaagctgttcttgtggatgaatcggtcaaacaatacattattgatattgtaagtcgaacgagaaataatacgtcgatctatcttggggcaagtccgcgtggttctctttcgttaatgaaagcttgtcaggcgtatgcatttatgagaaatcgtgattatgtccttccagatgacgtgaaattcttagcgccttatgtcttatctcatcgcgtcattcttaaatcggaagcggcttttgaaggacaaaagcctgaggagattattaaagaaattcttcaccgcgttcgtgtaccaattcggagggaagagaaagtgaaatgagggacaagcttgccaataatagagtgttaaaattcttgtttttaggcctcctctttctgcttaccttctcctatgcaatgtttcagggagggtttgttagttggtttctcttctatagctttcttccttttggtatttattctctccttctcattttttatccactgcaatcgattaagatgacgcgtgatattagtcataccgagttaacggatggtcaggagttaacaatatcgattcgaattgaacgaaaaagctactttccgcttttttatttagtagtagaagacgtgttaccggaaagacttgtttcctttgcgaaggagtcgtcgtcaaactatcagaaacgttcactagcattattgcttccgatgtttagaaggaacttaacttatcgctataccgttaaatcgattccaaggggagaatatcaattcagagaaattcgttgtaaaacaggcgatttgtttgggtttgtgcaacatgagaataaggttgtgagagagcaagccatttatgttctcccaaactatcaagagatttcctggtctccctataatcaacagctttcgggaacaaggccatctccgaaaaaagcagatttagattattcaactgctgtgagcgtgcgggattatgtaccaggagataaactatcgtggattgactggaaagcaacagcgcgggggtcaaaactactaaccaagcaattcgaacagcaaatcagtcaggattacatggtcttccttgatcgagaaacggctcactatgggcgagttggatcccctttgtttgagaaggcggtaaggcttgccgcttctgtaacaaatgctgctttaaagcaaaatgcgatgattggacttgtttcgtcaggaaaggatcactccgttttaagcattaatggaggaaaggctcaaagaaggagagtctttcatcatcttgcacgcgttcaagcgaatggaaatacaacatttgatacagttgtgaaaagggaagctcatcattttccagcaggaacaggcgtgttgatgattagtccttcgcttgatggggcttttacctctacgttaaaagaacttgttgcccgaaaggttcaagttgagttcttctttgttaccgagcatattacgctagaacaacaagcgaagatcaaccagcttatgcagtatggaataaaagcgaatgtgattgcgggaaattcgtttaatgaggaattaaaggggggtgggaagcgtgcaacaagttaatgaaaaaacggactggctttacgctcttctcctctacggattgggttttctgttattttgggaatggttacgacctctctcgatcatttcagatacgggtcaaacggaaatctttattttgtttacagctttcttgttcttactctcgtattttcaactgcctttttggctgtcttttccaattaaagggacagcaatggtttatgcgttacatgccatgtttttccctggacctttctttgattttttatggctcgattattttctatcggatttttctaagaatatcgggttattattcgatggccgttttgatagtctttcgaatgtctttcgaacgttcctgtttttcattttgctttggcttattagctacttgatgcagtattggctaattcaaacgagacgtatttttttatttctactcgtaaccattgtctacatctcagtgattgatacgttcacaacctatcaagcggataatgcaatcatacgcattgtgataattggctttgtgctacttggtcttttacaaattttacgcattcaagaacaggaaggagtttcattttcaaaaggccgttttcctgtttattggcttatgccgcttattgttgtgattgcgttctcttctttatttggctatattgcgccaaaagctgaacctttatggccggatcccgttccttttttgaaaaagacgactggtgatgagggagacggtggaaatgggaatggcattaacaagattggatacggagaggatgactcccgtcttggtgggcctttcgtaatggatgatacaccggtttttacagcgcaaattaaagatcgcggatactggcgtgttgaaacaaaggatatgtataccggaaaagggtgggaatcatctgttcaggaccgtgtcatgtttgaaggtagcactgaaacgttgtttgaagatggtgtggaaatagaagcttatgatatgaagatgaacatgactgggaatgaggaatttgattttatcgtccaccctagtcaggtaacaaatatcgaaacgggacaagacgtgcaactacttgaaaatcccttgagtgggaaagtgtttacgcaaaatcttggcgaatcggttgtacttgataattataatttagaatatgaatcacctactttttcagaaaaaatgttaagagaagcaccggctgattatccggagcgattagcaaatacgtatcttcaattaccggaatctcttcccgaaagagttgctgatcttgcagaagagattacgagtgaagaagataatccctatgataaagcgcgggcgattgaaaattactttgttgggaatggatttgtgtatgaaacgactgatgtcgccataccaggcgaaaatgttgattatgtagatcagtttctttttgaaacccagcttggctattgcgataatttctccagttcaatgactgttctattaagaagtatcgggattcctgcgagatgggtgaaaggctttacggaaggagaatttgttgacgtagcaggtgattatcgtgaatatgaagtaacgaataacaatgcgcattcatgggttgaagcgtattttcctgaagtaggttgggttccatttgaaccaacgcgtggtttctctaaccaggcggattttgtgagcgattatagtgaggatgaagcatcaaatacggaaacgtctgatccagctcaagctgaagaagagcagccccagcaacaggagcaaatgccagaggaacaggaagcatccggatcctcttcttcctcctttgaatggtctgtgtggtataccgtcttgataactgtaattcttctccttgtatgttacgtcgcatttaagaactataagaaatggttaaaacagtatatcctttcaaaatataagaaacgtgatgatggtaaagtagtatctgaagcatacttcagactactatggctgctcgacttacatggtattaaacgaggcgcaaaccaaacgcttagagagtatgctgttcaagttgatcagaagcttcaaacacaagagatgaaagaattaacacgtcgctatgaagaaaattactatcgcgggaaaacgaacaatgatgcatgggatgaaatgaagcaattgtgggaaaatttaattaaaaagatgcaatcttgaccgttgtatagacggttgatagaatgaatccatagtttgaacagcaagttgtcaccttcgtatatccctgggaataaggcccagaagtctctaccggatcaccgtaaatgatctgactatgaaggcagatactcctagtataagccaggattctgcctttgtaccatggcagagttctggctttttctatgtaacctgggagggaagaggcagaaaacttagcaatctttcgtttttttattggatttaggaaatgctactagagactaaatagaagtgagggaatttgatgttagaagaacaggaatccattattgtccttgattttggtgggcagtacaaccaactaattgcgagacgtattcgtgatcttggcgtgtttagtgaattgcatccgaacacgattacagctgaagaagttaagaagattaatccaaaaggaattatcttctcaggtggtccgaacagtgtttatggtgaagacgcaccgcgctgtgatgaagaaattttcgaacttggtattccggttcttggaatctgttatggtatgcagctgatgacgcatcattttggtggaagtgtagaagcagcaacacatcgtgagtatggtaaggctatgctaaccattaatgataaatctcctttatatgatggtcttcctgaagaacaatctgtttggatgagccatggagatctagtgaaagctccaccagaaggatttgaagtagcggcaacgaacccatcatgtccagtagcagctatgagtgatgtttctcgtcatctttatggtgttcaattccaccccgaagttcgtcatacagagtacggaaatgaattgctaaagaatttcgtttacaaggtatgtgaatgcaaaggtgaatggtcaatggagaacttcattgatgagcaaatcgatacaatccgtgaagcggttggaaataaaaaggttctttgtgcgctaagtggaggagtcgattcttctgtagtagcggcgttaattcaccgagcaattggtgaccagctaacatgtatgtttgttgatcatggtcttcttcgtaagggtgaggcagacagcgtcatgaaaacatttggtgaagggtttgaaatgaacctgatcaaaattgacgcagccgaccgttttcttacaaagcttaaaggcgtaacggatccagagaaaaagcgtaaaatcattggaaacgagtttatctatgtgtttgaagaagagtctgaaaagcttgaggatatgtcattcctagctcaaggaacgctttacacagatatcgttgaaagtggaacggctactgctcaaacaattaagtctcaccacaacgtaggcggccttcctgaagacatgaagcttgatttaattgaaccgttgaacatgctgtttaaagatgaagtacgtaaagtaggaactgagcttggtcttccagatgaaatcgtttggagacagccattccctggccctggtcttggaatccgtgtgattggcgaaataacggaagaaaagcttaaagtcgttcgcgactctgatgccatccttcgagaagaaattaaaaaagcaggacttgatcgtgatatctggcaatacttcacagccctgcctgatttccgaagtgtaggtgtgatgggagatgcaagaacatatgattacacaatcggtgttcgtgcggtaacatctattgatggaatgacctcagactgggctcgcattccatttgaaattcttgaaattatatctacgagaatcgtcaatgaagttgatcatgttaaccgcgtcgtgtatgacattacttctaagccaccagctacaattgaatgggaataaacacgaacaaaaatataataaatagataaaatgttcgtgttttgtgttgacggcgcgtctgatagctgatacactacaacagtaattaaatagaacgatcatccatcgtataacatcgggaataaggcccgaaagtctctaccaggttaccgtaaataacctgactacgaaggaaacagaggaagtggtgaaagagtaagctcctgtagcgactctttagccgttctctcttttcctattagtccgctccgggtagagaacccggggcttttttctttttcgtgaatggttacctttccttagcagagaataagcaaaggtaacgagccttttagaaagatggatgaaggggaataagggggaattaagaaatggatcgtttttttcgctttcaagaacacaatacaacatatagaaaagaaacaattgcaggattaacgacgttcttatcaatggcttatattctattcgttaacccggcagtattggctgacgcaggaatggatcaaggcgccgtgtttaccgctacagctcttgctgcagctcttggtacattaattatgggtgtgttagctggatatccgattgcactcgcaccagggatgggcttgaatgcatttttcacctactcagttgtcaccgttatgggtgtaccatgggaaacagcccttgccggggtacttgtttcaggaattatctttattattattactatttttaaaatcagagaaatgattatcaacgccattccaatggaattaaaatacgcagcggcgagtggaattggactctttattgcatttattggtcttcaaagtgcaggaatcgttcaaaacaacgattctacgttagttcagttaggaaatcttcttgcgggaccaacgttgcttgctgtattcgggttgattatcaccgttattttaatggttcgtaatgttacgggtggtattttctacggaatggtgattacagcgatcgtaggaatgatctttaatcaggtaccaataccagatggcatcgtgggaagtgttccaagccttgaaccaacgttcggcgttgcttttggtcaccttggtgatttgcttacgattgacatgcttgtcgtcgttttaaccttcttattcgttgacttctttgatacggctggtactttaattgctgtagcaacgcaagctgggataatgaaagacaataaactcccaagagcgggaaaagctttatttgcagattcatctgcaacagttcttggcgctgtacttggaacgtcaacaacgactgcctacattgaatcatcatcaggagtagcggctggaggacgaactggctttacttcggtcgtaacagctggatttttcctgctagccttatttttctctccattattagcagtcgtgactccttccgtcacagctccagtgttgattatcgtaggtgtcctgatggtgagcgtacttggtaacattgagtggaaacgatttgagattgccgttcccgcgtttctaaccattattgcgatgccgcttacttacagcatcgcaacaggaattgcgcttggattcgtcatgtatccgatcacgatggttgtaaaaggggaaggaaagaacattcatccaattatgtacggactgttcttcgtttttatcgcctattttgtatttttagcatagtaagtttaaaagcagccaaactggctgcttttcttgtgaggaaaaagcaaaggaagtcattgaaagaatcatttattcttgaagcgtggagaagctaatcaaacgtttgtttaatcataaaaaattgattcacttattggattaaaagaaaagtttcattaaatggaaatgagtaaatatgaaaagagtttgctttacctttgctgttttaagtaacctttaccagaatgttttctttgaatttgttaaataccattgaccatatcgtactttactgataaagtagagaacgttgttaagaaaacgacagcaaacgcatgaaaaaaatgattgacttcattttaatcttcatgtattatagagaacgttgccgctgaaaaaaagcgcataacatcattcaaaacattttaaaaaaagttgttgacatcaaacggaacaacatggtatattagttgggtcgctgaaaacgacaacgaaagaaacaaattgctctttgaaaactgaacgaaacgccatgtaagtagttgtttctacggaaacaaaacattattttaaaagctagattaagctttctatcggagagtttgatcctggctcaggacgaacgctggcggcgtgcctaatacatgcaagtcgagcgaagagatgggagcttgctccctgatcttagcggcggacgggtgagtaacacgtgggcaacctgccctgcagactgggataactccgggaaaccggagctaataccgggtaatacatcgcaccgcatggtgcaatgttgaaagttggctttctgagctaacactgcaggatgggcccgcggcgcattagctagttggtaaggtaatggcttaccaaggcgacgatgcgtagccgacctgagagggtgatcggccacactgggactgagacacggcccagactcctacgggaggcagcagtagggaatcttccgcaatggacgaaagtctgacggagcaacgccgcgtgagtgacgaaggccttcgggtcgtaaagctctgttgttagggaagaataagtaccgttcgaacagggcggtaccttgacggtacctaaccagaaagccacggctaactacgtgccagcagccgcggtaatacgtaggtggcaagcgttgtccggaattattgggcgtaaagcgcgcgcaggcggtcttttaagtctgatgtgaaagcccacggctcaaccgtggagggtcattggaaactggaggacttgagtgcagaagaggagagtggaattccacgtgtagcggtgaaatgcgtagatatgtggaggaacaccagtggcgaaggcggctctctggtctgtaactgacgctgaggcgcgaaagcgtggggagcaaacaggattagataccctggtagtccacgccgtaaacgatgagtgctaggtgttggggggttccaccctcagtgctgaagttaacacattaagcactccgcctggggagtacgaccgcaaggttgaaactcaaaggaattgacgggggcccgcacaagcagtggagcatgtggtttaattcgaagcaacgcgaagaaccttaccaggtcttgacatcctctgacaatcctggagacaggacgttccccttcgggggacagagtgacaggtggtgcatggttgtcgtcagctcgtgtcgtgagatgttgggttaagtcccgcaacgagcgcaacccttgatcttagttgccagcatttagttgggcactctaaggtgactgccggtgacaaaccggaggaaggtggggatgacgtcaaatcatcatgccccttatgacctgggctacacacgtgctacaatggacggtacaaagggcagcaacaccgcgaggtggagcaaatcccataaagccgttctcagttcggattgcaggctgcaactcgcctgcatgaagccggaattgctagtaatcgcggatcagcatgccgcggtgaatacgttcccgggccttgtacacaccgcccgtcacaccacgagagtttgtaacacccgaagtcggtggggtaacctttatggagccagccgccgaaggtgggacaaatgattggggtgaagtcgtaacaaggtagccgtatcggaaggtgcggctggatcacctcctttctatggagaattacgaaggtaacttacgttaccaaccttacatgagcgtttcgtttagttttgaaagaataatttattctttcaactgaaaaggtaagttttgaagaagagcaagtctcttcgtagaaacacctccggctaatggctatgtcggggtatttacttttcttttgtgggcctgtagctcagctggttagagcgcacgcctgataagcgtgaggtcggtggttcgagtccactcaggcccaccataaaagaattctggggccttagctcagctgggagagcgcctgccttgcacgcaggaggtcagcggttcgatcccgctaggctccaccaacacatctactatagaatcaagcatttgtttgattcaagtagtagccttgttccttgaaaactagatagcataaacaacgacatccaataattattttttatgcaagaacttagtaataactgatgcgttacggcagcaatgcctaacaaatcgaaggttaagctactaagggcgcacggtggatgccttggcactagaagcctaagaaggacgggacgaacaccgatatgcttcggggagctgtaagtacgctttgatccggagatttccgaatgggggaacccaccatctttaataggatggtatccatttctgaatacatagggaatggaaggcagacccggggaactgaaacatctcattacccggaggaagagaaagcaaatgcgatttcctgagtagcggcgagcgaaacggaatcagcccaaaccagagggcttgccctctggggttgtaggacgtctctttggagttacaaaggcacggatagacgaagcgacctggaaaggtccatcagagaaggtaacaatcctgtagtcaaaatccgctgccctccgagacggatcctgagtacggcgggacacgtgaaaccccgtcggaatctgggaggaccatctcccaaggctaaatactctctagtgaccgatagtgaaccagtaccgtgagggaaaggtgaaaagcaccccggaaggggagtgaaaaagaacctgaaaccgtgtgcctacaactagttggagcccgttaatgggtgacagcgtgccttttgtagaatgaaccggcgagttacgatcccgtgcaaggttaagctgataaggcggagccgcagcgaaagcgagtctgaatagggcgaaatagtacgtggtcgtagacccgaaaccaggtgatctacccatgtccagggtgaagttcaggtaacactgaatggaggcccgaacccacgcatgttgaaaaatgcggggatgaggtgtgggtagcggtgaaatgccaatcgaacctggagatagctggttctctccgaaatagctttagggctagcctcgcggcaagaatcttggaggtagagcactgattggactaggggtccttaccggattaccgaatccagtcaaactccgaatgccaacgatttatccgcgggagtcagactgcgagtgataagatccgtagtcgagagggaaacagcccagaccaccagctaaggtcccaaagtatacgttaagtggaaaaggatgtggcgttgcttagacaaccaggatgttggcttagaagcagccatcatttaaagagtgcgtaatagctcactggtcgagtgacgctgcgccgaaaatgtaccggggctaaacgtatcaccgaagctgtggattgtcttacgacaatggtaggagagcgttctaagggctgtgaagtcagaccgaaaggactggtggagcgcttagaagtgagaatgccggtatgagtagcgaaagacaagtgagaatcttgtccgtcgaaagcccaaggtttcctgaggaaggctcgtccgctcagggttagtcgggacctaagccgaggccgaaaggcgtaggcgatggataacaggttgatattcctgtaccacctcctttccgtttgaacgacgggggacgcagaaagatagggagagcgcgctgctggaaatgcgcgtccaagcgattaggctggtgaataggtaaatccgttcaccgtgaaggctgagtcgtgatggcgagggaaatttagtaccgaagtccttgattctacgctgccaagaaaagcctctagtgaggaaagaggtgcccgtaccgcaaaccgacacaggtaggcgaggagagaatcctaagacgatcgggagaactctcgttaaggaactcggcaaaatgaccccgtaacttcgggagaaggggtgcttcctcgggtttatagcccaggggagccgcagtgaaaagatccaagcgactgtttagcaaaaacacaggtctctgcaaagccgtaaggcgaagtataggggctgacacctgcccggtgctggaaggttaagaggaggggttatcccttacgggagaagctctgaatcgaagccccagtaaacggcggccgtaactataacggtcctaaggtagcgaaattccttgtcgggtaagttccgacccgcacgaaaggtgcaacgacttggatactgtctcaacgagagacccggtgaaattatagtacctgtgaagatgcaggttacccgcgacaggacggaaagaccccatggagctttactgtagcctgatattggattttggtacagcttgtacaggataggtaggagccatagaagtcggaccgccaggttcgatggaggcgtcggtgggatactaccctggctgtactgacattctaacccagcaccgtgatccggtgcggagacagtgtcaggtgggcagtttgactggggcggtcgcctcctaaagtgtaacggaggcgcccaaaggttccctcagaatggttggaaatcattcgcagagtgtaaaggcacaagggagcttgactgcgagacctacaagtcgagcagggacgaaagtcgggcttagtgatccggtggttccgcatggaagggccatcgctcaacggataaaagctaccctggggataacaggcttatctcccccaagagtccacatcgacggggaggtttggcacctcgatgtcggctcatcgcatcctggggctgaagtaggtcccaagggttgggctgttcgcccattaaagcggtacgcgagctgggttcagaacgtcgtgagacagttcggtccctatccgtcgcgggcgcaggaaatttgagaggagctgtccttagtacgagaggaccgggatggacacaccgctggtgtaccagttgttccgccaggagcatagctgggtagctacgtgtggaagggataagtgctgaaagcatctaagcatgaagcccccctcgagatgagatttcccacagcattaagctggtaagatcccttagagatgatgaggtagataggttcggggtggaagcgtggcaacacgtggagctgacgaatactaatcgatcgagggcttaacctaaaacgaaaagcgaagtaagccgtttaaatccgacaagcgttggaagcttttgaatcagacgcgctttttgcgtcagaatcaaaaggtgaaacgatcgaggatttggcttacgtagctggacatattattggaatacgttgtgcgtgctatctagttttcagggaacaccctgtaaagtctagtgacgatggcgaagaggtcacacccgttcccatgccgaacacggaagttaagctcttcagcgccgatggtagttgggggatctccccctgcaagagtaggacgtcgctgggcaacgaagaaaagcgagagaccaaatggtttctcgcttttttgtgttgataaagtattgaaaactcgcaagagaaaaaagcttcatgtgagacaatcaaaacttcttcgaaagctacgtaggggtgggagaagcaagaaattcgaggaagcaagtgatgtcagaccggagtggatatttgaagatccatgaggatctggcagcgcgcagctgacgaagaagttcgccgcttatcgcgccccgtgtgagaacacggaagttaagctctagcgccgatggtagttgggggatctccccctgcaagagtaggacgtcgctgggcaaaagaagaaaggcgagagaccaaatggtttctcgcttttttgtatggttttgtatcttaattttttattttatcttttttgattgttgtcaatcgacttctttgaaagctacgtaggggtgggagaagcaagaaattcgaggaagcaagtggtgtcagaccggagtggatatttaaagatccatgaggatctggcagcgcgcagctgacgaagaagttcgccgcttatcgcgccccgtatgagaacacggaagttaagctcttcagcgccgatggtagttgggggatctccccctgcaagagtaggacgtcgctgggcaaaagaagaaaggcgagagaccaaatggtttctcgcttttttgtatggttttatgggtgagtttttactagctcaaagcactcattcatcacgttcgcagaattaatctcaaattcgcgggaatatcatgaaaaagcgcgtaattaatccgattttcgcggaattatttgaaatatcgcggaattacaagtcatatccacttattcacttccaaaaagctgcctttatacataaaaacaaaagccgattactcaaaataagagcaatcggcttttttatgctattttgccttaccagtatcatcaatttctacccagtgctctgcccagttttcaatctcttgtaaaactggagcgagtgcgtaccctttatcgcttaaagagtattctatccgaacgggtgtctcaggaaatacatttcgtataacgatcccctgttgctcaagatcctttaacctctcagagagtacacgaccactaatggaaatggaggtttccacggtgcaaaatcgctgaggtccttccaaaagttgatgaataatcaggcctgtccaccgctgactcaaaagggacatcgctttttcaaatctaggacatagagaagatttattcataatcattcactcccaaattcattataacccagtatgattttaattcaaaagattattgattagaagcaagtaacttgacgttaattatttataattatatagttacttacataaagtaagttaatgagtttattcagaccactaaaaggagatttattatgaattatcattcagactctgttccacacactagtgaaattcatttatttgtgagtgacttaagtagatcaataaatttttatgaaaaaataatcggtttcgaagtactttataaagctagtgatcgtgccgtattcactacgaatggtgagacaccactgcttacaattgaacaaacaaacttaaaaagagactttccttcgactggcttgtatcattttgctcttcttgttcctgaacgtaaggatcttgcgaatgtactaaagcatttattaagtacaggatatccgcttcagggggcttctgatcatgctgttagtgaggcaatttacttaggagatcctgatggaaatgggattgaaatttatgcagatcgaccttctaaacagtggaactgggaggaagatcaagtagtgatgacaacaaatgcattgaacgctgaagaattaatgaaggaagcgtcatcaggggtttttgaaggacttcctgagaataccgttcttggacacgttcaccttcaagtttctgatctaaaagaagctaaagacttctatcaaaatggtttaggtcttaagattgtaagtcagttaggttatcatgcggtattcgcatcgtatggaggctatcatcatcatattggattgaatacctggcaaagcgctaatgctctgccctccaaagaaggaagcactggtcttaagtggttttcgcttgtttttacaagtgagttagaaagaagtaaatgcgtagagcaagtgaaaaaattcagcaacgtatggcagaaggatgatgattactatacaaatgatccttcagggaataggattcgtctcagtttgaaaaaataaagaaaaaggtggttatcaacttgagtatgatggataggatttttggttcaactaaaaatgagacgaatacagacaagaaggggttctacgaggcagtaaaagcaagaaggtctatttacgggattggaaaagaacacatcatttccgatgaaaaactgcaagaggtgattgagtatgcggttaaacacacgccttcagctttcaattcccaaagcgcaagggtacttgttcttttagatgagaaccacaataaactctggaatgaaattacgaaagagacgcttcgagccattgttcctgcagatcagtttgaggcaactgaaggccgtatgaacggattcgcaagtgggtatggtacggttcttttctttgaagatcaagatgtcattaaggggcttcaagaaaaactgccaacatttgctgacaattttccgaagtggtcacagcattcttctggtatgcttcagtttgtcatctggacagcaatagaaaaagaaggcctgggtgcttctcttcagcattacaatccattaattgacgatcaagtaaaagaagaatggaatgtaccttctagctgggaacttattgcgcagatgccttttggcaatccaacggcacctccaggagagaaagaatttcagccagtagaagaacgagtgatttttcataagtaaccaaaaagaagaagcgagatgcttcttctttttttaatggtgaaattttggaaatgttagttaatctaacatattatttcaagcttacaaacaataaatgaatgcgttaccaaacattggtataaatgtgttttcgccataattattttagcgtacgaagtgagcttgtaagataaaaataatccaaatttattttataacctcttgttttatgtataatatgaattatcataattttcggtttccatgtgagttaggaggagtttcattgaagctaatggcgagagaacaggagaaattaatgattgtcgtggcggcagatttggcaagaaggcggcaggctagagggttgaagcttaattatccagaagcgattgcgattattacatatgaagtgcttgaaggggcaagagatggaaagcttgtcgcagaattgatgcagtatggacgaaaaatcctgactagagaagatgtgatggaaggtgtcccggatatgattacagatatacaggtggaggctacctttcaggatggtaccaaattagtaactgtgcatgatccaattatatgaggggggaaagcattggttccaggtgaatacaagttaaagtcagctacaatcgtttgtaatgaagatagggaaactactgagatagaagtgacaaacgttggtgatcggcctgttcaaattggatctcattttcatttctatgaagtaaataaagcgttaacgtttgatcgtgatcgtgcttttggcatgcatttaaatattgccgcaggtaccgctgttcggtttgagccaggtgacgcgaaagaagttacgctagttggattttcaggtgatcgaaaggtgttcggacttaataatagaacgaacggctcgttagatagagaggtgaatatatgagttttgaactttccagaaaagcttattcggatatgtttggtccgacagttggtgatcaagtacgattagctgatacagagttatttattgaagtagaacgagatgaaacaacctatggtgatgaagtgaaatttggtggaggaaaggtgattcgagatggcatggggcagcatccactggctacaagagccgagtctgtcgatctagtcgtaaccaatgccctcattgttgattatactggcatttataaagcagacatcggagtgaaggatggtcgtatcatttcgattggtaaagctggaaatccttatttaatggacaatgttgatattgtgattggtgcttctacagaagtgattgctgctgagggaatgattgttacggcgggtggaatcgattctcacattcattttatttgtcctcaattaatcgagacagcgatcgagtctggtattacgacgatgctgggaggaggaacggggccagcgacaggaacgaatgcaactacatgtacacctggtgaatggaatatccatcgtatgcttgaggcggcagaagcgtttcctgtgaatcttggctttctcggcaaaggcaatgcttcagggcaagaggcgttaaaggaacagattgaggcaggcgctattggtttgaagcttcatgaggattgggggacaacagctgcttctatcaatacggcattaacggtagctgatcagtacgatgttcaagtcgcgatccatacggacaccttaaacgaaggtggatttgtagaagatacgctgaatgccattgatggtagggttatccatacgtatcatacagaaggagcaggtggagggcatgcgccggatattataaaggctgcttcatatgaacatatcctcccgtcctctacgaacccaactcgaccttttacaaccaatacaattgcagagcatctggatatgctgatggtttgccatcatcttgactcttctgtaccggaggatgttgcttttgcggactcgagaattaggaaagaaaccatcgcagcagaagatattctgcatgatatgggagtctttagcatcattagctcagactcgcaagcgatggggagagttggagaagtgatatctagaacgtggcagacggcagataaaatgaaaaagcagcgcggggtcatgccgaaagatgatggcaatgataacgaacgtgtgaaacgttatatagcgaaatatacaattaatccagcgattgcgcatggaatttcagacgaagttgggtccattgaagtggggaagttagcagatttcgttttatggaagccgggctttttcggcgtaaagccggagcaaatcgttaaaggcggaatgatcgcgtggagcgtgatgggagacccaaatgcttcgatccctacgccgcagccagctctttatcgaccgatgtttggacaatttggaaaagcgaaatcgaaaacatcgattacctttttatcacaagctgccattgaaaaaggggttcatgaacagcttggactacaaaaaatcattaaaccggtgaaaaacattcgaaagcttcgaaaaaaagatatgaaatacaatggcgaaacaccggatattcaagttgatccagagacatatgaagtggtagtaaatggtgaactgatcacctgtgaacctgcgacaagtgtaccacttgcccaacgatactttttattttgaggtggagaatcgatgatcattagtgaaatcaaggggaacattcatgaagaaaaaggagctttgccacacgtagaaagagtatatcttcgtagtgatgagcttgtgaaacgaattcagcgcgtgaaaacagatcatgggaaagagcttggtattaagttatccataccaaaagatttggtggatggcgacattctttatcgaacaggagaaaatatgattgtggtcagcgtcctcgaggatgaagtgattgtgattcagcctgattccttaaaacaaatgggggaaattgcgcatatgcttgggaaccggcatttgccagctcaatttgaaggggatgaaatgattgtacagcatgattacctggttatccgattgttaactgagatgaacgttgctcattttattgagaaaagaaaaatgaaagaagcgtttaaatacattgggcatgactaatgcgctttttccgatgctacaaatgagcgactcgcaatttccatcaggcgctttctctcattcctttggaatcgaaacgtatatttcgaacggcatcgttcatgattccgcttcctttcaacgtgtgctagaactttttctagctaatcaacttgtttatacagatggactagcctgtcgctttgcctatgaatggttggagtcaggtaacgttgagaaactgtgggaactcgatcaaacattgtatgcgcttggaatggctagagaaacgagggaaggaaacaggagaattggggatcgtctcgttaaagtcgtttcaacactttatccgagttcgatttttgatcagtatctcattgaattgaaaaggaaaaattcatttggacatggtgctctcgtatttgccatagtctctcatcaacttggcatcgatatagaaacagcggtttcatgttatggatttgcgactgcttcgtcacttgttcaaaatgcggtgcgaggtgttccgcttgggcaaactgatggacagaaaatccttgtaaacatccagccgttattaacgaatagcgtagaaaaaataatgatacttgatgagagtgactttggggtcggagcaccaggtcttgaaatcgcacaaatgcagcatgagaccattaatgtccgcttatttatgagctaacgaaaggatgatgaaaatgagtgaaccaattcgaattggcatcggaggcccagttggtgccggtaaaacattattagtggatcgattaacccgggcaatgaaaaatgaatttagtatggcagttatcacaaatgatatttatacaaaagaagatgcgatgtttttaaacaaaaatgggattttaccttctgatcgaattattggagtagagacaggagggtgtccgcatacggcgattcgcgaggatgcttcgatgaactttgctgccattgatgaactaaacgagcgtcatgaagatcttgatctcatctttgtagaaagcggtggggataaccttgctgctacgtttagtccagagcttgtcgatttctctatttacattattgatgttgcgcaaggggagaaaattccccgcaaaggtggacaagggatgattaaatcagatttgtttatcattaataagacggatctcgccccatatgtaggagcgaaccttgatgtgatgcgtgaagatacgttgaaatctagaggagacagaccgtttttctttacgaatttaaaagacgagactggtgtaagtgatgttgtgaaatggttaaaagaacaggcgttttttgtaggacttgagcagtgacttatacaggttaccttgagctagaagcatctgagaggtacggaaaatcagttctttcagatgcttactataacggtgtgtttaaaatctcacgccctacatacacagaggcaggtctcccgcttgtccaacttatccacgtaggtggtggctatgtcgatggcgatacatattttacgcaaattaatgtgaagaagaatgcgaagttagcggtgacgactcaggcttccaccaagatttataaaacgccaagcaagcaagtcgagcagaaaatcgtctataagttagatgagcaaagcgaattacatattaagcaagatccgctcattgcttatcgggatgcgcgttttttacaggaaacggacatctatatggataagagcgccgtcttttttttaaccgatattgtgacgcctggctggtcaaaggagggtgccctatttccatacacgcttgtgtcatccaaggtaaaagtctatcaaaatgataaactgacagtctatgatcacttgcgtttaaaacctcaggatgacgttagtaggcttttttatttagaggggaatacacatatcggatcgctgttttttatccatccgaatgtgacagatgaatggatcgaggagttacgaaaacacctttcttcttttgatgaagtgcattacggtgtttcattattagcggttcctgggtgttgtttcagaattcttgcgaagcggacatctttaattgaaaagatatttggtgcgattgaggcgttcattcatcgtacgattgacaatcaaggtgcgatatcctggcgcaagtagaagatataaagggggaaaacaatggacgctagtttagtatcaatcttagttattggatttgtacttgggatcaaacatgccattgaaccggatcatgtgattgctgtttcaaccattgcgagtaaaacgcgtagtttgtggaaatcttcgttagctggcgtttattggggaattgggcatacaacaacgctctttctagtagggatgcttctttttgtatttaatgcaaccatcacagataaatgggcgatgtcgcttgagatgcttgttggatttatgctcgtgtttcttgggattaaaacttttctaacaaaagcagttaataagggagtaaaaggtaatcgcagctatatccaatcaggaataatcggatttgttcacgggttagctggaagtgcagcaatggttcttttaacaatgagtacggttgagtcgttgtggcagggggctatttatattctcgtttttggtgtcgggacttgtgtcggcatgctaggattcacaaccattcttggcattccgttcgtcgctacaagaaaacaggtaacgttaaaccacagactaactcagctaacaggagttctctcaattggatttgggttttattatatttatcgtattggtgtaacagatggattatttagctttctctagaagagagtaaggcaaaacagaggcaatcggttacgtttaccgattgcctctgtttttaggattcgtctacatctgtaattttcaggcgctttttctcttctctcgattcaatgagtctatgaagatgaattaatagaatgcctcttttataactcgcatcaatcggtttgtcgcgaacaggaaaaggaagttcaacaatgcgctcaaatgggccatgcttatactcttcctgaacgtttcgataccctttaaggttcattgtcgtctgaccttttactttaagtgttcgataatgaatgtacacatccacatcatcgattttcttaattccgggaaggtagacggtgcaaataagttcgtttcctgcttcataaagattgacaagtggaccgttcgaagcgaacatatcctgaaaatctgtccagaagtcatcacccatgaatttattcatcttatttcgccaatcatacatttgactccagtagtcccccatatggtttcctccccgggctttttcccagtatatgcaccaaactagtaattgttaagagattgaagaaaaggttttcaaaaacgaatcccgttaaaaaagaaacatggaaaaattagtcgaaactttttagctaaattcgataaatatcgcatgcggttttctgtttcctcgtgttatgctagggaaagttcgagtttgaacgataagggaaaaggaggatggacatgctagatagtggtcttggcatggttgctaccatttttgttattaatatcgtatatgtatcgtttcttacgatgcgtacgatacttacacttaaaggtcagcgataccttgcagcaattactggaacaattgaaattgcagtatatgttatagggcttggtctcgtcctcgataatctaggacaaattcaaaacgttattgcatacgcccttggttttggtgtaggaattatcgttgggatgaagattgaagaataccttgcgcttggttatatcacagtgaatgctattacaacaaagcttgaagatgatattcccaataaattaagagatatcggttatggtgttacccattacctggcccatggtagacagggtgaacgtctagtgatgcaagtactaacgtcgcgtaaatcggaaagaaagctttataaagcgattgaagaccttgatccgaaagctttcgttatctcttatgaaccccgtaccttccagggtggattctgggttagaaaaattcggaggtaatgtatggaaaagaaagcgaagaaaaagaagttcgaggttcatgaaaatgaatcactttctgactgtttaaaacgaatggatgacgaagggtatatgcctgtaagacggagggaagaacctgtctttaaagaaagcaagggttctaaagaacctgagctttgcggtcggaaaattgtttttgatggaaagttaaagtaaaaaccgaacattatagtcaatataaaacacatcgttcgatttttcgttgacagttgaacgtcgctcttgttactatgaaagaggagcaaaaaggatacctcatataatcttgggaataaggcccataagtttctacctgacgaccatgaatcgtcggactatgagggggaaagtcgtgttttgtgtatgcgcaaatcaggacggatgtgttttcgcccgaggtagaagcttcttctaagtaaatagaagaattctatctcgggcttttctgttattttcacactatttcgattaattagcaccttcatttaaggaggaatagcatgaacgcaaaagttggcgtcattatgggaagcacttctgattgggatacgatgaagcatgcctgtgacatactagaagaacttcaagtaccatacgagaaaaaagttgtttcggctcatcgaacgccggaattgatgtttgaatatgcagaatcggcaagagaacgtggcttgaacgtcatcattgctggtgctggtggtgctgcacacttaccaggcatggtagcagcgaaaacaacccttccagtcattggtgtccctgttcaatcgcgcacattaaacggtttagattctctcctttcgatcgttcaaatgccaggcggcgtacctgttgcaaccgtggcgattggaaaagcgggagcgaaaaatgctgggttgcttgctgcgcaaatcctaagtacaggtgatgaaacgatcgagaagaagcttagcgaatatcgaattcagatgaaagaaaccgtacttgaaagtagtgacagcttatgagaaaaaccattttaccaggaagtacaattgggattttaggtggcggacagctaggaagaatgatggcgttaaaggcaagagagatgggctatcaaatcgcagttcttgaaccaaaagaaaattcgccttgcggtcaagtttcggaccatgaagtggttagtggctatgatgatttggatggcgcccgtaggctagctgatttaagtgatgtgataacttatgaattcgaaaacattacacacgatacagcaagatggttggaagaaaatgcgtatatgcctcaggggggagaactccttagggtgacgcaagatcgctatgttgagaaaaaagcgattcaagattcgggtctgcgcgtagcaccatttgaaacggtcgattctaatcaagatcttaaggttgcgcttgagaagattggactcccttcagtccttaaaacacgtacgggtggttatgatgggaaaggacagtgggtacttaaaacggaaaaagatgttgaagctctcacttttccgaacgtaccttgtattcttgaaagctgggttccgtttcaaaaagagctttccgtgatcgtgacccgcagtgtaaaaggggaaacgacaactttcccgttaggtgagaacgttcatgtgaacaatattcttcatcaaacgatcgttcctgctcgaatagacgaagcggtcaaaaccaaagcggatgagatcggaaaaaagattgcaaattcacttcaacttgttggaacacttgcagttgagctatttcttaaagataatgagatttatgtgaatgagcttgcaccacgcccgcataattctggtcattatacgatggaggcttgtgagacatcacaatttgagcagcatattcgagcgatatgtggattgccgcttggaaacacagaactgttaaaacctgtggtgatgggaaacttgctcggtcagcatgtgactccactaatgaacagtatttcagagctaggcgacgcaaagctacatttatatgggaaagacgaagcaaagcctaatcggaaaatgggacacattaactttcttgccgcttcaacagaagaagcaataaaacgaatgaactcatggaagttatggcagtaaagacaagagaccaggaggacttacgatgattgaacgttatactcgccctgaaatgggagcgatttggacagaggaaaaccgctacaatgcgtggcttgaagtagaaatcttagcatgtgaagcttgggcagaacttggcattataccgaaagaagatgtccaaaagatccgagaaaacgctggtttcagcgttgatcgcattcatgagattgaagaagaaacacgtcatgatgttgtggcttttacaagagccgtatcagaaacacttggagaagaacggaagtgggtgcactacggtctaacatcaacggatgtcgttgatacagcactttcttatcagttgaatcaagcgaacgaccttttgattaaagacattgagaaattcattgacgttcttaaagcgaaagcacaggaacataagtacacagtcatgatggggagaacgcacggtgtgcatgcagagccaacaacgtttggtcttaaaatggcgctatggtatgaagaaatgaagcgtaaccttgatcgatttaagacagcagcagataacgttcgtttcggtaaactatctggtgcagttggaacgtatgcaaacattgatccatttatcgagcagtatgtttgtgaaaagcttggccttcaagcagcgccgatttcaacacaaacgcttcagcgcgatcgtcatgctcattacatgtcggctctagcgcttgttgcaacatcgattgaaaagtttgctgttgagattcgtggtcttcaaaagagtgaaacgcgtgaagtagaagagtttttcgcgaagggacaaaagggatcttccgctatgccacataagcgtaacccaattggttctgagaacatgactggaatggcacgtgtgattcgtggctatatgacaacagcttacgagaacgttcctctctggcatgagcgtgatatttctcattcttcagcagagcgtgtcattcttccggatgcaacgattgccttaaactatatgcttaatcgttttgcaggaattgtttcgaaactaacggtcttccctgagaacatgaagcgcaatatgacaagaacatacggcttgatttacagtcagcgcgttcttttgtcccttattgataaaggcatggcgcgtgaagcggcgtatgatctcgttcaaccaaaagcaatggatgcttgggaaagaggcattcaatttagagagctagttgaagcggatcctaagattacagatcagctgagtgaagcagaaattgaagattgctttgactacaattaccacctgaagccggtggatatgatttttgaacgtctcggactttaattaagcatcggaggggatcaccatggaaaagcaagcattgttgtacgaaggaaaagcgaagagaatttacgcaacgaatgaagcagaggttgtttgggtcgcatacaaagactcggcaactgcttataacggggagaagaaagcaacgattacaggcaaaggtcgcctgaacaatgaaattacaagcctgctctttgattatttaaaaagtgctggaattgaaagtcattttattgaaaagctttcttctactgaacagcttgttaaacgcgtttcgatcattccactcgaagtggttgttcgaaacatagcagctgggagcttttccaaacgcacgggtgtggaagaagggaagttactaaaacagccgatcgttgaattttattacaagaatgatgaccttggtgatcctcttctcacgcttgatcacgtgttagaacttgaacttgcaacagaagaaaccgttcaagaattaaaagaacgcgcattaaagatcaatacgctattacgtggttactttcttgaacgtgacgtaaagctcgttgattttaaattagagtttggtgtcacaccggaaggcaagatcctgttggctgatgagatttctccggatacttgtcgactatgggacagtaaaacaaacgaaaaattagataaagacgtgtttcgaagagatattggaaatttgacagaagcgtacgaacaaattttaactcgcctggggggctccgaatcatgtacaaagtaaaagtctatgtaacgttaaaagaaagtgttctagatccgcaaggaagtgctgtgaaaaattcattacacagcctttcgtatcatgaagtggaagacgtacggatcgggaaatacatggaactcacagtgaaagatacggagaacctggatcagcgaattaaagagatttgcgagaagcttcttgcgaatacagtaattgaagactacacctatgaaatcgaggagggagtcgcacagtgaaatttgcggtgattgtgttcccgggttctaactgcgatgtggatatgtatcacgccatcaaagatgagcttggagaagaagcggtttatgtccggtacgatgagcaaaatctagcaaactatgatgcgattcttctaccaggcggtttctcttacggagattaccttcgcagtggcgccattgctcgctttgcgccgattatgcctgaggtagtaaaggcagctgaagcagggaaaccgatcctcggtgtttgtaatggattccaaattctcttggaagcaggtctgttaccaggagcgatgaagcgaaataaaaatctgaagtttatgtgtcgtccagttacactacgcgttcaaaacaatgaaacgatgtttacttcagcttatgacaaagaagaagaaatcacgattccaatcgcacacggagaaggaaactactattgcgatgaggcgacacttgcgacactgaagcaggaaaatcgtattgcgtttacttatgcggataatccgaacggctcggttgaagatattgctggaatcgtaaacgaaaagggaaacgtcctcggtatgatgcctcaccctgaacgagcggtagatgagctgttaggaagtgcagatggattaaatctatttaaatcgatattacgcaactggagggaatcccatgtcacgcatgcatgaaccaacacctgagatgattaaagaccagaaactctacagtcagatgggcttaacagatgaagagttcggtatggtggaagagattcttggccgaacaccgaattacacggaaacggggctattttccgttatgtggtcggaacactgtagctacaagaattcaaaaccagtgctgaaaaaattcccgatcacaggtgagcgcgttcttcaaggtcctggtgaaggtgctggaattgttgatatcggtgacgagcaggcagtcgtatttaagattgaaagccataaccatccatctgcaatcgagccttatcaaggtgcggcaactggagttggcggcattatccgtgacgttttctcgatgggagcgcgtcctattgctcttcttaattcacttcgatttggtgaacttagcaatccgaaagtgaagtatctgtttgaagaagttgttgctggtattgcagggtacggaaactgtattggaatcccaacggtaggtggagaagtacagttcgattcttcttacgatggaaatccacttgtgaacgcgatgtgtgtaggcttaatcgatcataaagacattcaaaaaggaattgcatctggagctgggaacacggtgatgtacgttggtgcgagcactggacgtgacggcatccacggcgcaaccttcgcatctgaagaattgacagatgcttctgacgaaaagcgccctgctgttcaagtaggggatccgttcatggaaaagcttctgcttgaagcgtgtcttgagcttgttcattgtgatgcgctagttggcattcaggatatgggggcagcgggtctaacatcttcagcttcagaaatggcgagtaaggcaggaatgggactcgaaatgaatcttgatgaagtgccacagcgcgaaaaaggaatgacgccatatgaaatgatgctgtctgaatcacaggagcgaatgctcgttgtggtgaagaaagggcacgaagctgagatcaaagccattacagatcgctggggtcttttagcgaaagaggttggggttgtaacagaagataagcggttccgacttcttcataaaggggaagttgtggcagacgtcccggttgatgcacttgctgaagaagcgcctgtatatcataagccttctcgtattcccgagtactatattgagaatcaacagcttcataaaccaattcctgaggtggaagatgccaaggaaatgctttatacactactaggtcagccgacgatttcaagcaaggaatgggtttttgatcagtatgactatatggtgcgtacgaatacggttgtagcaccaggatcagatgctgcagttgtccgcgtgcgtggaacgaacaaagggttagcgatgacgacggattgtaattcacgttatttatatctcgatcctgaagtaggtggtcagatcgcggttgcagaagcggcgcgtaatatcgtttgttcaggtggcgagccattagcgattacagattgcttaaactttgggaaccctgaaaaaccagagattttctggcaaattgaaaaagcaacagatggtatgagtgaagcttgtcgtatgttaaatgcacctgttataggtggaaacgtgtcactttataatgaaacgaacggcattgccgtatatccaacaccggtagttggaatggtcggtctcgttcatgatcttagtcatgttacaacgcagcattttaaaaaagaaggaaacttgatttacatgcttggagaaacgggagaagattttggtggtagcgagcttcaaaagtaccttgatggtaagatttcaggtcaagcccctacccttaatcttgaaattgaaaaagaacgccaaaaccaacttctaaccgcaattcaagatggtcttgttgaatcagctcacgatctcgcggaaggcggccttagtgttgcccttgcagaatcgctcattggcacagagcttggagccaacgtaaggattgacggagatatcacgacagacctttttagtgaaacacaatctcgttttcttgtaagcatcaagggggaacatcagcaggcatttgagcaacgaacgggagcaacgctaatcggtgaagtcaccggtactggcgtattaacgattatgcatgaggatgaaacacatatcttcgatgctccagttcaagagcttgaagcagcctggaaaggagccattccatgtttggtgaaatcaaaggcttaaatgaagagtgtggcgtatttggcatctggggtcacccagatgctgcgtcgttaacgtattacggtcttcatagcttacagcatcgtggtcaggaaggtgcgggtattgtcactactgacggtgatcgtctctataaccataaaggacttggacttgtgaatgatgtctttggaccaggtgatcttgagaagcttgaaggaaatggtgcgatcggccatgtgaggtattcaactgctggaggtgggggatatgagaacgttcagcctcttgtattccgctcacaaaatggtggccttgcacttgcgcataatggaaacttagtaaatgccaatgcgcttaagcatcagctcgaaggtcaggggagtatttttcaaacaacgtccgatacagaagtgctggcccatcttattaaacgaagcggctacttaagtcagcgtgaaaaagtaaagaatgccctcacaatggtgaaaggtgcttatgctttcattatgatgacggagaaagagatgatggtcgctcttgatccccacgggttgagaccactctcattaggcattttagaaggagcatatgttgttgcttcggaaacatgcgcctttgatttaattggtgcggagtatattcgtgatgttcagccaggcgagcttttgatcattagcgagaacggtttggaatcagagcgattttcttcttcgatctcacgtgctatttgttcaatggagtacatctacttttctagaccagatagcaatattgaaaatattaacgttcatacagctcgtaaacagcttggcaaacagcttgctaaagaagcgccaattgaagccgatatcgtaacgggtgttccagactcaagtatttcagctgcgattgggtatgcagaagaatcaggtatcccatatgaaatgggcttaataaaaaatcgctatgtgggcagaacgtttatccaaccttctcaggagctacgtgaacgcggtgtgaagatgaagctttcaccagttcgaggagttgttgagggcaagcgtgtcgtgattgttgatgattcaattgtaagagggacaacaagcagacgaatcgttacaatgcttcgtgaagcaggagcgaaagaggttcacgttcgcattagtgcgcctccgattatcagcccatgctattacggaattgatacatcgaactcaggtgaattgattgcggcgaagatgagcgtagcagagatgtgtgaagaaataggtgctgattctctaacctttcttacaacagatggcatgaccactgcgatcggcagagaagagaaagattcatcgtgtggtcagtgtctaggttgttttacaggcaactatccaacggaaatttatcctgataccgttcatccttacgaaaaagtttaaccgaaggaggccattatggcacaagcatacaggcaggcaggcgttaacatagaagcaggttatgaagcggtggatcgcattaagccccacgtcaagaaaacaatgcgcaaaggtgtaatgggcggacttggtggtttcggtggcatgttcgatctgtcagaactagattacgagaagccagttcttgtttcaggaacggacggtgttggaacaaagctcatgcttgcgattcaactcgatcagcatgatacgattggcattgattgcgtggcaatgtgcgtcaatgatgttgtcgcacagggggcagaacctctctattttcttgattatattgcaactggaaagcttgcaccagagcgaatcgaggaaattgtaaagggtgtggcagaaggctgttcacaggcaggctgtgccttaattggtggagaaacagcggaaatgcctgatatgtatcaagaaaacgactatgatcttgctgggtttactgtgggagctgttgaaaagtcgaagctgattacgatagagaatgtgagagaaggaaatgtcctaatcggtcttgcttcaaacggcattcacagcaatggtttttcccttgtacgtaaagtgttgctgaaagatcataagatggatcttgcaacctcatacgaagagcttgattcaacgcttggagagacgttgcttgccccgacgcgtatttatgttaaaccagttttaaatgttcttaaatcacacactgtgaatggaattgcccatataacaggcggtggttttgaagagaatattccacgtatgcttcctgaaggactggcagcccaagttgattatggttcatggccgattccgccaatctttgatttaatcgaaaagaaaggcaatcttgctcgtaaggaaatgtttacaacgtttaatatgggcgtaggtatggtacttgctgtgccggaagatgaggctgttaatgtcattaaagctcttgaacaggatggcgaacgagcttatatgattgggcgcgtagtcaaaggagaaggaattgaatttggaggcggtgacctttcgtgaagaagctagccgtattcgcatctggaagcggctcgaacttcgaagcgatcgccgcagccattgaaaaaggacaattcgaggctgaagttgcccttgttgtatgcgaccgtcctggagcaaaagttgaaaaaagggcagaacgctttggcattcctgtcctttccttttatccaaaatcatatgactcaaaagctgattttgaaaactttattcttcaacaattgaatgatgcaggggttgagtggattgtacttgctggttatatgaggttaataggtccaacgctccttaaaggttttgaaggaagaatcatcaatattcatccctctctccttccgtcttttccaggaaaagacgcgattggccaagcatttgaagctggtgttaaaatcacaggtgttaccgttcacttcgtggacgagggaatggatacagggaaaattattgatcaagacagcgttcgaattgatgagggagatacgaaagaggacctggcaaacaaaattcaggccgttgaacaccttttgtatcccgctgtcattcgttcccttcttcaggaaaaatacaagaggtagtaggaggagttcacatgacgattaaacgcgcactcattagcgtttctgataaaacagatattacagcatttgcaaaagggcttgcggaaaaaggggtagaggtgatctcaacaggtgggacaaagcgtgcccttgaagaagcaggtgttaatgtgattggtatttcagatgtcactggtttccctgaaattcttgatggccgagtaaaaacactccatcctaacgtacatagtggtcttcttgctgtgcgtgataatgaagctcatcaagaacagttgaacgagcttaatattaaaccgattgatcttgtcgttgtgaatttgtatccttttcaggaaacaatcgcaaaaccggacgtgacgtatgaagaagcaattgaaaacattgatattggtggacctacaatgcttcgttccgctgctaaaaaccatcgtgatgttactgtagttgtcgatccttctgactacaaccgagttttacgtcaagttgaagaaaatggagacacaacagaaattcttcgtcgtgaacttgcagcaaaagtattccgtcatacggcttcctacgatgctgtgatctctgaatatttaactgctcaatccggtgaagaagagcctgaatctctaacggtaacctttgagcgcaaacaaacgcttcgctatggtgaaaatccccatcaaaaagctgttttctataaaaaaccattgtacaaaggggcatctcttgcttcagctgagcagttaaatgggaaagagctttcttacaataacattaatgatgcaaatgcagcgctaaatattgtgaaggaatttgatcagccagctgttgtagctgttaaacatatgaacccttgtggcgttggtacgggggaaacgattgtcgaagcttaccagaaagcgtatgaagcggattcaacttctatttttggtggcattgttgcgatcaatcgtgaagtagacgaagcaacggcgcttaagctaaaagaaatattccttgaaattattatggcgccttcgtttacggaagaagcgttagctgttttaacgaagaaaaagaaccttcgtttattgaagcttgatgtcgcggcttcacctgctgtagaacaccagcttacttcagtaaatggcggtcttttactgcaagaacgagatcgttatggatttgacgaagcgaacattaccgtaccaaccgaccgtgaaccgacagaagaagaatgggaagcgctgaaactagcttggaaagttgtgaagcacgtcaagtccaatgcgattgtgttaacgaaaaatgatcaaacaattggaattggtgctggacagatgaaccgtgtcggtgcggcaaatattgcgattgaacaagcaggtgagcaaagtaaaggatcggtgatgggctcagacgctttcttcccgatggatgatactgttgaagcagcaggacgagctggcgtgacagcgatcatccaacctggcggatcgatccgagatgaggattcgattaagaaggcaaatgaatacggcattacaatggtctttactggcattcgtcatttcaaacattaagaggaggtttttcgagtgaaggtattggtaattggccgcggtggccgcgagcacgtgatggcctggaaagcggcagaaagtagccttgtcgatcaagtctatgtcgctccaggtaacgcgggtatgactgacgttagccagcttgtagcaattgatgagagtgatcatgaggggctagttgccttcgcaaaaaagaaaaacattgatttaacatttgttggtcctgaacaacctcttcttgatggaattgtgaatcgttttgaagaggctggccttcgcgtctttggtccaaagcaagaagcagctttaattgaaggaagtaaaacattcgctaaagaactaatggttgccaacagtattcctaccgcattttctaagtcttttactgactatgcggaagcgaaagcctatgttgagaaagtcggcgctccgatcgtcttaaaagcagatgggcttgctgcgggtaaaggtgtggtagtggcaatgtcactgaaggaagcgctggaaagtcttcatgatatgatggagaacaatcagtttggtgccgccagtgaacgtgttgtagtggaggaatttcttgaaggagaggaattctctttaatggctctcgtcgaaggagaacgggtatacccactcgtcatttcacaagatcataagcgagcttttaatggtgatcagggaccgaatactggtggaatgggagcttattctcctgtgccgcagatctctcaagatatcgttgatcatgcggtagagaccattttaaaacccgctgcaaaaggaatgaaggcagatggtcgctctttcacaggtattctttatgcggggcttatgttaacaacggacggtccaaaagtcattgaattcaatgcacgttttggtgatccggaaacgcaagtcgttttaccaagaatgacgtcagatttcgttcaagcgattcttgatcttcttgatggagaagaacctaaacttgaatggagtaaacaagccgttatcggtgtcgttgttgcttcaggtggctatccaggtagttatgaaaaaggtaaggtcattacagggctagatcatgttggttctgatgcacttgttttccacgctggaacgaaacaaagtggagagcaccttctaacagacggtggtcgcgtacttcttgtcgcttcatcaggtgctgatttgaaagcggctagtgaatctgtttacaatgaacttgaacatgttcatgttacggatggtttttatcgaacggacattggacatcgtgctatttcacgcgtttcttcctaatgtaggcaaacgcaactgctacaatacttccaatgatcatcgtgtaaattaaccaggtatctgttatatactcgagcataactaaacctccttttgataaggtagagaaaacttccctatatagggaagtttttttgtgaaaatttaagaagggttgatcactctttcaagtgctgtttcatccgggtcgcgtgtttcatcatgcgtcataagatcaacgacagggcaataccgcgtatgaccttctgctaccttcatggcaccgacagcagcgagaagccaggctgagtttgactcctctttagaaagcttggcggttgaataggcaagcagagtgaaaccggctgttaggcgaataaaggcattcaacatactaatatttggcttcatttgaaaatctcctttcttcattcacaaatctaaagtagcaacgtgtcaaaattatgttaaaataaagaaaacttcttaaagcgggtgatggttatggcgaaaagaaaaaatttatggacgaagcagcaattacgacaacacgtccaagttgtgtctggagaactgcctccatcgatcgttttctatcatgcaacgtatttgaatcacggattaaaaaaatgggttacatccaatatatgggtatatgaagatcggattgtgtacgtaggcgataatctacctgaaaagcatccatcgactgaatggattgattgcgaaggacgatgccttgtgccaggttacattgaaccacatgcacacccatttcaactatataatccccttactcttgcgcgatatgcatctcagcggggaacgacgacaatgatgaatgataaccttcttttacttctaggtttgccaaaagagaaagcgcttacattaattgaagagcttgatcagtttcctgtttccatgtattggtgggcacgatatgattcgcaaacaaagctgttagatgaagatatgattacaaataaactgatgaaggaatggcttgcgcacccattagtcattcagggtggggaactgaccgcatggcctgatgtacttagtggagatgatgaaattctagaatggatgcaagagacgcgaagacttggtaagcctgttgaaggtcatttgcccggtgcatctcttgccacattaacgaagatgggactgctgggtgtttcctgtgaccatgaagcgatgacgggtgaagaggccctgcgccgcttagagatgggcatgatgacatcacttcgttattcttcgataaggccagaccttcctgtcatacttgaatctttacttaaaaaaggggtcacttcctttgatcgagtgatgatgaatacagatggctcaacgccttccttcttagaaaatggcacaacagacaagttaattgaaattgcgcttgagaaaggagtatgcgcagaagatgcgtattcaatggtgtcatataatgtggcaaatcactacggaataagcgatacgcatggtatgatagcaccgggtagagtcgctcatattaatatccttgaatcaaaagataagcccctccctgttgccgtacttgcgcgtggaaaatggttaaagcgtgatggagaagaaatggaccaggactggtcttttgagtgggaaaagcatggacttacgccacttaacaacacctggaaaatacagcctaacgatttaacgttttcaggtccagcaggaatggaaatgattaatgcggtgattacaaagccgtataacttatctgttgaaacgtccgtagacgagcttccagcaggatcagatgaaagctttattatgctccttagtcgcgaagggaaatggcgggtaaatacgattattaaaggcttcgcgaatcgtgtgaaaggttttgccagtagtttttcgaacacgggtgattttattcttattggtaaaaataaagcagatatgatgacggcttttaatcgaataaatgaaattggtggaggaatctcacttgtagaaaacggagaagttatttccgaaatccaattacctctgatgggaaaaatgtccgatcttccgcttgaagacctgatcaaagaagaaaaaagaatgattcaagaactagaggataggggctacacatacaaagatcctgtttatagcctgctgttcttctcttcaacgcatttaccttttattcgattgacacagcaaggaatttatgatgtaaagaggaaaatggtactttttccttcgataatgcgttaaactataacaaagtaaacccttaacgaagtaaagtacatgaatttctcaagttcaattgttaaaatgaacgcaaagtggaataatagcgcatcatgatgagtgaagcatagaaaacatagaccgatacagaatgaagtaaggagagtggatgtataatgcaaattgataaacttcgaggtaaaacactagaccaattgtttgaagcgattctttcattaaaagatttagaagagtgttatttattctttgacgatttagcgacagtgaacgaaatacaatctctagctcagcgattggaagtagcaagaatgcttcgtgaagggtttacgtatcataaaattgaaacggaaacaggcgcaagcacagcgacgatttccagagtgaagcgcagtttaaattatgggaacgacggctatcaaatgacgcttgatcgcgtccataataacgagtagaaaaatgagccggtttccggctcatttttgttttgggtcgagggttgctgtaatgaagttgatttcgcggaattattaaaggaatcgcggaaaaaaggtttgatttcgcgtaaaaaatcagattatcgcggaattattaagaaattcgcgggaatatggcgcgggtctatttcacgcgttcaaatgaaatgcctccagcgcttgtcgacctaaacgcccacttccgcttttcatgatccagctggagcctccagaccctcggtcacttcaccctccaactcgaacacaaagaccgtgttcaatttggagggctccagtgcctgccggatctaaacggaggcttccgcttttagttgatccagctgcagtgggccaaatcttccggctgtttcgcccaatcgaatgagacaaaaagcgtctcagtctcatgggctccaacatcctgcagatttaaacgggcccacttccgcttttcattgatccagctgcagtgggcagactctaggtcacttcacctttcaactcgaacacaaagaccgtgttcaatttgaaaggttccagtgcctttcgagtctaaacgcccacttccgcttttcattgatccagctgcagtgggcagactctaggtcacttcacctttcaactcgaacacaaagaccgtgttcaatttgaaaggttccagtgcctttcgagtctaaacgcccacttccgcttttcatgtatccagctacagcgtccagcctctcgatcgcttcaccccatcaaatgaacacaaagaccgtgttcttttgatggggctccagcgcttgtcgaggctaaacggacgcttccgcttttagggtattctttgatataatccaatttatgaggaaaagtgggaggaagggttaggatgtttgattttctagagtggaagcatgtgtttaagctggatccgaataaggagattgaagattatgatcttgaggcgatttgtgagtctgggacggatgcggtgattgttggtggtagtgatggtgtgacgcttgatcggacgttagatttacttgctagaattcgccgttacgcggtaccatgtgctcttgaggtatcgactgtggaagcagtgaccccaggatttgatttttattttattccaactgtgttaaatacggaagacagccgctgggtaactggtttgcatcatgaagctgtaaaagagtttggtgagattatgaattgggatgaaattattatggaagggtattgtattctgaatcaggattctaaggttgctcagttaacttctgctcatactaatcttgatgaagaagatgtactcgcttatgcgcgaatggcagaaaagatgttcaaactgccaattttttatgtggaatacagtggaacctatggagacaaagaacttgttcagaaggtaagccaggttcttgatgagacgaaacttttctatggtggaggaattgattcccctgagaaagcaaaagaaatggctgcttctgcagatactgttattgttgggaatattatttacgataatatcaaacaagcgattaaaacagttgctgctgtgaaaggaaattgattctctcctatcgatcaggtaaaataagatataagaacacacgtttgcgaggagtgcgaaaacatgcaacgaatagttgataagttattaaacggattaaaccccgaacaacaggaagcggtcaagcacacggatggaccgcttttaattatggctggagcaggcagtggaaaaacgagagtgctcacgcatcgaatcgcgtaccttcttgttgagaaacaggtctctccatggaacatccttgcgattacctttacaaataaagcggcgcgagaaatgagagaacgagtgaattccattacaggcccggttgccgaagacatttggatttcaacgttccactcgatgtgtgtccgtattttaagaagagacggggatcgcattggcattaatcggaactttacgattctcgattctggtgaccagctgacggtgattaagaaaattttgaaggaacaaaacgtcgatcctaagaaatttgagccgcgagggattttagggagtattagctctgctaagaatgaacttgaaacgccagaagactataaagcaaacgccaaaggaccgtatgaaagtgttgttgcggatgcatatgaacaatatcaaaagcagcttcgtaaaaaccaggcgctcgactttgacgacttgattatgagaactattacgctctttaaaaaggtgccagaagtgttggaattctatcagcgtaagtttcagtacattcatgtggacgagtatcaagatacgaacaaagcacaatatgtccttgtcaaattaatggctgagaaatatcaaaacctttgcgtagtaggtgattccgatcagtcgatctatcgctggcgcggggctgatattcaaaatatcctttcgtttgaaaaagactatccaagtgcacgtgcgatcttccttgagcaaaactatcgttcaacaaagaaaattctccaagcggcgaatgttgtgattgaaaacaacatgaatcgaaaacctaaaaaattatggaccgataatgatgatggcccgcacattacgtattatcaagccaatgatgaacatgatgagagtcgctttgtaacagggaaaatccttgatatggtgaatagcggcaagcgaacgaatgcacaaattgccattctctatcggacgaatgcacagtctcgagtgattgaggaaattttaaataagtcgaacattcattacaacattgtcggcggtacaaagttctacgatcgtaaagaaattaaagatgttcttgcctatcttcgtcttattgcaaacccggatgacgacattagcttacttagaatcgtcaatgttccaaagcgcggtgttggtgcatcgactatggacaaggtagcacaatatgcagcaaatcaagatatttctatctttacagctctacaagaagtggaacagattggtttaagtgcccgttttacgaagtctctaaaaacatttggtaatcaaatggctaactggtcgcaaatgcaggaatatctagcggtttctgaacttgttgaagaagtgattgataaatcgggctatcgggatgcactacgaaacgagaacacgattgaatcacaaacccgacttgaaaatattgatgaatttctctctgtaacgcaggagtttgagaaagcaagtgaagacaagagcttgatcgcttttctaacggacctcgccctggttgcagatattgataagttggatgaggatgaaaacgagcaaaaggaagctgttacgctcatgactcttcactcagcgaaaggcttggagttcccagtcgttttccttatcgggatggaagaaggcgtatttccgcatagtcgctcattatttgaggaagaagaaatggaggaggaacgccgacttgcttacgtaggtattacgagggcagaagaagaattatttttaacaaattctcgtcttcgaacgctatacgggaaaacgaatgccaatcctgtgtctcgcttcattggtgaaattccagaagaattacttgaaaagcaaggacaggaaaaacctgcaacaccgtttggagggacaagttctcgaccttcttcaagacctgctactcctaaaactccgagacgccctcagttgacttcaacaggtggagattcactggactggaaggtaggagacaaagcgagccatcgcaagtggggagttggaacggttgttagcgtgaaaggtgatggcgattcgactgagcttgatattgcattcccaaatccagttggaatcaagcgcttgttagcaaaatttgcgccaattgaaaagcaatagtcattttagaaggtgaggtttgacgatggaagaaaagcataagcgcatcgaagagcttcgtcagctcttaaatcaatacaactacgagtaccatgttcttgatcagccgagcgttccggatgccgaatatgatcggatgatgaacgaactattgaatttagaagaagagaacccagagcttaaaacagatgattcgccaacacaacgggtcggaggtcctccgctagaaggcttccaaaaagtcgaacacagagtgccgatgctaagccttgggaatgcttttggagaagatgacctgaaggatttcgaccgacgtgtacgcgatcgaattggcgaaaacttttcatatgtatgtgaattaaaaatagacggtctcgcggtctcgcttatctacgaagatggcgttctggttcggggagcaacgcgaggagatggtactgtaggcgaagacattactcataacctgaaaaccattcctgcgatccctttacgtttacgagagaatgtgagcatggaggttcgtggcgaagcttatatgccaaagccatccttcatgaaattaaatgaagtacgcgagaagaacgagcaggatctttttgctaaccctcgaaatgcagcagctggttctttacgtcaacttgatcctaaaattgccgctagccgtaacctttctatttttgtctatggtgttggtacggttgaggggagagaaattagctctcattccaatggccttgattttctcaaggagcttggttttaaaaccaatccagaatggaagcgatgtaacacgattgatgatgtgattgattttataggtggatggtcagagaaacgtcctgacctttcctatgaaattgatgggatcgttgtaaaagtagatgcgcttaatcagcaggaagaactcggatttacggcgaagagtccccgttgggctattgcctataagtttcctgctgaagaggtcgtcacaaagcttcaagatattgaactgaatgtgggaagaacgggcgttgtgacaccaacagccgtattagaacccgttcttgtagctggaacaaccgtacagcgagcttctcttcataacgaggaccttattcgtgagaaggatataaaaattggtgactatgtggttgttaaaaaagcaggcgacattattcctgaagtcgtttctgttctagaagagcgtcgaacaggggatgagaaggccttttctatgcctgagcaatgcccagagtgtgaaagtgatcttgttcgactggaagaagaggttgcgcttcgatgtattaatcctaaatgtccagcgcagctccgtgaaggattaattcattttgtttcacgtaatgcgatgaatattgatggcttaggcgagcgggtcattacgcagctctttcgtgaagaattaattcacgatgtagctgatatttatcagctaacgcatggtcagcttatcgaacttgatcgaatgggagaaaaatcagtttccaatctacttgaagcaattcgagtgtcaaaagataattcattagagaaactgttgtttggtcttggaatccgtcatgtaggggctaaagcggcaagaacacttgcgcaacaatttggctcaatggatagtcttgtccaagcaagtatagaagatcttgaagcaattaatgaagtcggacaaaaaatggctgattctgttgtacgatacttccaaaatgaagaagttcatgagcttattgatgagttaaaagatgctggtgttaacatgatttataaaggtcctaagccagtttcaattgaagaaattgactctgtttttgcagggaaaactgttgttttaactggtaaacttgaacagttaagtcgtggggaagcgaaaaagaagttggaagaacaaggtgcaaaggtaacaggaagtgtcagtaaaagcacagaccttgtgattgctggggaagatgctggatcgaagctcgagaaggcagagtcacttggtattgatgtatggagtgagaacaggttccttgaagagttaaacgaatgaggagaggaaattaatgccaaagaagcaaacgttcatcgttagtatcatggctctttcgctcgtattatccggttgtgttccgagttttatgaagggcgagcaggacgatacagtaaaggtgaatgattcagaaggcgaagaaagtgaagaaatgattgtaagtgaagatataaaaacttcagagacgtattatcgttcggtgttagagaaagatggggaaaaaaattctcttgatacttcacaagttagaggattaattacggctggtgttgataaccgtcttgatgtagatgcacttgaaatgggattgattcgactttctcaagaacaatttgatcctgaaaagtatttctttaaagaaggacagctttttgatacagagcaaatccacggctggctgtatcgtgataacggtgtaacaaaggaagaagctgagaaagataaagagaaagaagtaaatgtagggctgaatccacagctcggtgtagaagaaaatcctgcacaatacgagcaagtaattgaagcagagaagaaaaaccctaaattcctgtcttatattcatgaacaggattattatgttcagaacaaagatgaagaattgcagctaggcggagtttcgattgccttatcgctttattctgaatatccctactcggttcttgatgaaaatggtttgaagtataccgggtcggtaaagttagataaagatgaagtggttgcgaaggcaaaagaatcgattaaaccaatcgttgagaaaattcgagccgagcatgacgtgccaatcatgtttacgctcttcttagagcagccacgccaatcggttgtcccaggtaacttcgtggcaagcacgattgtagagaaaggtaaatctagccctgagtcatggaaagatttaaatgaaaagtacattgcatttccttcatccgccgctgatgaagaatatccagcggaagctgagaagtttgatgacttcacacgtgaaatacaagatttctttccgaacttcgtaggagtcattggaaccggcttctataaacaagacgaactttctcaattaaaggttgagattccaattcagttctatagcaaatcggaagtcatttcgttcacacagtttgtaaatggactcgttaagaagcgaaacgatacattccctcaggatttacctgtctcgatatatatcacaagcaacggagaaacagaaagtttgattgtgaaggatcctaacggagaagaaccgtttgttcacatttatcaataaaaataaagccctcccgagacgacaacgggagggcttttgcttttgctattctgatagagctttttctagtgtttgaatgttttgttccattaaagtgaaatacgtttcatcattttcgatatcttcttctgttaagacagagaggttatgaatgcgaagcgtctcaaggccgagctctcgttgaactgcttttgctggctttggcgtagcattttgttcaaaaagcatatacttcaaattgtaacttttagctgtttcaatgatatcttctaattgtttttgtgtaggttcttgagatggtgaaaggccagacacacttaattgttcaagtccataacggctttcccagtagctataggcatcgtgcgaaataaggaactctttttttggtgcactgtcagccatttcacggaattctttatctagagctaagagctcttcctctaatgatgcaaaattagactcaaatattttcttattatcaggatcaatttctataagtgcatgtttaatattttcggcctgctggatagctaggtttggatcaatccaaatgtgtggatttacattgccgtgatcatgaccctcgtgcccttcttcatcagcatgctctccttcttcatcagcatgttcttcatgttcttcttttgtttcatcaaagtgaattccttcagcggcttcaagcgtcatgacgtcttcattttttaatgtatctttagcagcatcagcaaatccttccatgcctgctccattgtaaataaacaaatcggattcagctaactctgtcattgttttcgtcgttggctcgaaactatgtgcgtcactgccaggaggaatgatggattcagcggttacgtgttctccgccaattcgttcagcaaaatattcaagaggataaagtgttgtataaatggttagctttccatccgcatttgagtctgaatcttcttgaccacaaccgactaggataagcgtagatatagatagtaagaatgccactgttaaaaagcgatttttcataagccattttcccttccctaagtttctctgccactcattatatcgtaatcattacgttttgcaaacagtaacctttccgatttattgcattcatgatgaagaactcaatgtaggacgaaaaataagtttggaattgaacatttaatacggtatgaaaataagagaaacgcggcaatctataaaaaatatttcaattcgaaggttaacattacaaaatgatgggtaaatgttactaaagtatgtcgaagcttcacataatcagcaacttatttaaataaattttcttgaatacttatgacataaaagttgctaaaagaaggaaataaactccttcagtgaatttttattcattaaaaagtttatcttataatattttcattgttctgaaaaatattttgtgatatagtaatcattggtttgcaaaggactaatggtctacatcaataatttgaattcacaggaaaaatgcatagctgtgaatattgactttggagggggtgaaagtgtggaatacaccttaactactgcaacatggttctggttacttataccaatgcctttattagtcgtattatcaataataactttttttaccgaaaggagagaatagtactcgatgggtattgaaacgccaacgttagttacgtttattgtttatcttgtgggtatgctcgcaatcggattaattgcataccgaatgacaagtaatttgtcggattatgtacttggaggaagaagattaggtggatctgttgccgcattaagtgcaggcgcatcagatatgagtagctggctcttactaggactacctggtgcaatgtacgcaggtggtatgagtcaaatttggattgggattgggctcgcaatcggagcttacctgaactggcaatttgttgcatcacgtcttcgtcgctatactgaagtggcgaatgattcaataacggttccagattaccttgagaatcgtttccgtgatgggtcgaaagcacttcgcgtgatctcagcaattgtcattcttgtattctttacgttctatacgtcttcaggtcttgttgggggcgcaatcctgtttgaaagctcgttcggaatgagctatgaaagcgcattgtggatcggtgcaattgttattatttcttatacgttcctcggtggtttcctagctgtaagctggacagatttcttccagggaatacttatgttccttgcactagttatcgttccaattgttgccctaaatgaaatgggtggctggaatgaaacagttaatcaagttggtgcaacggatacaacttatctagatatctttactggtatgagtttcatgggaattatttctctacttggttggggacttggttactttggacaacctcacattattactcgttttatggcagttaaatcttcgaaagaaattcctaaagcacgccttgttggtatgtcatggatggttctttctctgtttggtgcaatctttactggtttcatcggtattgcgtattttgatgcgggacttccgaactctgaaaccgtctttatcgaatttactcaagtactctttaatccatgggtatccggcttcttactagctgccatactatctgcgattatgagtacaattgattctcagctacttgtatcttcaagtgctgttgcggaggacttttataaagcgattcttcgtaaaaatgcaagccaaactgagcttgtatgggtaggtcgtattgctgtactaggtattgcattacttgccatcctacttgcttataaccctgatagcagtgttcttgaccttgtaagttatgcgtgggccggttttggtgctgcatttggacctgttattatcttaagtctattctggaaacgcatgacccgtaatggtgcacttgctggtatcatcactggtgccgtagttgttatcttatgggctcaattatcaggtggactattcgatctttatgaattgattccaggctttatccttgcatggattgctgtaatggcgttcagctttgttggtaaagggccaggtaaagaaattgaagctgaattcgaagcagcaaaaacatctaaattctaatcagctttactcagagactcatcccatttggggatgagtcttttttatagaaataagaatggggatgacgattgaggctaatctccaaacagtagttaaacaaacgtttgattaatccgacttaatcaaacgtttgtttaaaattggaacagacggcgttctgttgcttaatgaagcttatttttggtatcatctatatattgcaggttgttcgaaatttgtggaggtgaaagtgatgtccagaattaccaaagaagaggttaagcatgtagccaatctcgctagattagaaatggatgaggcagaggtcgaaaaatttacaactcagcttgatgacattatctcaatggcggagcagctgaatgaattagatacagagaacgttgagcctacaacacacgttcttgatttgaaaaacgtactgcgtgaagacaaagtacagccgtggctaacgcgtgaggaagcattgaagaatgcaccggatcaagcgaacggtcaagtaaaagttccatcaatatttgagtaagggaggcaacgtccttgtttgataaaagcataagtgagcttcacagcttgcttcataagaaagagttatccgtcagtgaacttgttcaaacttcgtttgatcgcattcaaacggtcgacgaaaaggtaaaagcgttcatgacgttaaatgaagaaggtgccatgcaagcggcaaaagctcttgatgaaaagcttggtaccgaagaggcaagaggacttctctttggtctccctgtcggtgtgaaagataacatcgttacgaaaggactacgcacaacagcgtcaagtcagcttctaagtaactttgaaccattacataatgcaacggtggttgaacgcttaaatgcagcggaaacgattactgtcggcaaattgaatatggacgagttcgcgatgggttcttcgaatgagaactctggttatttcggcacgcgtaacccttggaatacagattatgtcccgggtggatcaagcggtggctcagctgcctctgttgcggctggagaggtattcttctctcttggttctgatacaggtggttcgatccgtcaaccagctgccttttgtggtgtcgttggactaaaaccaacgtacggactagtttctcgttttggactaattgcttttgcatcatcacttgatcaaattggaccaattacgaacacagtagaagataatgcttatcttcttcaatcgattgccggtcatgacaagatggattcaacatcagcgaacgttgacgttccagattatctttcaagtctaacaggtgatgtgaaaggtcttcgtattgctgtaccgaaagagtaccttgctgaaggtgtagatgaagatgtgaagaacagcgtccttcagtcacttaaaaagcttgaagaacttggcgcaacgtgggaagaagtatcgcttccgcactcaaaatatgcagtagcaacttactatcttctttcttcatcagaagcatcagcaaacctggctcgttttgacggcgtacgctatggcgttcgtgctgaagcagagaacctgattgatctatataagaaaacaagaagcgaaggctttggtgacgaagtgaagcgacgcatcatgcttggtacgtttgcccttagctctggttattacgatgcttattacaagaaagcacaaaaagttcgtacgctgatcaagaacgactttgaaaaagtgttcgaagactatgatgtgattatcgggcctacaacgccaactccagcctttaaagtaggcgagaagattgataacccgctaacaatgtatgcgaatgatattctcacaatcccggttaaccttgcaggcgttcctgcgatttccgtaccatgtggtttatcaaatggcctacctgttggacttcaaataatcggaaagcactttgatgagaagaccgtttatcgcgttgctcatgcgtatgagcaagcaacggatcatcataaggctaaaccagagctgtaaggggtgacgactgaaaatgaattttgaaactattattggtctggaagttcactcagaactgaagacaaacacaaagattttctgtaattgttcaacgaatttcggtgcgccgcctaacacgaacgtttgcccgatctgtctcggccatcctggtgttcttccagtaatgaacgaacaggccgttgattttgcaatgcgtgcggcaatggcattgaactgtgaaatcgctgaagatacgaagtttgaccgtaaaaactatttctatccagataacccgaaagcctatcagatctctcaatatgataagccaatcggtgaaaatggatggattgatattgaagtaaacggcaaaacaaagcgcattgggattacacgtcttcaccttgaggaagatgcaggtaagctcacgcacgttgatggcgagaatcactctcttgtcgacttcaaccgtcagggtacgcctcttgttgagatcgtatctgagccggatatccgtacaccagaagaagcgtatgcgtaccttgagaagcttaaagcgattcttcaatatacggaagtgtctgactgtaaaatggaagaaggatctcttcgctgtgatgcgaacctttctcttcgtccgtatggtcaagaagaatttggtacgaaaacagagcttaagaacttgaactcatttgctaacgtacaaaaaggtcttcaatatgaagaagtacgtcaggagaaagaacttcttgcaggaaacgtgatcggtcaggaaacgcgtcgttacgacgaagctggcaagaaaacgatcttaatgcgtgtgaaagaaggatctgacgactaccgctacttcccagaaccggaccttgttcgtcttgcgatcaatcaagaatggatgaaccgcgttcgtgcggacattcctgagcttccagacgctcgtcgtgagcgctatgtgaaggaatatgaccttcctgagtacgatgcgatggtgcttactcaatccaagaaaatgtccgatttctttgaagtggccattggccagggtgctgatccaaaacagacttcaaactggttaatgggtgaagtatcggcttacttgaatgcgaactataaagaaattgacgaagttgctcttactccagaaggattagggaaactgatttctctgattgaaaagggaacaatttcttcgaagattgcgaagaaagtcttcaaagaccttattgaaaaaggcggcgatcctgaacagatcgttaaagacaaaggccttgtacagatttctgatgaaggcgagcttcgttctatcgtttcaggtattcttgatgagaacgaacaatccatcgaagactacaaaaacgggaaagaccgtgctatcggcttccttgttggtcaagtgatgaaagcaaccaaaggaaaagcaaaccctccaatggttaacaagcttattgtagaagaaatggataaacgctaaatgacgaaaccctcccaatgtggagggtttttttatgtctaaagaggagtttgagtatgttaaccttattcacttattttcggctttgcttttttttagggaaaagcctataatcagaacagaaggttaagcggaagaaaacggtcacgagattgtgggcgttttttgtttgcgactatcatataaataagtaacgaggacatttaaaatgccgcgtgctttgatacgcttaaagattgaacaaatataaacattctgcatgaagaattaagatagagaagataggatgatgaaggatgaaacgtgcgagactaatctataatccaacgtccggaagagaacaagtgaagaggtcactaccatatatcctcgaacgccttgaaaaaaatgggtacgagacgtctgcccatgcaaccacttgtgaaggcgatgcgacggaagcagcgcgcattgccgtcgagcgacgctttgatcttgtcattgcggcaggtggagatgggacgatctatgaagtgatcaatggtattgccgagcagccatatcggccgaagatggggattattccagttggtacaaccaatgactttgcacgagcgattggcgttccgcgcacagttgaaggtgcgatggacgttctgtgtaatggtcttgaaatgccaattgatatcggtcgagtgaacgagcattatttcatcaatatcgcaggtggcggacgcctgacagaattaacgtatgaagtgcctagtaagcttaaaacaatgcttggccagctagcttactatatgaaaggcattgagatgcttccatcgattcgtcctgcaagaaccaggattgaatacgacggtaagctttttgaaggtgaaattatgcttttccttgtttcaaactcaaactccatcggcggatttgagaagctagctccacatgcatcgttgaatgatggcctgttcgatttaatgattttaaagaagacaaacatcgcagaattcattcgcatcgcaagcaatgcacttcgcggtgatcatattaatgatccaaatgtggtgtataagaaagctagtcacattaaagtagaatcagttgataaaatgcagctgaacctggacggcgagtacggtggcccgcttccagccgagtttacgaacttataccgacatattacaatgatcgtgccgaaagaaacgagcgaaaaacatacaaatgaagaagaagccgcgcacaagcgcgccatttcaggtgagtagaaatgaaggagagaagtcagagacgatgagctctggctttttctgttgttttcgagggttagggggatggaagtaggttttaaatttgggtttggccaatataattcgattttggccaataaaccatgaaatagagctcgcctcacatgcaatgcaaaaagcaccgcgcagttacatttcgcgattcattcacactgtggtacaatttttgtacatgaaatcgaacggaaaaggacggaaacctaatgagtaatcaagaagtacctgtaaaaaagaatgacgttgtcgaagtagaattcagagacctttcccatgacggggcaggcgtcgcgaaaatagatggatacacgcttttcgtcccgtatggcattccaggagaaaccgcgaacgtaaaagtgatcaagacgaagaaaggctacggcttcggaaagattctcgatgtgaaagttgagagcgaagaccgcaatacaccgccatgcccgatcttctatcagtgcggcggctgccaaacacagcacatcacgtacgatagccagctaagattcaagcacaagcaagttcaagacgtgatggagcgcatcgcaaagatcgatgtacccgtttaccctgttcttggcatggaagatccatggcgctaccgcaacaaagcgcaggttcctgtaggagaacagaatggcaaaatcgtcgcaggcttctatcagcagcgcagtcaccagattatcgacatggaccagtgcctgattcaagagcaggaaaacgatgaagttttacgcgttgtaaaagaaattgctgagaagtacggcatccgtgcatacgacgagcgctcacatcgcggaacgctcagacatgttgttgcaaaatatgggaagcaaacggacgacatcatggtcgtcattgttacgaaaaacaaagacttatcaaatcgcaagaacatcatcaaagacatcacagagcaacttccgaaagtgaaatcaatcgttcagaatgtgaatccaaagcgcacaaacgtgatcttcggtgacgaaacccgcgtcctatggggatcaccatacatttacgatacgatcggtgatattaaattcgcgatctcagcacgctccttctatcaggtaaatcctgatcaaacgaaggtgctttacgatcaggcgcttgaatacgctggacttactgggaacgaaacggtcatcgatgcttattgtggcatcggcacgatttctctgttccttgcgcaaaaagcgaagcaggtatacggcgttgaaattgtaccggaagcgattgaagatgcgaagcgtaatgctgagctaaacggcattacaaacgcagagtttgccgttggagaagcagagaccgtcatcccagcctggaaagagcagggcatcaagcctgacgtgattgtcgttgacccaccacgtaaaggctgtgacgaggcgctgcttcaaacgattattgatatgaaacctgagaaagttgtttatgtatcatgtaatccggcaacgctagcacgggatttacgcatcctagaagatggtggatttgaaacgaaggaagttcagccggttgatatgttcccgcatacgacgcacgttgagtgcgtagccgtactagaactataataaactatttaaaatcccaccttaactctaaagttaaggtgggattttaaatagttgcaataaggtgtttggtttataggaggattagtctctataatagttatgcctgttgaaattgtattttgcaaaatcgaatagagtgcaattaaattgaacggaatatagcggtatgatatggtttaggcgtgaagcattatcgtattctagaaggagtgaggtttacttgactattacgtttacggacgctgcaattgaacatttaaatacagaggatcacgtagcttttcagcttaatcctagtttaggtggatgtagtattggtgcggattggatcacatttaaagctttgtcttccaaagaagcacagacaggcgagaagttggtagagacaaattataagcctgtggttttaggaattaagcacgaatcctttttcaaagaagatatgattattgactactctagtaaaagaaatgcatatatgttaaaaagcaaaagtgaaattctcagttctcatttgtcattagaaaaataatttaaatttatgtgtgaaaacctaaggaaatgaaagaatcatgttcgtaaaaaaagcaccatctcaaacgctgagaagcgtaggagatggtgcttttatgttctattaagcgttagacgccatcttatccttactcgttttcagatcaaaacgatcagcattcataatcttcacccatgccgacacaaagtcgcgcacaaatttctctttattgtcctcttgtgcatatacttctgcataagcacgaaggatggagtttgaaccgaagacgagatcaacgcgtgaagcggtgcgtacgagttcgcctgttctgcggtcgcgtccttcgtattcattgaagtcagttggcttccattcaatgcccatgtcgagtaggttcacgaagaaatcgttcgttagtgtaccaacgcgttcagtgaacacgccatgctttgtacccttgtggtttgtcccgagtacgcgcataccgccaatgagcacagtcatttcaggagcagtaagaccaagaagctgcgatttgtcgactagtagttcttctggacttaacgtgtattccttcttctgatagttacggaatccgtcagccattggctctaatacgtcaaagctttcaacatctgtttgttcttgcgttgcatctccgcgtcctggtgcaaatggaacagtaatctcaacaccagcatcttttgccgctttttctacagctgcactaccaccaaggacgatcaagtcagctaagctcacttttttctcaagtttgctttggattttctcatatacggatagtacttttgataattgttctggttcatttacatcccagttcttttgtggttctaagcgaatacgcgcgccatttgcaccaccgcgataatcagagccacggtacgtacttgcagaagcccaagctgttgtcacaagctcgctgacgcttaatcctgagtccaggattttagctttcaggttttcaacttcagcagcagtcagttcataatccacattcgggattggatcttgccagatcaaatcttcctgtggtacttcagggccaaggtatctttctttcggtcccatgtcacggtgaagtaacttgaaccatgctcgcgcaaatgtatcagcgaaatattcaatatcctcgtggaaacgacgtgaaatcttttcataaatttcatcttcacgaagcgccatatctgctgttgtcatcatagtattcactttgattgaaggatcttcagcatctggtgcaaggtgctctggtttaggattcactggcttccattggtgggcacctgcaggactcttcgttagttcccactcatagccgaatagtaagtcatagtatccgttatcccattttgttggattagcggtccatgcaccgtcaacaccacttgtaattgtgtcacggcctttaccacttccgtaagagttcttccaaccgagtccctgttcttcaatatcagcggcttccggtgatgctccaacgttagcttcagcgtctcctgctccgtgtcctttaccaaacgtatgaccaccagcaatcaaggcaactgtttcttcatcattcattcccatacgagcaaaagtttcacgaatgtcgcgtgcacttcctagtggatctggttcgccatttggtccttcaggattgacataaataagccccatttgaacggcagctagcggactttcaagctcacggtctcctgagtaacggttgtcaccgagccactctttctcggtaccccaataaatatcttcttctggatgccaaacgtcttcgcgtcctccggcaaaaccaaatgtgttcaagcccattgattcaagcgcaacgttacccgtgatgacgagtaggtcagcccaagaaatcttatttccgtacttttgcttaattggccaaaggagacggcgtgctttatcaaggctcgcgttatctggccagctgttcagtggtgcaaaacgctgtgatccagtagcgccaccgccacgtccgtcaccagtacgatatgtaccggctgcgtgccatgacatacggatgaagagagggccgtaatggccataatcagctggccaccagtcctggctgtcggtcattaagtcacgaagatcctgcttcagtgcgtaatagtccagctttttgaattcttcggcataatcaaagtcttctcccatcggattgcttttacgatcatgctgttgaagaaggtgcaaattaagctgatttggccaccagtctttattcgttgtccctacttttgttgttgtaattgcgctatcttccttagtttggccgtgagatacagggcacttcccagcttgactgttgtgcatttcgttattatccatatttaaatctcctttcgaatttaagaaaattaattataacctctattagattataattataataaattaataatcattttggaagagttatgaactaattttcacaaaataatttcaaaacactactagataaagcggttacaactattgggaacaccactttttactcttacaacgtaatagtagtagactaggaaacgatccgaccggataggcaacagaagaagggtttttctcccagtttcattttcctacttaactatatactttcgatttattaaccggtttacctctttcaaaaaacagttaggggcattccgtttaatagaaaaagagaggcagtgatgaaccgcctctctttctggaaatctattttgttacgagctgatcttttaatagaaacttttcaactacttttgcgacaccgtcattctcgttcgtatctgtaatatagtcagaaatctttttgatgtcatctggagcattccccatcgcaacgccaagtcctgcaaattcaatcatttcttggtcattataactgtctccaacggcgataacttcttctcgtttaataccgaactcattaataagcctctcgatgctcgtacctttcgtgattcctttatcggtgaactcgagaaaataaggcttggaccgcatgacgctgaattcttctcctaactcagcttgaagtttcttttctactttcttgaggtgctctggttctccaaccatgagaacttttacgacgggttctgtgacaccatccataaaggaatcgacgacagtaatcggtaaacctgtcagttcagactcaatcgttgtgtagggattttcttctgcagtaataatttcatctccaacgtacgtatgaatgtacacattttctcgtgtactaatgtcatggagtcgttgaacagcttctacagataatgtctgactgaagaaatcctttttagagtgacagttaataatttttccgccgttaaaggatagaatgtaactttcatagtctgcgaggaagagttcgtcagcatatgaaaccattccgaacgttggtcttccagaggcaagcacaactttttttccttcatgctgggcttgcataagagcttctttatttcgattagaaatcgtttgatcagcactaagcaatgtatcgtctaaatctaatacaatcattttataagacatatgtgattttcatctccttactagtttcccttaccattttactagaattcagttaaaaaggggggagggttcctaaaatggaaaaaagtaatgattatgtagattagagaaaatgtcgtcataaagacttgtttttggtagggaaacctttgcgaagcagatcaattgaccattttctattagaggagtatctttggattcaacattcgatttcgaaagttagacgctatattttgaaacgtttaaacgaatcaaaggagaatatacaatggaaaactatcaagaacttatattaaagcaacaatcctacttcagaagtgggaaaacaaaagatgtatcatttcgaatagatgcgttaacaaaattaaaagagctaatgtcctctcatgaacaagacattattgccgctcttaaagcagatttaaataaacctgaaacagaaacaaaacgcgcggagattggtcttgttttaggagaaattaatttcatgattgagaatttatctgcgtggtcaaatccaaatgaagtggaaacaccatccactcattcaggagcaacaagcttcattgttcctgaaccatacggctcagcacttgtcattgcaccatggaactatccggtacaacttgccgttgcaccgctagctggagcgattgcagctggaaactgtgctgtcttaaaaccatcagagttaacacctcatacttctaatcttttagctaagatgattaacgagcatttccctgaagaatacttgcgcgttgttgaaggggaagtagaaacaagcacggctcttctcaaagagaaatttgattatatcttctttactggtagtactggcgttgggaaaatcgtagcaggggcagctgcaaaaaatttaacaccagtgacacttgagttaggtgggaaaagtcctgcgattgtgcacgaagatgctgaccttgatgaagcagcagcacgtattgcccgcggtaaatttgcgaatgcaggtcaaacatgtgtggcgccggattatcttctagtccatcgaaacgtaaaagaccagttgattagaaagatgaaagaagttatcaccaacacatacggagagaacgtttcagaaaaccttgatttcccccacgtggtaagtgaacgtcattttgatcgtttgaacgaatttttacgtaatggcgaggtagtcgctggaggtcattctgacaaatcacgcttattcattgaaccaacaatcttagatcatatttcatgggaggatcctgtgatgcaagatgagatctttggacctattctacctgttctcgtctatgacgaaattgcagaagcgattgatgcagtcgttgaacgtccgaagccactagcactatatcttttcactgataaagaacaggttcaagatgacgtattaaacaccatttcatttggaggtggagcaatcaacgatacgataaatcacatgacttctcactatcttccatttggcggtgtagggaatagcggtatgggagcttatcatgggaaagctagttttgatacgttctcacacttcaagagcattttgaaacgctcaaataaataaaaacaatagcatattctcatgctttatgacgcttcataaagggtatatgacgaaagtagacaacattgaaactgaagtttagtttaataggataatttacgtagaaagggtgtctagaatgaaagtacttatagttggagcaaacggtcagattgggaagcatttaacttcctttattaaagagcataatgatctagaagcgaaagtgatgattcgtaaagaagagcaggcttcttacttcaaagatttaggggcagaaactgctgtagttgatttagaagaagacgttaatgccattgcgaaggctgctgaaggtgtcgatgcgatcgtctttacagcaggttctggtccaaacacaggtgcggataaaacgatgttagttgatctagatggagctgtaaaaacaattgaagcagcaaaagaagctggcgtaaaacggtttgttatgattagttcttatgacacaacgcgagaagcgatccagtctgctccatcttcattttcaccttatgtagcagcgaagcactatgcagatgaatggttgcgagcaacggatttagattatacaatcatccacccgggtgccctaacgaatgatgagggaatcggtaaggtcaacgctgctactagagtagaaagaaatgaaatacctcgagaagatgttgcgagtgttatcgtagcgacgctcgaaaatgatgcaacgattgggaaagaatttcaagtcgtgacaggaacggagccaattaaagaaagcatcaattcactttaattgaaactcgatattttataagagagattgcattaaacaaagccccttgttcacacgcaaggggctttgttttgatcttttcattacaactcgttttccgcaccaatactctccagcgcttcattcacctcatctaaatcataaaaagaaaaggctggagtttaatttgcagatgtaataaatgtgtcagaaatatgagtggtcaccggaccatatacatcttgtttgttttcagggtatgtaatgatgaaccgattgaaaacattatcgccataaaagaatttctcataaataatcaatccattttctacgtaggataagacgaaccaatgatcagccaatcggtcataagcgatagggacttcaatattattaatcgcttgctgataaatcgattcgattgattcgtccatactgttatgtgatccaaaaacggtgatctccaactcctcattataaaaattcattccatcaccattagctggaggggatcctacggttaaatcagatggatattggatagaaaagccgaatctatcattcttgtaggtatcataggtctgaacttcttcaacttccacaggttcttcttttgattgaataggtttttctttagacgcatttgtagtgggggaagccttagcattttctagctcatctaaagcatcatttattcttccggtaaggttagctaattcattttcataataggaaagagcttcttctgcttgtactttagcatttaataactgaagctgctcaagagcgctagtatattctttgtcagaaatgagttgattgatcgtatcgatttcttcttctgtatccgccagttcttcttgctcatcaagaatcgtctttttccatttttgagcttctgattgaacagtcactaaaccttcatctagatttgtaacggcctcaaatgcatctaatgcagatatgtattcttcttgttcataatagttaatggcatcttccatttgacttgcttgttcgaaatagatacgtgcttctttatcatttgcttgttccgaggaagcgacttcaaaataaatagctgcttggtggtaatcttgctctcctaagctatcaatccctttgtccattgcattctggtagtcgctgtttgcacaagaagtgaggattataatacaacaaagggtgccaaaggtgaaccgacttttcataaaagaactcctttaaaatggtagttactaacaactgtattttatcagaataaaacgttatggaggttctttttccaattatttcttaagggaatgtgaaaagacaatacaaaacaaccaccagggaatctccccgatggttttgatgaagtattagcagtcttttccattaacgaaagcagcgccaacgatgataagaagaatgaacaatacaacgattagcgcaaagccattcccgtaacgagcaccaccaacctggtttccgcaaccgccgtatccagcgccaccaacctggtttccacatccgtaaccataactcatgaaatcatctcctttcataggttcttctttagtgtatgaaggaggaggagatggtgcttaggtgttggactagtttaaaaaagtttggtgaacctctgacagcaactagaacctaaagaaaaaccctgcttgagaaaaacagggttttgttagcactatttaaatgaagcgtatccttcatcagccatgacaacacttccgtttatcgcactagcttcttcgagtgaaagaaggtatactgcatcggctagctgttcgggatctgtgagtttattgccgataacttttgctttcatgccgtcgattaggcctttgtcacgatatccttggacaattggcgtatcgacaacgccaggtgcgacaccaacgacacggatgccgtatggtgctaaatcaagcgcagcggatttcgtcatcatattgactgccccttttgttgcatggtaagcgaaagtggctggcgaagcgagaaccccaaaaacagatgttgtattgatgatgacgcctttcacatttaaagccttcatctttctagcggcagccataattccatacgcgacgccgtgctggttaatgtcgatcactttatgataatcttctaaatcaaattcaggaagaggtgtaggacgtccaattcccgcgttattaaacatcacgtcgatcgtcccgaattgttcaacagttttttcgataagcgcttccacatcttcataacgcgaaacatctgtcttcacaaagagtgcaactccaccttcagcttcaattaattcaacggtttcagtacctttcttttcatcaaaatcagcaacaacgacttgatcaccttttcgtgcgaactttaaacatgtttgtcttccaattccgcttgctccacctgtaattactactactctatttgcagtcatagagaccaccccatttttaaaagttttttacggctttagtttatcatcgttcatatttaataaatatttaaatatcgttatacttaattaagcaatgcttaaggaagtgttgagaatgaacatcgaacaaatggcgtacatcgttacagtggcaaacacgggatcactatcgaaggctgcggaggaactgcacatcagcttatcggctatcagccaatcaattagtaaattagagaacgaaataggattgaaaatatttgtgcgtaatcgagcaggcgcggctctaacatctcaaggtgagcaaattgtatcgaaggcgagagaagtcataacaaagatggaagaggtaagagaagaagtaaaccgtcaactagatatgttgagcggtgaattaaaggtcgctacgattccaggcccgattcatctgttagttgacgttgtttcacgttttaaaagagcgtatcccaatgtaaaactagagatctatgagaatggaccggtaaaaataattgaagaactgtatcaaaagcagttggatttaggacttattttaatatcggagcggcttattcaaaaacataacatgctttcttttgaaaaagtaagggatggaaaaatggtcgtcggagtaagaaaggaatcaccactagctagacaaaagacagttaagccagaggatcttattcatgagacgctcgttctttacgatgatgcttatatcgaacaatatgtagcagaaacgttatcgaaatttggttctcctgatattttgtttactacaaacaatacagatgcaataaaaaatgctgttaagagggggatcgcggtaacccttggaattgactattcgtttggtaacagtcaattaagagagcgtgacattgtcatggtagagattgaggaaggggagcatgaaaatgtcttccttgctcttgtgcgtcatcgtgaaggacaagcgaatcgagttaggcgagagtttgtagagagtataaaaaagtatttttaaaaaaggccggttcattatttgaaccagcccttttctttaaaacgtgagatcgcttcgattcggtttgtaacttctaatttatcgagaatgaccgaaatgtaattacgaaccgtacctggagtaatataaagttcacttgagatgtctttcgtgtttttaccatcagccatcagctggattacctgcttttcgcgttcggttagcgggttttcattcccgaaagcgagatcgactagctcaggagcaaaaattcgctgaccttccatgattttacgaatcgaactagctaattcatcactcggactatcttttaacagatagccactaacccctgctttacgtgctcgctcaaaataaccggcacgtgcaaaagtggtaagaataatgattttgcacgatacactacttaatacttccgcagcatcaagtccgctttttagtggcatttcaatgtccataatacatatatcgggttttagttctttcactaaagagatcgcttcttcgccatttgttgcctggccgacaacttccattccttcttctagatcgagtagagagccaagcgctccaaggagcatacgttggtcttctgcaagtacgatgcgtatcacacagatccctcctgttctttttgttgaatcacatttggtactcgaatgtttaaggttgttccttgtgaagagtgaatttcaagagttccatttacgaactctaatcgttctctcattccctgaagtccgtgtccttgaaatgacgttgttccttcagggatgccattaccattatcctcaacttggatcaggacttcggttggggattgttctacgagaaccctgcaccatgaagcttggctatgtttgacgatatttgttacggcttctttcagacacatacttaaaacattttcggcaagcaatggcgtgttttcgagctgtggattcccttcaagacgaaactccatttccgccgcttgtaggatttgttgtacacgaatcaattcatcctctaacctggctccgcgcatatttgaaaccatctcgcgaacttctttcaatgcggttcttgcagtctgtcttatatcatgaatttcattaattgctgcatcaggttttactggaattagctttcgggctaaatcgctttttaaaccgatcatcgaaagcttttgaccgagtgtatcgtgtaaatcacgtgcgattcgttctctttcttcaatcaccattaattgtgaaatcttctcgttggcgctttgtaattgttgttcaaggcggtgctgcttattacggtaccgaatcgtgaatgggaggagagcaacgcctagcacacagatgaagataaacggaagctgtggaagcaatgtatcatcatgtgtaaagaaaataatgactgttgccgcaatcgttgttgttaaatgaacgatgtagagtgagagaaaaccagctttattctcaatgctaccaatgaaaaacgctaaaaatagagcgaagtacacgtacccaaataaaattgtcattacgatgctaatcgccatttcaatactgacccataaatagaccaatttactattagagataaaagagagacggtaggataagaaaaataaaaggatgacaaaaataccgattgtaatttcaataaccgatgatgatctgaaaataaaaaagaagggaagcaaacaaaaaataatccaaacataagaactgatcccggtgttcttaggaatgatgtgataccagctttgcatagggatctcctttcgatgaactatggttacaggatataccatctgtatgcgcatgtcacttatctatcattagtataatccctttaaagatattgaaaaacccatccaagctgaatgggtttttcagtaatgttatttttcctggaagcttggtcttttaggattcatcatcgcaagcttgtcaggatttttaagaagtggttttacttctttaaaggtaacaaacgttttgttttttgtatcatagagacggaatcgaatcgattcaagacttgataacaacgtaattgtcgtcgccttatgcaatggaggcgttgattcatgcgctttctcaagatgatagttaggtactcttggacttaagtgatgtacatggtgatacccgatgcttccggatacccattgaaggattttaggaagcttgtaataagaactaccatcaaccgcagcttttacaaaatcccattctgtttcatcttcataataagagtcctcaaattggtgctgtacgtagaacaaccaaattccaagtgagcctgctacgtaaaggattggtagctgaattattagaaacgcttcccatccaataaccagaatcaaaagagaataaatcgctacaatggatgcgtttgtaatatatgtgctcatacgttctttacgtttcgcatctttacgattgaaacggttagcgataaggaacaagtaaattggaccaagaccaaacatcacaatcgggttacggtagagacgataagcaagtctaccccaaaatgaagcttgggcatactcttcaaccgtcatcacccagatgtcacctgttccgcgcttatctaagtttccgctcgttgcatggtggatgttatgctcacgtttccatttttcaaaaggaaagagtgtgatgatgccagagattgtcccaacaatccggtttgctttttgacttttgaagaaggaaccgtgggtacagtcgtgaaaaataataaagattcgaacaacaaatcctcctgcaatcatcgcaagtggaacggctagccaggcagaaacgcttaagctctggtaagcaataaaccatagcaataagaatggaagaagggtgttcaagagctgtcgtacccctacgaccgtgtcgggctttgcgaaagttgatacactttttttcaattctttttgtttttgtttttgttcattcatatggttacccctttgttaggcatagttgaaataacgttaagcctaatgatagaggatagagtgtcatggtgtaagacacaaacgtcaggacataaccatgataaatgtcatgggtttattggggatattaggaaaaaacgttctagaaacttgtgtccacttgttgtttcgctctccggccttgaacgatagactgatggactttcatggcaatcactaaaattatccctccaaacttgcactcaataaagtaaagagcagggtgttttgtttgtttttttcaataattcttcctaacttttcaaaaatttcctttctaattataatcgtgattgcgtgaaaagaaaaggataggaaaatcacaaaaaaagccccccaaacctcactatagaggttttggggggcttaagaaatgctattctaaattcgcatgtttcccatacatcttatttgtatctaaacctttcttctccatgaatcgtaaaataatcgcatcatagaaaagtaaaagggtttgttcgaataacgatcccattggttggatggtttcgtagtcaccagactgatctttgggagagcctggtagtgttacgataatatctgctaattcaccaattgtagagttaggattaattgtaacagccgcaatctttccaccaatgttcgcagctttcttcgcaatagagacgagctgctttgtttcaccagaacctgatccgatgatgattagatcatcttcttcaaagttaggtgtaaccgtttcgccaacaacgtaagcatcaatgcccatatgcatcatgcgcatggcaaaggactttgccataaagccggagcggccaccgccagcaacgaaaaccttgtttgctccgaggatttcgttcgcgagctgttcagcttcatcgtcagcaatgagatctactgaacgatttagctcatcaataatttcagctaaatagtgagtagtctgcatgattggttatcctttaataagttcttgcattttagatgcaacggcttttttatcgtcttcaccagtaataccgccacctacgatgacaaggtctggttgtacttttacaacttcttcaagagaatcaagcttaatgccaccagcgatagcggttttcgcattctttacgacgcctttgattgtttcaaggtcttcgaaagaattctggccttttgcttgaagatcataaccagtgtgaacacaaatatagtcaacgcctagcgcatctacttctttcgcacgagttgcgagatcttttactgccatcatatcaacaaggatttctttaccttgtttcttcgcttcttcaacagcacctttaattgattcatcttcagcggcaccaagaattgtgatgatatctgcattcgattcagaggctttcataacttcataacctgcagcatccataattttaaggtctgcaagaacttcaaggttagggaatgctgctttcatttctttgacagcacgaagaccttcattgatgacgatcggcgtaccgatttctacgatgtcaatatgttcctgaacttcttttactagttcaataccttcttctgtatttaccaaatctaatgctagctgtaatttcataatacgttcactcccgatccatattttttctgtctctcttgtcagacaccaatataatcgatctgttggtgtagtagcaagtatactgcttacgatctattaatgtaagtacgcacattaaacttacatagtgtcaaaaagtatactatgggttataatgggcttatacggaggtgatttcgtgtcacgcacccaggataaaacattttactgtgaaaaagaattaacgcttgcggttatcgggggcaagtggaaaatgctgattttatggcatttaggcaagcagggtacgaaacgatttggtgagttaaagtcccttatgccgggaattacacagcgtatgctagtaaatcagctaagagaattagaagatgaccaaattgttcatcgagaagtgtacccagttgtccctccgaaggtagagtattcccttaccgagcaaggtgaaacattaatgcccatactcgactccatgtatgagtgggggaagaattacaatcagaatgtccttggcaaaccgattgaaacgaaagagtcggtataaaacccaaaacccctgtgcgctctatcaaacatatagagcgcacaggggttttatttgttagtgttcaaccaataactgtatttcttctatgattgtttcccaggcaaatgaagtcgtatcggtcaacataaagtgttctgctgaaggaagctcgataagtttaatcaaatcgccctcgccttcagcttcgcgttgataataatcactaataccgatggggacatttatatctagtgcaccgtgaacgagaatttgttggaccccaaggggaagaagttccacaggggaagcatttttgtagcgctccgggtattcttgaggggaaccgcctagtagttctgcagtagggttatttggctcaagagagaggacttggtctctgtactcatgaactccgtgcatcatttcaaggtcgttcacacctgcaaggctaaccactccgtgaataggaagagggttgtccgtaatgaataatttactattcttatcgatgcggtgacgagcagcaatccatgtagcaagatggcccccagctgaatgtccaatcgtaaccactttgttcaggtcgagcggataggtttctgcaagtgtccttatgtagtcagttgcttgtgccgcatcagtaagtgttccaggatagccaccaccttcttgtccagttcgacggtattcaatgttccacgtggcaaaaccacttgctgttaaatcttctgctacttctctcatgattttaagtgtgaacggcttccgccaaaagccaccgtgaatgacaatggcaactggaaacgggccatctcctttcggaagacgcaattcaccaaattgattttcgttttcaccatagaaaattttctccacgttcttaaccacctctctgatcgaaattacatgcaccttcattatcgcatatcacgtgccactttcatcagatagtgcactttaaaaagccaatcaataaacgattggctttactgcgtaaaaagaataatgatgcctagttacctagctttatgcctcttgcaacgctataaaaattatttacaatcataaatgatcccgtattactcccaccggatccgctaaccgtattacttacggagatcggagagatggtgtgcgcacattgaacgactgtaccgctattgttagtaatcaccactggcccgcgtatcaaacaacccatttgttttcactcctcattaacgaactactgataacagtatatggacaaattgactcatctgtttggacatgttccgaaaaaggatgtccaaattgtgcaccacaaaagaaggagtcagtttcctgacccctaaatgaaatgttagcttataaaaatggcttgagagaaagtgatcacaccggtgataagaagaaagacgaagctatatttaagtgtgaagcggaacagatcgccttcgcgtcctacaagaccaaccgctcctgttgcaacggcgatagactgtggagatagcatttttgccatcacgccacctgctgtattcgcagcaacgagcaccatcggaagaacagcaatttgttgagcggtaatctgttgtagattcccgaatagtgcgttgttagatgtaacagaacctgttaagaatacgccaatccatccaagaagtggagagaggaacgggaagacgccacctgttgcagcaagggctagacctaatgtagagctcattccactataatttgcgatgaaggcgaatcctagcaccatcataattgtaagaaccggcttttgaagttcttttactgtttcaacaaaagcttctagcgctgctttagggctcattctaagaatgaaaatggataggattgcagcgatgaagatggccgttcctgttgctgaaagaagatcaagtttcaacatagccccatatggtgtaggttcacttacaattggtgctgttttaataacgagattatggagtccgggtacaggaatttgaaggatcgttgcttcaagtaatccaccttctacaaataaattcttgaaaggctttagactccaaattgtgaccattgctgttaaagcaatgaacggagaccatgcttttaaaattcggccagctgttagctgagcttcagggtcaagagaaacagccagctgtgcttcaacttcaggatcaatcgtatggttttgctgcatttttggatgccacattttcacgaatacagctaccgctactaaactaacgatggaagacgtaatgttagggagttcaggtccaataaatgtgactgtcgcccattgagtaatggcatatgtgctaccggcaacgagagctgctggccatacttttttcaagcctttcacaccatccataatgacgacgagtaggaatggaattgtgaaagagataaagggaagagacgttccgagaaattgcccaatttccattggggcgagtccacttacttgaccagcaacaatgacagggattcccattgcgccaaaagcgccgctagctgtattggcgattaaacatagtccagctgctttaagtggttcaaatccaagtccgacaagaagggctgctgtaatcgcaatcggtgctccaaaaccagctgcgccttcaagaaacgcattgaatgaaaaggcgacgagcaacatttgaattcgtttgtcatctgtaatggatacaatagaactcctgataatatcgaattgcccactttttacagaaagtttataaaggtagaccgcgccaataacgatgtaagaaattggccataatccaaatgcaaatccgtaaccagttgtggctgcaaccatcgtgatcggcatatcatagaagaggatcgcaatcacgatagcgagcatcactgtaaccgtagcagcgatatgccctttcattcgaaaagcggtaagagcaagaaagaaaaagataatcgggataagagcaataaaagcggatagccagatgttattaaatgggtcatatatttgtgtccatgtttccatgggggatcacctcttatgcgttatagtaggatttcatttcactgtctcaaaacagggattcattgcttctcgtaacgtccttgcagaatgatgtagttgcttcatctcggtctctgtgaggtcaagctccacaatttctcgaataccgtttctgtcaataattgcaggtacgccaatatagatgtcattaagaccatattcaccttgcattaatgtggaaatcgttaggatagagctttcgtttcttagaatcgctttggtgagacgaacaagtcccattgcaataccgtaataagttgcgccttttcgattaatgatgtggtatgctgcatcgcggacgttcgtaaagatatcgtgaagtacaggcatctcttcttctgtgagcatttgcgttactgggcggctactcactgtcgcgtggctccatactggaagttctgtgtcgccatgttcaccgagaatataggcgtgaacatttcgggaatcgacctgaaagtgatctccgattaaataacgaagtctagcggtatcgagaatcgtacctgaaccaatgacgcgttcctttggtagacctgagaatttccatgtagcgtaagatagaatatccactggattcgttgcaacgatgaatagtccgtcaaaaccgctctccataacggcagtgacaattcccttgaagatgtttacatttttctcaacaaggtcaagtctcgtttccccaggcttctgatttgcgccagctgtaattacgacaatgtcagcatctcgacagtctttataatcccctgcccaaattctcatagctgatccaaacggcatcccgtgatttaaatctcttgcttctccttcagctttttctttatttaagtcaatgagaaccatttcatttacaacttcttgatttaataaggcgaaagcatagcttgttccaacaaaccctgtaccaatgacagccactctcgttgtatatcgttcgtttttcataacaattccaccaatctatcgtttgtgatgtctttcacatacataatataacgtggatttaattgctcatatgtgacaaatatcacatgagaaggcttacatataaaattaattttaaaaggtaaaaaacatgattaaatgagaaatctatgtaaaaaaacgctcgaattttgagcgttttgtgttttaccagaaaaagaaaggtgaccaactataagcagcgatggaggcaagaccgactgcaatgagagccgccccgaaaaaaaagtagctaccaaagccgggaccgtcatttccgccgccctccatcgggcgcaggtagacattgtcacgatcacagtggtcgatgtatccgtagtgcgttgtgccatcgtggcagcgaatggctacacatctgccaacattattattgaattcctcgtgataagacattttattcctcatttctcgtttagtgtaagagtcacgaaactctccgaacttgctagatacattattactctatgaaataaacgtagaggaggattggacaggaatggaattgaaactaaataacaacgctttattaaaagaaataaagtagctatgataaaagtagaatagaggaggtgctggatggacgagattaaaccattggggtcattttatggagtggatgatgaaggctatttggtaaacgatacgtcgtgggagaaaattgatcgaaactatcgaaatgcgatcaatcgtgctgttgaaattttaactctagcaatccctataagcagcatttacttaaggggatcagtgccaaaggggaatgggattgagggtatatcggatcttgatttcatagttttaacggaccaagataatgaaaaagtagctgagctcctaaataaaaaactaacacatgaatttccatgggtgagtggttgtgaggtaagtttcttttcacatcgaaagctagaaaaattaacgcgcttttcaatcattccatttatgctcaaaacgtccagtctctgtgtatacggaaacgacgtgacaaatgatattccgaattataagccagaccgagcccttgccaatgatcatctcattcagctgcgaaaacatattaatcaagcaaaaaaagagctgctcggcaatgaagatgcggaagatattgcggattgctgtacatggattatgaaaataattgttcgtagtggacttgcgcttgtaatggaacaaaaggcgatgtatacaagagatctttatccagcgtatgcgttatttagcgctttttactcacaaaaagaacaagatatgaagcaggccataacttatgcgatcgttccttcaaactctgcagatgaaataactcgttttttgaatgggtttggcgattggataattcaagaatcaaatcaatggttagatcaatacaatccgaatcgagtacctcatatgcctataacatgatggctaaacgaaaaagaacggagatcaagaaagtgatctccgttcttttcgtttataaataggtaattaacgcgattccgcctaagaacaaaccacttagaatgagtttaccgaaaagagggaggtgttcttttcctttttcgttgattcgttcctcctcttcatcaagagtagttttgttttttgaatgacagcagcccatattatcacacctttataatccgtcaaaggggattgtctgttcaacgtatcctttatgcaacgctgtccttatcccaaccggaaatatcgatttccagtggaatgttggcagcacgttgcttacgagcagagtagaagaaagctacaataacagcgatcgtaatgatggttgccccaatgtaagcgacgttcatcggtaagcgaaagccgattggtgcatttagaatgtaagtggtcgttgccatcgtgatgaaaatcgctggaatcatcgcaatccagtagtttttctttgcaataaacaagtacattgcaccaacccataaggcaatcatcgctgtagactggtttgcccatgagaagtatctccatagaagggtgaaatcaattttcgtaagcccaaatgcaacaacgaaaagcggtagtgcgatccagagacgatttgttactttacgctgtgagtaattaaagtagtctgcaataatcatacgagcacttctgaaggctgtatcgccagacgtaattggaaggacgataacaccaagaatggcaagcgttccgccgattgcaccgagcatgagcgtagaagcttcacttacaatggcggcgggaccaccgtttgcaagtagttcatttaacccaaccgggccattgaataagctcatagcagcagcagcccaaatcatcgcaataacaccttcagcaatcatcataccgtagaagatgttacgaccttgtttttcattttgcgttgtacgcgaaatgattggcgtttgtgtggcgtgaaaaccagaaagtgcgccgcaagagattgttaagaatagtaatggaaagactggtgcgttgtcagggtgaaagttgcttagggtgatttctggaatcggtgcaccagtaaacacaagcccagcaccaacaccaagtgcactaataagaagaagtgcgccaaaaatcggatagaagcgtccgatgattttatcaatcggtagcaacgtggctaggatatagtatacaaaaatcgcgcctagaataaggcccatcgttgcccagccgttcatcaagttatttaatagtccagctggtgctgttacaaacacagttcccgttagaaggagaagaagcacagcgaatgcattcacaacgtgcttcatcacttttccaagaaatttccctgcaagttcaggtaagtgagcgcccctgttacggatggagatcattcctgtaaggtaatcgtgaacagctcctgcaaaaatacagccgaatacgatccagagaaaagcaactggtccatagagtgcaccaaggatcgggccgaaaattgggccaacacctgcaatattcaatagttggatcaaagagtttttctttgtgttcataggaagatagtcaacgccatcctgatgcgtgtaggcaggcgtttgacgcgcttcctttacgccgaaaaccttctcaacaaactttccataagtaaaataaccaataataagtagtgcaattcctgctagaaatgtatacataaaatcatccctttccgttcgatgtatgcgtttacataaagtataagagatgagagggaagaaaggatgactttcgttacaacatgtctaaaagtaggcttaaaatgtctaaatgagacattaagatgcactagtcgttcacaattcgagctcggtccgaagcgcttttacataattccggctaacggataatttttcttcaacaccctctaattcaagctgataagccccgttaaaccatggagttagccgcgttacatagtgaaggttaacaaggtatcctttgtgaattctaaaaaaggagaacgaggataggcgattttcaagttcttttagtgcgatcttcacttcatactcggcatttttgacaatgatgcgggagactttatcatctcgaaagataaagaggatatcgttgggatcaaggtaatgaatttccccttcgacgtccaccgagagcttgcccttttttggtaaaggttcttctttcattgatacctgcatcagtttctttaaccgctgaaccgtctggcgaagctgttcttcatcataaggtttcagaaggtagtcaaccgcttcatagcgaaaggcttccgcggcaaattctggataggctgtcgcaaaaacgatgtgcggcggtttttttaattcatgtagagctcttgcagcttccataccattcatgcctggcatttcaacatcaagaaaaaccacgtcagggtgaagctgtacagctttcacaacagctgattcaccagaatcagcttcaccgcaaacgttcactgattggaactgaccgagtaagtggacaagttcctgacgactgtaacgctcatcatcaacgatcaaaatattcattacgttcatttatttgacctccgtggttggaatcataaagcaaatggtcgttccttcatataaggtactacgaatttgaagtgtagctttgttgccatacaacattgataagcggcgattcacgttatagagtccgagtcctgttccaagatcagatgaaacgtgcatttttccaagctgatcaagtcgctttggaggaatcccctctccgttatccgttacacagacgaccgtgccatttgaatgacgcgtaatgctgatttcaactaagcagtctgtatttttatttttaatcccatgtttaattgcattttcaacaataggttggagcgtgagaggaggtagattcatcgttaacgcactttcatcaatcttgtagtttactgtgaggcgatcgacgaatcgtgcctcttctatttccaggtaggctttcacgtgctttaactcttgattaagcgaagtcatgttcgccgtcgttccagataaattctgtcttaaaaagtgtgaaagggaaacgagtaatttacgtgctttatcaggttcgattcgaattaacgaaataatcgtattaagcgaattaaacagaaaatgtggactgatttgtgcttgtaatgctttgatctcggcttcttttgcgagctgataggctttatccgcttcagcgatttcgagctggttactgagcaggttgctgagaccgagaacgagctcggtgataatatgggtaatctctttttccgatcggaaataaaattttagggtgccgatcgtttttcctcgctgtttgagtggggcaatgatggcagctccgagcggacagtctttctcagcgcagtgaatggtctgatcgtttgctacaacaatctcaccattatgaatgacgtctttcgtaatggtcgtttgaatttcgtgtcctgattggtgatggtcgttcgcaagcccaacatgacttaaaatgtgtgttcggtctgttatcgcaactgcactaccttcaatttcacgatgaagaatctggcagacttctttcgcagaagcttcggaaagcccttttctgagatacccgagcgtttgatccgcgatacgaagagttttttgagcctgcagggcaccggctttttcttcctcgtttacgacatttttaataattaataggaagagagcacagccaataccgtttgcgagaatcattggaatcccaatgacttcaacgagagcgattgcgttttcgaacggcttagatagaagcaggataatgagcatttgaaccgtttctgcacctgcaccgatcataaaagctgaatggagttttacatgacgatttcgtttatgtagggagccggcaataagtcccgcaattatcgaggcaagtccacatgccagtgctgtgaatcctccaagcatatagcgatgaaaccctgcgataagaccggcaccaaagccaactctctttcctccaagaaggcctgcaagtacgacaccgatcaccctggaattggcgattgcttcgtcagaagacacttcaagtggccaagaattaaattgaagtgagtctgtactgaatgtcagtccggtatatgtaccgatgatcccaaaaaaaccgaagaaaccaatcgcaacatactgttgcttccgagcgagctgatcgctgtaaatcatatctctaaagaagcgaaagcgtgttaacacaaacgcaatcgtaacaattatgccaagtctctccagcatcgtaagcaagagttcaaacatcagtgcctgtcaccacccggtttaagtcaaattgtgtcgaataataaagcggttgctttccattataaaggttttgatcttgtgagggaatgaacctgagagagctgattactttctcaggtatgacctgttatctctttgcatcggttatttcatcgtttgaaatccgaatttccttaatcgatattgtaagctttgtctgcttaaacctagtaattgtgctgtttttgagatattacctttgttttcatgaagcaccttttgaatataaactttttctgctttctccatcttctctttcaatggaatggtttggttggaagaatgaatggggagctcctctggctcaatcaaatgactttctttttgtattggcgatttattacgatactgaataggtagatgagaatagtcaatgacatcttcgctcatcattaaattcatcgctccttcaataatatgctctaattctcgaacattcccaggccaattgtaagctttgaaagacgcagagacttcggcatctacccctttcacatccatttgaaagagatcattgtattttaaaataaaggaatccactaacaaagagatatcctctttcctttctcttagtggagggataaataatgtcacaaccccaagacgataatacaagtctttgcgcatccgttcattagcaatagcttcaatggggtcttcgttcattgtagcgatgattctgacgtcaatgatcttatcatctgtgtcaccaatgcgccgaattgttttttcctggagaactcgtaatagctttgcttgtaaattcatacttaaagaattgatttcatcaagtaataacgttccgccttctgcttgttcaaataaccctggtcgttccgtggcacctgtaaaagcaccacgctttgtcccgaagagtaggctttcaattaagttatccggcagtgctgcgcaattttgtgagataaatggagccgaggagcgatggcttccattgtgaatgctttgcgcgaataattctttccccgtaccggtttcccctacgattaaaacagacgacgacgttctcgtactgcgttttgtattttcaattacctcttgtatcgtaggactttctccaataatgctatcaaatgtaaagcgcgtgttcccttttcgattcatattatctcggattaaccgttctaatttagtcacatcgttagaaatttcgacagcgcctttaatagtaccattttccaaaataggaaatgattgattaattgtcgtgatttccttccctttattattaaaataggtttgcttcacatttgacgtctcgatccccttttgaagtgccttaacgagcgtgctgctttcatttgcagagaacatgaaaacatctaataaatatttatcaagcacatcctggtgatccattgcttcaatttgcatcattttcggattataaatgatcgttttgcctttctcgtcgatcacatgaacaccaacatcgatttcatcgatgatttttttatatacctggttcatggttttaagagatttacagtcattctcagtggtgttatccaatatacatacctcctttactgctatcgctattgtatgtttggaagtacatgggttgcaataatattttgcgtatacatgcaaaatagatcaactgtgtgcaaaaatattttgcgcatccgaattgaataatccccgtcatccttatgcttaacccataattaaaagttggcataaaacttgcttattactaaggggaaagaagagcggtgtcattttttgctcttccggatgaggcaacttttaaaggaggaagaaaatgaagactaaaacaacgactgaaaacctgattgaaaaaacaactcaacttggagcgaataattataatccgttaccaattgttattacggaagcggaaggggtttgggtaaaagaccctgaaggtaaccaatacatggatatgctgagcgcttattcagcagtaaaccagggacatcgtcatccgaagattattcaagctttaaaagatcaagcggatcgcatcacattaacatcccgagcttttcataacgaccaattggctcctttttatgaaaaggtagcaaagctaacgaataaagcgaaagttcttccgatgaatactggtgcagaggcggttgaaacggcgattaagacggttcgaagatgggcctatgatgtgaaaggtgtttctgaaaatcaggcggaaattattgcatgtgtaggaaatttccatggcagaacaatgacggctgtatcactttcttctgaggcggaatatcaacgaggatttgggccgatgttacctggaataaaattaattccctatggtgatatagaagcgctaagaaaagccatcacgccaaacacggctgcttttctctttgaaccgattcaaggagaagcagggattgtgattccgcctgaagggtttttgaaagaagcttatgacgtatgtaaagaaaacaatgttctttacgtagcagatgaaatacaggctgggctaggtcgctctggtaaaacgttcgcctgcgattgggaagatgttgagccggatatttatatacttggaaaggcacttggcggtggtgttttcccgatttcgtgtattgcagcaaatgaagagatccttggggtgtttaatcccgggtcacatggttctacatttggtgggaatccacttgggtgcgcagtatcggttgcagccctcgacgtattggaaaatgaacagttagctcagcggtcactcgagcttgggaactattttcaagaaaaattaaaagaaatcgataaccctcttattaaagaagtgcgcggtaaagggttatttatcggagttgaattaacagagtcagcaagaccatactgcgaaaagttaaaagaagaagggcttttatgtaaagaaacacatgatacggtgattcgatttgcgccaccgctcgtgatctcacgtgaagatctagattgggccatagctaaaatcgtaagtgtgttgtcaaagtaagaaaaattaataagatgaggtgtatacatggaaacggcagttagccaacaattaaagcaggatgaaaaacaagatacggaatcactgaatttatttcactccactcaaattgtcgtgaaggaagcgctggatcaattaggctattcagatgagatgtatgaacttttaaaagaaccaatgagaatgctaactgtccgtattcctgtgcgaatggataatgataaggttcgtatttttaccggatatcggtcccaacataatgatgcggtgggaccaacaaaaggtggggtgcgatttcatccagaggtaaatgaagatgaagtgaaggcgctatctttatggatgagcttaaaatgcgggatcgccaatttaccgtacggcggagggaagggtgggatcatttgtgatccgcgcgagatgtcttttcgcgaattggaaaggttaagccgtggctatgttcgtgcaatcagtcagattgttgggcccacaaaagatattcctgctccagatgtttttacaaattcacaaattatggcatggatgatggatgaatacagtcggattcgtgaattcgattctcctggattcattacgggtaaaccagtggtgcttggtggctctcatggaagagaaactgcaacagctcgtggtgtaacgatctgcattgaagaggctgctagaaaaaaaggaatcaatctacaaggagcacgcgtagtcattcaggggtttggcaatgctgggagtttcttagcgaaattcatgcatgatgctggggctataatcattggaatttctgatgcctatggtgcgatttatgattctaaaggccttgatattgatgacttgctagatcggcgcgatagttttggaacggtgacaactttatttaacaacacgattacgaataaggagctccttgagttagactgcgatattcttgtaccagctgcgatttcaaatcaaattacaatcgaaaatgcttcagccattaaagcttccattgtagtagaagctgctaatggaccgacaacaatcgaagctaccaaaatcttaacaaagcggggtattttacttgtacctgatgtattggcaagttcaggtggtgtgacagtctcgtattttgaatgggtccaaaataatcagggatactattggaccgaagaagaagtagaagcaaggttgcgaaaagtgatcgttgagtcttttgcgaaagtttatgaaatctcaaaaacttaccacgttgatacaaggttagcagcttatatggcgggaattcgaaagatggcagaagcttcaaagtttcgaggttgggtttagatcgagcggtttctatattattgtgacgaaagggaggatgaaagaatgaatgagatcgttcatacaatcaacagtccttactatggaacaattgagcaggtcgttacacagccattggatcatgtatatgagtgggaaacattgtttttagttaaaacaggggaaggtaaacttgaacatattaatgttggagtaagtggacatctcctttcaatagaagtgagtcagggagaagaggtcacacctgttacagtgttaggaacattgagggatgatttgttaataaccggtagtgattgatgaaatataagcgcgccacccttttctgtttaggcagaaagggtacataggtagaccatgaatcaaactggaggtaagcgaatgaggagaaccggtaaacagatgacttttggtttagcaattgttccgtttatagctatgattgttgcgatggtttttaccattgtcgtttttgaaggaagtgcccatattcctcttattttaggtgctgttgtatccgctttcattgcgtggtttgttggtttcagttggaatgaaatcgaatctagtatttataaaggaattcgtctttcgttaccagcagtggttatcatcattcttgtagggattgtgataggtgcatggattggcggaggaattgttgcgacgatgttttattatggtttaaagctcatatcgccgggttttttcttagtgtctattgcagttatttgtgcaattgtctcgattgcgacgggaagttcgtggtccacaatgggaacaatcggtattgcaggtatgggaataggaatgagcatggacattccttcagggatggttgctggagcgattatttcaggagcgtactttggggataaaatgtcccctctttcagatacgacgaatctcgcttcagggacagtaggggcaaatttgttcgagcatattaagcatatgacgtataccacagtgccagcctttatcatcgctctatgtgtttactggtatttaggaacaaaatttgcctcgaataagattgattttgagaaaatcgaagcgattatgaaagtgttacaagaccaattcgttatatcaccttggctccttatagcgccagctctagtaattttattagtatcaaaaaaagtacccgttatcccttccttaatttctggtattattctgggttttcttgctgatgtttttgtgcagggcggtgatgtaggaacagcggtcaatacattgcaaagcgggtttttcattgaaacaggaaatgccacaatcgatgaacttttcaatcgaggtggcatagacgatatgatgtataccgtttctctcgttatttgtgcgatgacgtttggtggaatactagaaaacacaggtatgcttcatgcaattgtgaatcaaattattaaaatagcaaaaacagcaaaagggctgttaacgacgacagttatgtctgcttttgcgacaaatgtgttaacggcagaacaatatatatcagtggtactaccaggtcggatgtatgtgaaaagatatagggagttaaatctccatcccaaaaatttatcaagggcgatcgaggatggcgggacattgacttctgtgtttgtcccgtggaatacgtgtgctgtatttatctttggtacgttaggagtttctgtgattgactatgcgccatatgcggttttaaattatctcgtgcctattctttcggttgtctttgcatggactggtttaacagttgcctatatgacaaaggaagagagaatgaaccagatactagaagagaaggtagaagaagtaggataagtaggataatgggaatgcgatattaaatgaaaagcagaattccttttgagggattctgcttttgaattgatctcaattttatccgcaaagctccgtaagaattttttggattgtatagatgctatcatccttcttaaactgttttgagaaagtaggagtctgtgaactagagacccagattttaagctctgcatcaagatcgaagggtcccgccgtctcaatgctgaagtgcgaaatgctcttgtatggaacagaatgatattctactttcttgcctgtcataccttgcttgtcaacaaataaaagccgtttgtctgtgaacacgattaaatctctgacaagcttaaacgcagcattcacctcttctgtgtcagcaagaatgttagacagttctttcttcacatcttctttcttcatcgttgaagcatttcccataaatccgcttaaaatgcccattgtaactcctccttcacattttttatcatgctctccctcatattctagcataggtagtgcctgtcaccacccgaactagctcgaatgttgtcgagcaatatatggataaaagagcgggttcttgcatacgtatcgaatgatgctcgtgctacactcaagttaacaacgcaatcaggaagaacagcaatgatttcttactattaggagggataacaatgccattcatgaatcttgaagatgatctggaactttattatgaagatgtgggaatggggagtccagtcatctttattcacggtgtttggatgagtagccgttttttcaaaaagcagcttccttactttagacagaagtatcgagcaatttctctggacctaagaggtcatgggcaatcctctcatgttcagaaaggtcatacggtagcaaactatgctcgtgatcttaagaaattcatcgatgaacttcatttaaaggaagtcacgttagttggttggtcaatgggagcctttgtcatttgggaatatttgcatcagttcggtgaagacaatgtgaagggaacagttattgttgatgagctcgcatctgacttcaaatggcctgattttgatataggtgcattcgatctcccagcacttacaggaatgatgagagacattcaatccgatcagaaggaattgcttcaagggtttattcctctcatgtttaaagaggaccgatctcaatctgagcttgagtggatgttagaggagacaacgaaaatgccagcttccattgcgagtgctattttattcgatcaatcgatcattgactgccgtccttatttaaataaaatcacgaaaccaacgctactgtgttttggaaaagaagaaaagctcatcccagtagcagcaggggaacacttagaacgtgaaatccctaacgcaaaactcgttatatttgaagatagctgccactgtccatttatagaagaaactgaccgatttaatcggatcgttgatgaatttattggggatataaattagcttaagaaaaagacaagtagctcgtttacttgtcttttctagtcattcaaaaactttctcatttttataaaaaaagctattgcttatccaaaaatgctgggatataataacatcaacgaaagcgctttcgatccagaggagacaaagatgattacaatctatgatttagcaaaaaaaactggattttcaagtacgaccgtttctaaagctcttaataattacccagatgttagcaaaaagacaaggcaagccattcttgatacggctactgaaatgggctacttaccaaatgctcatgcacaatctctttcaacgaagaaatcatggacaataggcgtcatgttttcggaagacaatcaaatcgggatgaagcatccatttttcagtgctgttattgaaagctttcgtaagcatgctgagaaggaagggtatgatcttattcttgcttctaggaacctgcgtaacagaggatcaagttatcttgagcactttatgtatagaggtgtggatggcattgtagtcatctgctcagatccaaatgatccacaggtgcaagaaatgattgatgctagcattccaattgttgtcatcgatatgagtaatcaaaactgtagtgtcgtattctctgataatctttccggtggtgcacttgcaattaactacttgtactcgctcggccatacgaagatcgcccatatttcaggtgaaccttctatctatgctggccaagtaagaattcagggttactcggacgcgatgaagaagttagagcttccgattttagaaggctatcttgttaatggtggaatgttttctattgaagaaggcgcgaaagccatggataagcttcttgatttaaaagagccacctacagctatatttatagctggagaccatatggccataggtgcaatggaagctgctaagaaaagagggtacaatatcccagatgatatctcgatcatcggatatgatgatattgaaatggcaagctatgtaacgccgaaattaacaacaattaaacaggatactgattcaattggtattcgtgcaacccagcttcttatgaagcaaatcattcaaaagaaaaaaatcatcacagaagaaattatcccagtcgagttaattgaaagagaatcttgtaaacgactaaagaaaaaataattttttttagtcttatacgaaaccgctttcaatgaaggggatttatatttttggttaaatcgaaaccggtttcgattttattttatacctatttcgaaaccggtttcgctaataatacattctttgaaaaaaaggaaggggctcatccatgaaaaaggttattggtcttatgatgtcactcgtcttattgtttggtattttagctggttgttcaaactcggagtcttcaggagaagcaaaaggggataaagatgttgatttaaaagtttggtcttttaccgatgagttaaagaaaccaattacaaaatttgaagaaaaaaatggggtaaaaatcgagctaacaattgtaccgattgctgactaccctactaagcttaagcctgttcttgaaagcggcgtaggagcacccgatgtgtttacgggagaaatcgcgtttttgaagcaatgggtaaatgctggttactgggaaaacctttctgaggatccttataacgtaaatgaacttgcagataactatgtgccttatgtttttgacttaggtaaggacgagaatggtgatgtaagagcattatcatggcaaacaacacctggtggaatttactacaagcgtagcattgcgaaagaagtgcttggcaccgatgatcctgatgaaattggtgaaatgctaacttcaatggataaagtatttgaagtatcagaaaaaatgaaagaaaaaggttaccgtatgttcccggatgaaggatcgattcgctggttctctcaaggagatgatcctcaagcttgggtcaatgaaaaggatgaattaaagctaacagatcaaaaaatcgaatttctagattatgcaaaaaaactacgtgaagaaagctatacagcgcttgctccagaatggtcaccttcatggtttgaagcaatggataagccaattaaggtaaaagaaaatggcgatgaaactgaaacagaagttttctcttatgttcttcctacatggggtctacatagtgtcttgaagacaaatgtagaagactctgttggagactgggcagtaacaagtggtccaagtccttatttctggggtggaacttggttaggtgtctacaacaagtctgagaataaagagcttgcgtatgatttcgtgaaaatgatgacacaagatgatgaattcctaacagattgggcaaaagaaacaggcgatgttctttcttaccttccagttacgaacgaaatcaaaggcgattttagtgatgagtttcttggtggacagaacaactacgaattcttccttgagcaagcaaagagcattgagccaggtatcgtaacaaagtacgatcagcagcttgatacattctatggtaatgcggttcaggagtacgtggatggtaagaaatcaaaggacgaagcgattgcagaattttataagaaagcacaaaatgcttaccctgaattaaaagtaccaaagaagtaagaagtgtaagcggtgtaaggattcttataccgcttatcttattttgaaaggagcgacgagatgaagaatctgaaccgctatggctatgcctttatagcaccgttttggatcatttttctcatatttaatatctatcccgtagcactaaccttctactatagttttacaaattacagcggtagtggaacggcagaagttgtaggctttgcgaattaccaacgattaattgctgactcctattttgtagaggcattctttaatacatggaaaatatggggtgtgaacttttccctccaaattgtaattgcacttattctagccatgatcttctcagatgcgcgagtgaaaatgaaaggactttcattcttccgttcgatcttctacctaccaaatttaattacggtcagttcggtagccctattatttggaattctactagattggcagcatggatcgttaaatatggttttaatgaatatcggggttatctcagagcctatcaactggttgaatcagccaacaactgctcaactttcagtatctctaattctcacgtggatgtggtttggacattccttcatcgtcgttatggcgggtgtatcaggaatttccactgatttctatgaagctgctttaattgacggagcgaatcgttggcaaaccttcaccaaaattacgcttcctttgttaaaaccgatccttctttacattatgattacctcgttaattggtggtctccagctatttgatttacctatgcttttaacagatggtattggttctccagatggatcgttaaatacgatggttctctacttatacaaccaggcatttaagtacaacaattatggttacgctgctgcagttgcatacgggctgtttattattacagtgatcttctcagcaattgtctttaaatcaatgtatggcaacgagcgtaaacaagcgaggcgggtgtaaatcatgatcgaccgatcagaaatcgaaaacaatgtgacgcctgaacaactggcgaaaagaacgctgatccctcaagaaaaaaagacgaagaagcgtcgctcgattgtgaaggggattatttatgcgctactcattttaactgcggttatttgttttattccattccttatgatgcttgtcaatgcaacgcgttcaaatgatgcgattcttactggatttacgttaattcctggtacagcactgatggagaactatcgcacgatgatggattacgtaaacatctggaatggttttaaaaatagtttaattatttcggtacttgttacgcttttaactggctacttttcagctctaactgcgtatgggtttgctttctatacgtttaaaggaaagaatttcttgttcgtttttatgcttgtcatgatgatggtaccaggtcagttaggtttgatcggattttacgagctttgtaaaaaccttggcattctggatacgttcatcccattgattgtcccggcggttgctagtccatttgttgtgttcttcttacgtcagtacattcaaacgacgcttcatccaagcttaatcgaagcggctcgaattgacggagcaagtgaatggcggatcttccatacggttgcgattccgatcatgatgccggcagtggcaacgatgtcgatctttactttcataggctcatggaacaactacattatgccgttagtgattctattttcaccagaaaagtacacgctaccggttttgatgggattcctaaaaggttcacaagtcgcacaaaatttaggttctatgtatctaggtatcgccatttctgttgtaccgatcatgatcgcctttctatttttatctaaatatatcgttaatagtatttcagcaggagctgttaaagagtagaggagtggaagtatatgaatttcaataaagactttacgtttggaacggcaacatcttcgtatcaaattgaaggtgcccacaacgagggaggaagaactccttcaatctgggacatgttctgtgatatcccaggtaaagtgtatgaacaacacaatggtaatgtagcttgtgatcactaccatcgctatgaagaagacatccaaattattaaagaacttggagtagacagttaccgcttctccatcgcatggccacgaatattcccagcgaagggggattataatccagagggaatggccttctacaaaacattagcaaaacgattgcgtgaagaaggcattaagccagctgttactctctaccactgggatcttccaatgtgggcacatgaagaaggcggttgggtaaaccgagattcagtcgagtggttcttggattatgcaaaagtttgcttccgtgagcttgatggattagtagattcatggattacgcacaacgaaccatggtgtgctggcttccttgggtatcatatgggcgttcatgctccgggacatacgaacttagatgaagctcttcgtgctgttcaccacatgcttttatctcatggagaagcggtgaatctgttgaaaaacgaatttgcttcgactacatccattgggattacgttaaatttatcgcctgtttatccgaaaacggattcggtcaacgatcgccttgcagcaaataactcagatggttactcaaatcgctggttcttagatccagtttttaaaggaagctacccagtagacatgatgaacttgttctccaaatatgttcataattatgattttattcaagagggcgatttgcagacaatatccactcaatgtgatttctttggaatcaatttctatagtcgcggattagtggaatttaacgcagcgaatgattttctaactcaaggtgcacattccgactatgagaaaacaggaatgggctgggatatcgcaccaaatgaatttaaagacctaattagaagattaagaaacgaatatacagatctcccaatttatattacggaaaatggcgcagcttacgatgataaggtggaagacggacgagttcacgatcaaaatcgaatcgattacgtggaaaagcatcttcaagctgtttcagatttaaatgaagaaggcatgaacattcagggctactatttgtggtcgttgcttgataattttgaatggagctttgggtatgataagcgttttggcataatccacgtgaattatgaaacgcaagaacgaatctggaaagacagtgcattgtggtatgcggacattgtgaagaatagaggatccgttctgccacttaatgcatagaaggaaggggcattctgtgaaaacaaaaacaattactcatattcaatcggctagagataacggagaccttcttaacgttaaagaaccactagaagtctcatctcttccaaatgaagatgctactcggattaagcttaatccaaatgaaacatatcaaacaatactggggtttggtggtgcctttacagaggcatctgctcataccctttctcttattagcgaagagaaaaggaatgaagttattcatcgctattttcatccagaagaagggcttggctatcgtttcggtcgtactcatatgaatagctgtgatttttcgcttgagaactatacttatgttcatttaggtgacgaggaattaaaaagtttctctattgatcgagagaagaaactcgttatccctcttataaaggacgcaacaaaaatagcgagggaaaatttgaatatcgtcgcttctccatggagtcctccacattggatgaaaagcaattatgatatgaatcatggggggaagctcttacctgaataccactctatttgggcggactactatatgaagtatatagatgctatggaagcagaagggattcctatttggggactaacgattcaaaatgaacctgaagcaaagcaagtctgggattcttgtctttatacggcagaagaagaacgagatttcattaaaaactaccttggccctgcaatacggaagaatggtagagaggatcttaaggtgattatctgggatcacaatcgggatgttgtgttcgaacgtgcaagcgcggtgttatccgatccagaagcagctcagtatgtatggggaactggacttcactggtacgtctcagaggaatttgagaacttatcaaaagttcacaatgcgtttccggataagcaccttatttttacggaaggttgtattgaaggcggtgtacaactaggtgcgtggcataccggtgaaaggtatgcacggaatatgattggtgacttcaataattacttagaagcgtggatcgattggaatatcgttctgaacgaagagggcggtccgaatcatgtgggtaactattgcgatgcgccggtaatagttgatacaaaaacaggtgatgttcattacaacagttctttttactatattggtcactttagtaaatatgtaaaacctggcgctgttcgtatttcttgtagtgaacctacgaaccgtgttcaaacgacagcatttcgcaatctagatggagaaattgtcgttgtagtgatgaatgaaagtgatgacacaaggaacgttaacgtcatgttagaggaacaaatagtagccgttgagatgccagctcattctatatcaacagtgcttttataatctctaaaatcttgaggaggacaatgatatatgcgtagtgtacttcccgttctacttgccggtgttctagttctaagtcctgctgtcccaacttctgcctctagccacgaaaaagaaaaagataataataaaagtgaacaagttgttgcaaaaccttttaatcctgctgtaatgaaagggaaagttcacggaactacaaaagtgagggcttccgttcaagaaggcctacaccttgctgtgaaaatctcaaatgagccaattcaagctaatattggggagaatgttccgagtgatcgtactgtaacgaacccttatgtctctggaacggacttgtcaggcgttgatgaagagattaataaatacgtgatggtttatgttgtagatgaagaagataaaatcttcaactatgaacaggttaagctaaagaaaaccgacattcaaaaagaagaatggaatctagtttgggaagacgaatttaatggtgaatcgatcaacgaagataagtggaattttgtccagggtggcggtggctatggaaacaatgagtggcaaaactacacgaatcgagagaaaaatgctcgggttgaagatggttctttagtgattgaagcccataaggagaattacgaaggtaacgattacacgtctgcaaagttaacgacacagaataaaggcgattggacgtatgggcgatatgaaattaaagccaagcttcctaaaggtcagggaatgtggccagctatttggatgatgccaacggattatgatctttattcaggttggccagctactggcgagatcgatattatggagcttctcggccatgaccctgatacggtgcacggtacacttcattatgggaatccgtggaaaaatactggtgagtcatatgatctcccagtaggcgatttttcagatgattaccatacatttacgttagactgggaaccaggcgagtttcgctggtatgtagatggtattctttatgcgaagcaaaatgactggtttacaaaaaatgaaaatgaagcggcgccttatacgtatccagcaccttttgatcgcgatttttacttgcagcttaacttagctgtaggaggaaactggccaggttatccggatgattcaaccaattttcctaataaaatgctagttgattacgtgaaagtttatgagcttgatggagactatcgtgaagctggtgagcgtccggtaacagaagaaacagttgaagatttacgggagccggtaaacggtgactacgtttataacggtcaatttgatacagacctcgaatactgggattttcaaccctttgaaccatccgatttatttggtggtgcaggggaagtgactgtagtcgatggagaagcacatgtgacgatatctgatccaggcgaccagccatatgcggttcaatttgtgcagcccaatgtaccactagagaatggcgaacgttataagctttcatttgatgcacgctcaagcggtgatcgtggaatggttgttaatgtttctggtcctgagcagggatttgctaggtatctttctgataaaaacgtagccctgtcttcaaataatgagacattttcttacgaatttgagatggaaaatggaacagatccgcattcccgcattgagttcaacatggggcagagttcgagtttaccagtatggattgataatgtaagtctcgttaagctgccaaaggatccgaatgcgtcgaaaaaagttcttcctactggaaactatatttacaatggaacattcgatcaaggagatgatcgaatggtgttctggaatgtcgatcaggatggaaaggcaaaagctagtgcttctgtaggtgaagcaattccatctcgtgagattacaattgatgttaaaaaatctaatgaacttgaggatgtacgtctcagtcaggataatttgaatgtagaagaaggtgtttacgttctaaccttcgatgcaaaagcggatgaagcaagatcaattggagtacgactgacagatgaagatcgttcacaagagtatgttagggatgagagcatttccattacagaagagatgagctcttatcaagttatgattgatatgaaagaaaccgattctaaaacagtatttgaatttttgctaggcggaagcagccgttcgagcgtaacgattgataatgtagaaatgaaacgcgtagcaccacccattacgattgaaggcgtaacgaaagtggaggcagaagattatcaatcgatgtctggcgttcagattggagaagatggcaaaagtgttggttggattgatgaaggcgattggatgcagtatgccgtagatgtgaaagaagaaggcaattatactgtgcgctatcaagtcgcttcaggtcgagatggagctaacgtcacactgttgagtaaaacagggaatgtgtatgatggcacacgagaaatgggtgaaattttagttggagaggccgatcaactaacttcgatggacgtcgctcaaacaggtggatgggggacttggaaaactgttacagatacaatctatttagaaaagggtcttcaaacgcttcaggttaatgctgcaaatctgaacatagattggctcgtcttttcaccagagcaaacagatactgaaacggggataaggaatggtgatttctctgatggattaacaaattggggctcatggtggggagatcagtggagcggtacagctgaaggagcgatgactcatgaagatgaccagatgaagatcgtggtttctaaaacgggtgagcagtcatacagtcctcaagttttccaagagaatcttttcttagaagaagggcgaacgtataaagtctcctttgatgctaaggctacagtggcaaaagatattaaccttgtcatcggtgagccattaacatcagatccatggttcattccgtttatggaaacaaaaaaggtttctattggagaagaaatagaaacgcattcgtttactttccagatggatcaagcaacaagtgcaaatggcaaaattgtctttgaagttggaaaaatagatggtgttgctacgccctcaactatcgtgttagacaacgtggagatagtgcctgtcactacccgataaagggaataatttgtcgatgaaataattagtgaaaatgagagggttcttataacaagaatccctctcatttttcttttgcctctctatatttgctatacttctttataggtatttagttgaccatctaaagtaggtgaaaacatgaaagatcgacatagagaattaatgcgtcttctattagagaaccatgaaaggttttttcttgtcaaagaattagctgatcggttaagctgctcagataaaacgattcgaaatgatctagattttctacaaccctatataaaaaaagaaacaaacggatcgctgattcgcaaaacaggatttggaatccaactagtgatagaggatgacgaacgtgattggctttatcagaaattctcgtttcaaagtagcaattctgtcgagctgtctcataatgaaaggttgcttgagctcgcatataagctattaacagctaatgaaccgatgacattacactatctttctaccagtcattttattaatcgctctgttcttaagaaagaccttgaacaaatcaatcattggttaaagactatgaatttaaccttgcattcaacacaaaaagttggagtgacgattgaaggaaacgaacggtcgcgtcgaagcgctcttgttaatctaggtaagcttgtacaaaataagacaataagtcgtccgttcttgaagaagcagttcgctttatatgaaatagagctcgtcgaaaaggaattacgaaacctgcaaaacgagcactcgattacgtatacagatgaatctttcgaaaatcttctttatcataccctttttattattaaaagaacaaaactgcgccaaccgatcctagttacggataaggaagaggaacaaattaaagagtatgaagagtatgagtggtcaaaatctcttcttaaaaagctgggcatcgtcttcgtcgcccattttccattaggtgaggttgcttaccttgcccttcatttaataggggctaaacgcactggtgtttcgatcatacgagagccagaggtggagagacttggattagcgttaatcaatagaatgactgagatgacgaatctttcttttaatgctgactctacccttttggaaggccttcgggtacacctttatgctgcgctaaaccgcatacagtatggtttgtctgtgtctaatcccatgcttcaagagatcaagagaatgtatccttacttgtttgatttattaatccaaataacagaagaaatgaatgaaaattggaaattaacgattccagaagatgaaatagcttatttaacccttcattttgaagctgctgttgagcggttacaatccgatcgcggtgaaaagaagaacgttgtgattgtctgtcatttaggtgttggaatgtctcagttgctacaaacaaagcttgaacgaaaatttgcttctttgacaattttaaactgtataggacgtgcagcattacatgattttcttaatcaccaccaggtggattttatcatttctacagttgagctggagcgtcagtctattccccatattgtcatttcaccacttcttaatactgaggaggaaagtaagttaggatcctttatggggaaattggatcaaacgaaccgtgaagaaaggcgcaatgctatcttttctacttacctcgaatccgatcttgtgttcgttcagtatgatggaaatcaccgctatagtgtaattgaaatgctctcgaatgctttgtatgaaaagggatttgtaaaaaaagaatatgtgcacaatgctcttataagagaaaggacctcttcaactgcaattggttctggcattgcgattcctcatggtaaccccagccttatacttaaaccgggtatagcggtcgccgtgttgaaagagccgattgaatggggagatgaacaggttaatttagtatttctattagctcttggaaatcaagggaatggggttactcgcgagttgtttagggagatctcctcaattagtgagcaaccatttttcttaagaaagttaacacaacaaacaagtgcaaaagattttattaattgtttggaaacaaatgtaactgattaataaagtctactttaccgaaagcttcggtaaaatattgcctctttttctttctgatcttacgttactatttttgtaagcgattacgattgaaaaagggggaacaaaaatgaaattgttagcgattacatcatgtccaaatggaattgcgcacacttacatggcagctgaaaatcttcaaaaagcagccgataagttaggcattgaaatgaaagttgaaactcaagggtcaattggagtagagaacgagttttctgagaaagacatcgaggaagctgatggcattattattgcggcagataaaacggttgaaaaaggacgttttatcggtaaaaatgtccttgtagttggggttcaggatggaatacgtagaccggaacagctaattaacaagcaccaaaacggagaagttccgatattacgctcaggcggtaaatcagccgatgagtataaaaaggaaaagaaagataagcaaaatccaatttatcgccatctgatgaatggtgtttcttatatgattccgtttatcgttgtgggaggattattaattgccatcgccttaacaattggaggaaagccgacagaaagtggtcttgtcataccggaagattcattctggaaaacgattgaacaattaggtggggcatcgttcacattcatgatccctatcctcgcaggtttcattgcctatagtattgctgatagacccggtcttgctccaggcgtcatcggtggttatattgctgcaaacggaagtttctatggaagtgaagctggggcgggtttcatcggtggtatgatcgctggctttttggctggttatgtagcactagccattaaacgtattaaggtacctaaagcagtacagcctattatgccaattatcattatacctgtttttgcgtcgctcattgttggcttagttttcgtctttattgtaggcgcaccagttgcacaggtgtttgaatcattgaccagctggctatcaggaatgcaaggaacaagttcgattcttctagccgtcattcttggagcaatgatttcctttgatatgggaggacctgttaataaagtagcattcttatttggagctgcaatgattggagaaggaaattatgagatcatgggacctatcgcggccgccatctgtatccctccaatcggtatgggactcgcaacatttctgaagaaacgaaaatatgaagaagctgaacgagaaactggaaaagcctcctttacaatgggactgttcggcattactgaaggtgctattcccttcgcggcacaggacccaattcgagttattccgagcattatggcagggtcaattacgggatccgttattgcgatgatggggaatgtgggagatcgtgttgcgcatggtggaccaattgtagcggttctaggtgcaatcgataatgtattaatgtttttcctagccgttattgtaggggcattcgtaacagctattctcgttaatcttttgaaaaaagatgccgttgtagaggtagcaggactaggaatggaaataagtagtgaagaactagtagaggagcagcctgttcaaagtatgggagagactaaatcttctacaaccgaaatcacaaaacttacagatattacgaatgaaaggctcattgacattgaattaaaaggctcaaatcgtgacgatgtaattgatgagatgattgcgaaattagaaaaggaaggcgttattgattcaagcaagcaatttagagacgcaatcattagccgtgagaatgaaagttcgacagggatcggaatgaatattgccattccacatggaaaatcttccgctgtaagtgaaccacgcgtagtatttggattgaaacaagaaggaattgattggaacagcttagatggaacaaaggctcgattaatctttatgattgctgtcccgaaagagagcgaaggagatgctcacttaaaaattctccaaatgctttcacgtcaattgatggatgatcaatttagagaaaagcttttaacagttcaatcaacgaaagaagcttatcatctattagaacaaattaaataaacgtttaattaattatagagtgtggaccttataaaggttcgcgctttatttttttgacgaataaaggagtattttgaagtttgtcgaatgtttaaaattggaatgtgatttttatgattagggtggcgaaatgattgaattgaagaaaaagggagacttcattaatctttcaaagaagacttgtagagtacttcagcggacatcaacaaatggatctggcctacaaatggaagatgaaatggacggcaggatctaaatagttttcatacaaaagaaggagtagaacatgacaagaatatggtttaatcgatggtttacaacagttgcacattacatagaaatgattcgacagaaccatgacggaaaggtgttcgaagtatatggttcacacccgaatgaagatgccttgtatttacagtattgcgatcaagcgtttgtagaacctgatctaagtgggcatgcttacgttgagtattgtctgcagacttgtatcgataaggaaatcgatttgtttattcctcgtaaagaaaatgtcctcatctcaaggaacctttcgaaattccacagcattggcgtaaaagttctcgtaagtgacgcagaattgatggctcttatggacaataaagctgccatgtaccaatccattcttacgaaggaaaaagagctgcagaaatcaattgtgcctcttccagactatgtggttgtaaacaaagtggaagactttaaaaaagcgtatcattatcttcgagagaaaggtcatacggtttgtttcaagcctgtaatcggggaaggtgcaaatggtttccgagtgattaaagaaggacaggaaacgattgaagagcttcttacagaaggagtatcgagaagaatttcatttgagcatgcctgttccattttagctcaacaagattcgtttccagacttaatggtcttagagtacttagatgggtatgaatatagtatagactgccttgcgtatgatggagagttgcatcttgctattcctcgtaagaaagttgagggaagagtaagagaacttgagaacaatgaagagttactagaaattgcacgtgctattcacaaggaatataacatcgattacatctcaaacattcaagttaagttcagtgaagggattcccaagctccttgaaattaaccctaggatggcaggaggcttgaacattagttgcttatctggtgtaaacattccctacgaagcgattaaattattgcaaaatggggcccatccatctcttaatctaaagccagaaatgggtatacgcgccagccatatcgaaaaagaagttgtcctttcctaaatataaaggaggtagtctgatgagtattacattaatgaaaaagaatgctgggattgtattaaagaaaaaaaatctagatcaggttgtagccagagtagggcttgttctagatatcagtggatcaatgcgaaaactatacaaagaagggatcgttcaaaaagtagttgagcgtgttctcgccgttgcgagtcaatttgatgatgatggttcattagatgtgtgggtctatgataatgaatttagtcggttaaaacctgtaacagaatttgatttcgaaggatacgtagatcatcaaatactttcgaacgaactcgttcataaatttggtagaaacaatgaacctcaagtaatggaagacgttatcagtaaatacgttaaagaagacccatctaaagagcctgtgttcattgtatttattaatgatggaggctgtaaacgtggaattaagaaagctattgttgaatcctcagaccaacctcttttttggcaatttattggaataggagattcaaatttcgatgtgctagagaaattggatactatgacgggaaggttcatagataacgccaacttcttccatatagaagatattgaccggacaagtgatgaagtattgtacaataatcttctaaatgaatttccagattggttgaaagaagcacgagaaaagaatgttatacagtagcgttaacagaatcgacaaaatcttttcaatttattagagttgaccaggggttaaaggattcattttacctgaaaatatgttagttttaaatagaaagaatctgtttttgctgttgaaaacaatttttttgttgaaacatgaaactttctgaagttagggacgtattacagaataggcagctaactattaaatttaacacgcacaatatcataattactttaaatctactaacaggagtgaaacgatttgacaatttctttgcagaaaggtcaacgaattgacttaacaaaaggaaatgccggcttatcgaaaattatggttggtcttggttgggatccagtagagcaaaagaaaggtggccttctaggcggtctttttggaggcggaagcggcggcgctaacgttgactgtgatgcttcaatcttaatgcttgaagatgataagttaacttctaagaaagatttaatttattttggtaatttaaaaagcgcttgtggaagtatcaatcacacaggtgataacttaacgggggccggagacggtgatgatgaacaaatcatgattgatctcggacaagttccacaacgcattacgaagctcgtttttgttgttaatatttatgatgctgtaaaacgcaaacaggattttggtatgattcagaacgcgtttattcgcgtggtgaatcagtcaaatcaagaagagatgcttaaatttaatcttacagataactattctggtaagacaagcttattcgttgcagaaatctatcgccacggtagtgaatggaaatttgctgctattggaaatggaacgaacgatgctggcttaagcgatattgcaaaaaaatactaaactactaaaatattaaaggggctgactagcatggctgtatcattatctaaaggacaaaaagtagatttaacaaaaacaaatcctggactttcaaaagttatcgtaggacttggttgggacacgaacaaatacgatggtggaaatgactttgaccttgatgcgagtatcttcctattagatagcactggtaaatgttcttctgataaagattttgttttctataatcaaacagaaggcgggggcggttcggttgttcatactggcgataaccgtactggtgaaggtgcaggagatgacgagcaagtaaaagttcatcttcaagatgttccggctgaaattgagaaaatttcattcgtcattacgattcatgatgctgaagcacgtagtcagaatttcggtcaagtatcgaatgcatttgtacgcattcttaatgaagaatcaaatgaagagctcatccgttacgacctaggagaagatttctcaattgaaacggcgattattgtaggtgaactataccgtcatagcggcgagtggaaattctctgcagttggttcaggttatcaaggtggacttgctagaattgcaactgattttggtttgcaagtcggataaattcttctttttggcaagagggacgctccctcttgccattccaatataaacgcgaattgggggatcacattgggaattcaactatctaaaggacagagaattgatttaacaaaaacgaatccaggactcgttaaaggtctcattggcctaggttgggatacgaataaatatcaaggtggatctgactttgatttggatgcgtcggcatttttagttgatgcaaataatcgttgtcaggatgatttggatttcattttctataacaatttagaacacccaagtaaatccgtgattcatacaggtgataaccgtacaggtgaaggggatggagatgatgagcagctgatcgttgatttttccaaaatcccagctcatgttgataaaatcgggattaccgttacgattcacgatggtgaggggcggcatcagaacttcggacaagtatcgaacgcatttgttcgtcttgcggatgaatccactggagaagagctcttgcgctttgaccttggggaagacttctcaattgaaacggcagttgtcgtttgtgagctgtatcgccacggtagcgaatggaagttcaatgcaattggaagtgggttctcaggcggacttgcttcgctttgcaaaaattatggccttgaggtttaaggcttagctagttgacattaggaggaaacatcaagtggaaattttacaagaaattctaaacacatatgcctctttctttgattgggaaatgtggggagaagttttaacagaccctgtttcatggggacttattggtacattggttcttctggaaggtttgttatcagctgataacgcactcgttcttgccgttatggttaaacaccttccgccagagcaacgtagaaaagcgttaacgtatggcttaatcggtgcttatttcttccgattcctatttattggtatcggaatgtttctaattaaattctggtggatcaaagtatttggtgccgcataccttgcttggattgtcattcaacactttagaaataagggtggagaagaaggcacagagggtatgaaaaaagatacctggcttgttcgtacattcgggttgttctgggctactgtcatttcagtagaactaatggatatcgcgttctctgctgatagcatcttagctgcactagctatttcagaacaagtatgggtactgttacttggaggaatgatcggtattcttcttatgagaacagtagctggcgttttccttaaattgatcgaaagagtacctgaaatggaaaatacagcgtttgtattgattgcaattattgccctgaagatgttcttgagtgtcttccatatcgaagttcctcacgtagcattctttggtatcatcgtacttgcgttccttggaacatttgttgttcattatattaataatcgaaatcgtccttatgcagaagaaacagcttcagcaaaagagaacgaatagcagaaagaggaggagacgctggtgctctccttcttttttatacagttaaatctgtctttgtaaataagaagtgattatagggggtgaagaagctggaatattttcaatacctatcagaaatacagaaagagcatatcttctttaagaagccagctccaattagtaaacatgtagaacgagaacagctagcttatgcgattggagctgctttgtatatgcctgcaatacgaaaagatattgcaacgatcgtgattcaagaaaagtataaagaagtggttacaattgttcttgatcttgaagatgcgattggagacaaccgtgtagatgaggcgatcgatcaaacggtggagcatctagcagccattgaagaagcgatggtttacgggacactaacttgggagagcttacccctattatttattcgcgttcgctctgccagtcaactaaaggaagtggcaagaaaattagacacttccattcattatttaacaggatttgtgtttcctaaattctccacaagtaatggtagagattacttacatactttacgagatgtggaaatgaccgcgggcacacgattatacggcatgccaatattagagtctccagaacttttctataaggaaacacgctacacggagtttcactctctttcatcattgttccaagaatatgaatcttccatactaaatgtacgtatcggggccacagatctttgtggactttatggaatacgtcgaagtgcacagtcaacgatttatgatatttccgtaatgagagattttatagcagatgtggtcaactattttgggagaagctttgtcgtttctggtcctgtttgggagtatttcaataatcgacaggaattaagagagcatggagatcagaacgtatctgattataatactggactattgaatgaggcgttgcttgatttaaccaatggtttgattgggaagacggttattcatccttcgcaccttaccgtggtgcaaagcgtgaatgttgtatcgaaagaagattaccttgatgcgcttagtattcttgaaaatgcaaacggagaaataggcgttcttaaaagtaactcgcaaaacaaaatgaatgagattaagccgcatcataaatgggcagtaaaagttattatgaaatcaacgatctacggggtgtatcatgacaagtataatttcttcaaaatgctcaccgaaacaataccattttccgatcctgtcggatatgagcgttaatctagaagtcacgcaaaatgcattgaacataccaatcaatgaatttttcaatatggcagcacgcatcaataaaaaacgaggctttctttttgttagtaagatactagggaagcatcttccagtcaatccctataagccattgcttgcttcaggacttcttgcttctacttattatgaacgagttacaggtcatgctgttgatgatctttcagacattcgaaaggggtttttaagtaatcagaatgaagagattgagagagcttatgaactcttgaaaatgaatcctcttacccttcaagaacctccgattgtaatcggatttgctgaaacggcaactgcgcttggacatgcagtgtttgattgctttcaacaaggctattatattcacacaacacgtgagaatgtaggcgatctcgtaccagagttcaactttaaagaagaacactctcatgcagtagaccaacgctgttatgccaatcgctcgattcttgagaaacaacatccaattttattagtggatgatgaaattacgacgggaaaaacgtgtctcaacattattcgcgagcttcacgctaaataccctcgtcatcattatgccgttctttctttattagattggcgatcagaaaaacatattgaacactatcagtcgttggaaaaagagcttggcataacgatccgcgttgagtcacttcttaaaggaacaatttcatttgaagggaatcctctagaacgtccgatcaatgattttcattccaatgaagatccgagtaaggaaacggttatcaatcgaataaacctggcatctgagtttcagtctttacctgagagtggctatctttcttatagtggtaggtttggcattaacgaatcggataaagcaaagatagaggagtcctgtcgaagtgcatcgaagcatttaaacaaagagcgacttgatggaaaaacgttatgtcttgggaccggagagtttatgtacattcctatgaagattgcatcttatttggatggaaacgtctcctatcattcaacgacgagaagtccaatccaaccggttaaactagaccattatgcgattactaaagggttcacttttcaaaatccagaagatcactctgttcaacattatgtgtataacattccaaaaggcgaatataaccaggtctttgttttctttgaaaaggatgtttcagatgaagatgttatggagatcgctgcactactaaaagaaagagaaatcaaaacgcttcatatcgtgacgtgttcgtgaagaaaggattggataaattgactgcacagattactagaatggggagctaccctgatcaagatgtcacttttcttttgaaagatttgtcagaaatcaagatggaaagaagtacagatgagcgagaacaggcgattcagcaagggactcattattctgaaatgctaccaattgaatataagcctacagatgaatacatgaagttgttttacgcttcacttgatgaaacgaaacataaagttgccgtagccgtaagtgtggttgctgaacaaattgtagcgaagagaggttttcaaaccgtactcgtttctttagcccgagcaggaacgccaatcggtgttttaatcaaacggtatctttcttataaatacgattgtaattttccccattacagcatttcgatcattcgcgatagagggattgatgaggaagcacttcgatatattttgaacgaacatcccggttattcgatctcatttattgatggatggacaggtaagggagccattacaaatgaattaacaaagtcagttgctgaattcaatgagatgactggagagaatttatcaagtgagttagctgttttagctgatcctggtgactgctcgtctctttttggaacgcgtgaagattttcttattccaagtgcttgtttaaattccactgtttcaggacttgttagtcgtaccgtgttaaataagcgctggatccatgaaggtgatttccatggagcgaagtactactcagagcttgcatcagaagatgtatcaaatttgtatgtcgatacaatctacagtcagtttcctttcatagataacgaggtgaaaagcggattagaagcgattgccaaacaaaatcgggagcctgagtggaaaggactggaatcgattgaaaatatccagcgtgattttggcatagcgaatagtcacctcataaaaccaggcgttggggaaacaacgagggtcctattgcgacgcgttccatggaaaatcctcgttcatccgaatgctgaaatgaaccttgaacatattttgattttggcgagagatcgtggcgttccaatagaagagtattcaaatatgtcttattcttgctgcggacttattaagccgatggagaaagaataatgagggcattcgcaagcgatttagatcgtaccttaatttattcacatcgaatgattgaaccaggcactagcaatgacgtgcagctgattgaaacgcttgaaggaagggaaatttcttatatttccaattattcgcgtgaattattacagcaagtaaacaacgaaatttattttatacctgttacgacgagaacgattgaacaatatcaacgcataacgctgtttcaatcagccatccaaccagaatatgctgtgacgagtaacggcggacatattttaaaaaatggagaagtagtaaaggattggtcagagcgcctaaaaacgtctctagaagagtgtttatctctggatgtttttatacgtcagctggagagtttcattattgggaactgggtagagcgaattcgtcaggcggataatctcttcgtttatctcatcattcgacgtgatcaagtttcgagagaagagctttcatcactgtttgaatgggcacgtgaacaaggttggcagcccagtctacaggggaggaagctgtactttgttccaaacccagtaaacaagtggagagctgtcgagtatttgaagaatgagcttggactttcttacatctatacagcaggagactctttgctagactatgaacttattaagtatggtgactgtgggtatgttccctcacacggtgaggttctagaaagctatccgaatttacgtaaaacagaagcacgtggcatggaagcctcagacgaaatcctatcttccatcacggaagacttatctttaaacaaactaccttcaaagcaaggttaagcatggaagaaatagtatgttatgctgaaaggtagaaaatgttatattgagtgatagaaagcgacaattttaaaataaaagaacggcttatgttttaagacaactattcattgtatgaatgtaaggaggcttgatcataatagaccatcctccggaaaggaatgagaaagcggggagaacatcatgagtcactatgaccaaattctgattaagaaagcatcgcttgatgatgagggtttaaaagaacggttatttcagtcgtttccagatcgtgattcctatgagaatggtaaagaactacacgttacgcaaatagtagggagattccttggaagctactatgatgagaatgactatttcctacaactgcacgaactgtacaagtcaaatcaaattcatgtgttaagcgaagaattgaataaagtgataagccctgagcgacttcaggcgatacaatctatccatgcgattaaccaaaaagaaaacggactctctgcaaatcggttcgttgcattcctagaaggtgccaagcttattccttctcatcaaaatccatctttacatcgccatatgcgaaaatctttaatagcgattcttgagctttttgagaagcagcatcagggtggatttagtcatcccgaattccgcagagttctcgttgatttaatgaaatggacatggaatcatctcgatccgtggctagcagaaacacagtttgaaatgaaaatgcccggtgttgtttggtatggagaagcaacaacaagtcagcaatacttcttactttatttagttgagcttggatgcgatgtgctttattttcatcctgaaggcattgattcgtttcaggaacttgatccgaatggagaattaatggagaagcgccaactacctgcaaccgctaagcttgaaccttttccgattgaaaagccggaaagacgttctactgtcgcctatcgagcaacgaaagaaatggatacggtccttcatcatgaagggtcccaattgtttaaaccatggcaattaagaagttatgctccaaagtctgtcacattaaaaactacctatgatgaactgttcttaattgcaaaggaaaaagcattcattcggccaaatttcaaagtagaaaacggaaccgttcatattccttcgttattcgccaaggttatgggagtttccgagaataagaaggaatattggaacagacttcaagatataagcgaaacgaaatcaactgtcatgattcgtcaattcccttttacccaggaaacgagagccaatcagaagtttcattatcagcatgccttgaatcaagagggtgtactggatccggaaatcatgatgcagggtaactggtggcaatataagcatttgccaaatgaaacgcaaaaggcaattggacaggcgatttcgagaatgtgcagcaaccctaagctgcttcctgaaggcaatgagtcagaagaagagataaagctttaccttttctcacaaacaaccaaagttcctgaagagtttgttcaattaatgcaaacgtttgattactctcaggaagtgccaaaagttgttttatataatacagaaatgaacggtacgctttctcgatccgatgcagctgttttacatctgctgaatgaatttggcattgatattattctttataatccacctgggcaccaatgtattgagcgctttattgatgcaaatcaatttgatgttcattggctagaagaaatggcatatcgtcaggattttaaagaaccttccgtttttcgtaagttgtttaaatcaattaaactataatcaagggagtgagtgatcgtccatgacgaatgaaacaggtttaacaacgcttgataaaaatgaagagatcacagaagcaaaggcggaagatgtacgtctaaaacttcgtgaggagcaagaggttcagaagcttgcaggtgaaattgatgtaagagatcaaatggctttacttgaattcggtaaagaacctgctgttgagatttcgaagttctccgataaaattttatcgatgatgcgcacaacgagcgttactgattctggagaaatgctgaagcagctcgggaaaatcatggatcgatttgataaaaaggactttgaagagccgaaaacaggctttctttctaaattcttcaaaaaaggcaatgatatggttgagaagatttttggcaaatatcaaacgcttggtggagaaattgaaaaagtacatgttgaaatttcgaaatacaaagatgaaatgtcacgttcaacaggtacactagatgaaatgtatcagcataatctaaactattatgtagaactggagaaatacgttgttgcagggcagattaaacttgaagagcttcaagataaagttcctgctattcaacagaaagttagcgctggtgatcaaatggcgcaaatggaactggatacgttgaataatgcgattcaaacgcttgaggaacgcatttatgatcttgaaatggcaagaatggttgccattcaaacagctccacaaattcgtcttctacaacgaggaaatacaaagttaatcggaaaaatcaattcagccttcattattaccatcccggttttcaaaaatggtgtcattcaagctgtaacagcgaagcgtcaaaagcttgttgctgactctatgaatgaattggatcgtcgtacaaatgaaatgttgaaaaacaatgcacaaaatatctcgaatcaaagtgttgagattgcgaaattgtcaggaagaccaagtgtaaagattgaaacgattgaggaatcctggaacacaatcgtaaaagggatggaagaaacgcgtgcgatagaggacgagaataaacgcctacgagatgaaggtacgaagcgtattttagaacttcaagataatatgaagaagatcgggaataattcaggtcgatcctaaacaaaaaggaaaggggagcggtttcgctcccctttccttttcttagtttttcagatttcctttacgatcctggtattcgcctttcgacttatcgcgctttccttcttcttgaaggcgatggtcgttctttgcgttcccaacctgatcttttacttcaccttttgttttggaaacagcgccttttactttgtcacttaaccctttattgttactcataagataaaccgctcctttcctgtttctataaaagaaaataccccatgaagagagttgccaaacaggcattttcttcatagggtgaaaaatagttatttagttggatttttcttttggcttatccgtccaaatatctgactttaagcctttaattgtatcggcataaaactggggatctttccctgctttgcgctgatctcgataatctttaagagcaacaaaggcaactttaccgatgatcgagataacgattaggttaagaagcgccataagtcccatagatagatcggccatgccccatacaattccaaatccggcctttgcaccgaacattaccatagcaagtacggcgagtctgtaaataagaagggcggttttgcttgatttaataaattcaatattcgtttcaccataatagtagttaccaataatggaactaaaagcgaatagaagaacggcgacggcaacgaagattcctgcaccgctacctagatgctggttcatggcttcctgtgtaagttggacaccgtctaactttgagtcaacataaccgtccgacataagaatcataaaggccgttgctgtcgcgataagaagcgtatctacgaacacaccaagcgcctgaataagaccctgttttactgggtgagagacgtctgcagtagccgctgcgtttggcgcactacccataccagcttcgttggagaaaagaccacgcttaattcctagaagcattgcagccccaactcctcctccagttacttctttaaaaccaaaagcgtgctggaaaataagagcaatcatagcggggatttcagtaaagtttacgattagaacaaaacctgcaacaatgacgtaaatcccagccatgattggaacaatgatctgtgaaacgacagcaattcggcggacacccccgaaaatgataatggcagtagcgactgtcaagatagcgcctaatgcccaacgattaacgtcgaaggagttttcaaaagcaagtgcaatcgtatttgattgaacggagttgaaaacaagtccgaaactgaacgtaattaagacagcgaaaatgatacctaaccagcgagcatttaacgcgcgctgcatatagtaagcaggtccgcctcggaagtcatctccatcacgaactttataaatttgagcaagcgtactttcgacaaatccactagctgcaccaagtagggcaatgacccacatccagaaaacagcaccgggaccaccaatactaacagcagaagcaacgccggcaagattacctgttccaacacgagatgcggtactaataaagaaagcttgtaaactcgagactgagttctttcttcctttcatcgtgtccttttctgatagcacatgaaacatttcaccaaacaggcgaaattgaacgaatcgtgaacgaatcgtgaaataaagaccgacaccaatgagaataacaattaaaatgttcgaccaaatgagttcattaccagcatcaacaatcgtttttagaatatccatatgtaagtcccttctataaaaagatttaggaaagaggaatggaagatattatcacacttcccttatttgttcagaatctaacgcgggctaggaatctttttttaaaataatggaaaaaataccgtattttctgataataacaacaatacgttagaatctgtcgcacaaatatccattatacatgttctttgataaagtagtgatacataatgttagataatctgacattataaaaattggtatgtaacctaaaatgattttagtaaaatcattgaaagtgagtattaacaagatacttctcccccattaccttctggaagtgaaaggaagtctcctgccattgtgataattcatggcctcttagtgacacaacggcctggcaacgagagcaaatgaaaaaagatatgcaaatcattgacggttttcaaggatggttacttcgtttgattagagctgataaaaagctagataatatgaatcataaattgacaaagaaaattaaatgcacaatgctcctgtcattcgctataatcgtcaaaagatagacgccaaaaggaaccgggaacacgaacattttgatcttcgtaattattataaaaaaattgactgccccgttattgttattacttgaacgaaagatgtggaggtaaagagcgagcaggcaaaagatgtgtgtaacctagtacaaggagcgtgtgaaagctatattcttccaggcgtaacgcacttattgcgtaaaaccgccgttccagatcgattctcaagttacaaaaatcaagtgaaacggccgacttgattttgaaataaagcaattggtatcgagctggttacagaagctatagaagctagaagagaggtaagcatgtctttcttaaattagattgttccacttactttctgcaaggaaggattgttcgctttattcctatgcaacagagtggtagaatgaagatggaaggtattaaattcagctctgcccgggagggatttcaatgatcgagcaaccccaaagtgttactgtcatctcgaatcaacgacaagtccaattacgtgtagaacgccttgcgattcatcacagaatgaaaattcttgaagcagagaaggtagacggaagtaaattttatcttttcttctataaagatgattttattacagggaaaacagccgaaatgaagagtggttctctcgttgagaaagctttccaaaatggcatcgtacttcaagcttcacatccgcttattgatcactttttgtctaatcgaacgcttctcctcaaatccactaagcaagtctttcaatctgtccaaaagcattacactcctcaagagacagcctttattttttcttactttgactcatttctctcgaatgatacgattatcaaattaatgcgaaagcacttctacgaataccgacggaacgggcaattgcgcttagcgtttcaaattctagctacaatgctacattttgatccaacaaataagtgggcacttgagcttgcgcgcaagttagaataccaaacaataagaaatatatatgagggaaattacagtgagcttgtagaggcagatccactgtttgctgaaatcaaagcttacgacgatttgaagttaaatcacacctctcttgaaacgatcttttgtaaagaaaaacgtatgtttgaattatccgcattgcgactccatctttatctccagtctccttgtgaggaagaattggatccacaatcccttatccatgtctcactctctgaatctgagagagcccgtctgctttggttaatgtatgctgaagcgcctcaccacttacaactcaggaaaaatgcttttgaagcgctcatgtatttgaataaaacaagcgaagcgattcatttattatccgaaaaacagagggcgatcttacaaagcgaatatgaacttctactaaaagcctttcaagatgaaagcatctccatggcaactattgatttcctttctctacaaaatttacttggacttaaagaaaatcgaccttacctagatggtttgcttcatgcgcttattccaagaatgctccatgaattcggtttaagctacgtctatagctgggtgaagccttttattgagaaaaacaaggacctctcgatactatcaacagtgcaaacgatggtcgatattcaggatgatccagataagcaatttcaacttggaaaactttatcacaaaatgaagcaatatgatgaagcgatcacctgcttcgattgggaaatggagcttcatccaacagacccaactccagtgcaatggttaacgaaagtttaccgtgagatgggtaaggtagaagaatccaatacgtatatgtcgatctattcacagatgcaaagaatttcacagcaatagcgcaggcctaagccttgcgctatttttttctttttctcaatggtttaaataatcgaagggatttatggggatctgatttcgttattatttgatatatattagcaggttcatataaactaagtgtcattaagattattttaagcttgtcaggagcgaagtatggaaaatcaatcgagttatgcgtacgacattatacaagtgtgtctattggcaggaaaggtcatgctacaaaacggtggagagacgtatcgagtagaagatacgatgacgcgaatagcggacgcttacggtgcttctcattcgaatagttacgtaacaccaacgggtattattttttcaattgaaggtcctgaaccttccaaaacgcagttaatccgcatatcagatcggacgactgatctcgataaggtgacaaaagtaaatagtatttccagacggataagtagcggcgatttatctattcaagaagcatacaatgagctttatcgtcttgataagatgaccgaacggtatacctttccgaaacaattcattgctgccgcggttgccagcggttgtttcttaattatgttcgaaggtcagtggaatgattttgtgcctgccgttcttgctggcggaggtggcttctatagtgtaaccctatttaatcgtctcgtacccattaagttttttgctgaatttcttgcttcgttcgtaattggtctccttgctgttctatttgtttcgatcggacttggtgaacaactcgataaaattattattggttcggttatgccgcttgttccgggtttgttaattacgaacgctgtcagggatttgatggctggacatcttatttccgggttatcaaaaggagcagaagcttttttaacagcttttgcaatcggagccggtattgcgcttgtcgtatcatttttgtagaaaggaagtaaggaaatgacatttgttgctcagattgtaacgagctttgtggcaagcgcagcttttggcttgttgtttaatgctccgaaatcctccctaataaaaggtgggtttgtcggcatgtgcggttggatgatttattatgttatggaagcgtcaggaatcgatgtagtcgttgcaacggtgaccgcttctttctttattgctgtgattagtcaggtttttgcaaaaatgtatcggacacctgttattatttttagcgtagcgggaattattccgcttgttcctggtggattagcgtatgatgcgatgcggaattttgtccaaaatgactataacaatgccattaacctcgcagcaaaagcttttatgatttcaggttctattgcagtcggattagtattctcagaagtgattaaccagatcatccgtcattcgacacttacaagacgtcaaaagcattgaaaaaataggtcgtaatccttttgcgtaatagccagtccctatgataacgtttaagcggatgactctgtcgaacggtgtcaaataatgttagtacctggggaggatcaacgatgaaaacctatcccaatctcggattgttaacaattcgtttggtcgtaggtgtgcttttttttgttcatggttttttaaagttttctggaggcatcgaaaacacgatagccttttttgaaacaattgggattgctggttttcttgcttatgttgttgctgtcattgaattaactggaggagttctcatgatttttggcataggaacacgtaccattagtgtgctgttttctatgattctaatcggcgctcttcttacagtaaaaaggtcaacgggtatgcttgggggctatgagttagatatcgcttttctagcgatgtcagtctcgctttttttaagcggaggcggtccttatagcctttccaactgcctggtcaggttgttaccatttgaccaggagtcggaatcgaaggattaaagaggaagtgagtgagtggctaaacctaaaaagaagttaaaacgaagtgcaagatggtttttcttaattgtaggtattgtgtttgtccttttaattattagcatgcgattcaagccatttgctgatacgaaaggctttcaattagaaaatcaacctattctaggagaagaaacggctccggtagaattggtggcttttggtgactatcgatgtccttcctgtcaatcatttaatgattctttctttccattgattcaagaagaactgattgctacggggaaagttaaattttactttgttcagcacccatttgtagatgaggattcaactaaagcagctgagtttgctgaagtggtttatcaagagcttggtaacgatgttttctggcaatttcaccacgttgtctatgatcagcttcaggtagataaaaacaaaccaactttgtcgtttttaaccgaaactcttggtggtttggtgagcgaggaagaaacagataaggttgttactgcatataaaagtggagccggtaaaaaatcaatagaggccgaccttgcttatgcaaataaaaagaatgtttctaaatcgtttaccttactggtagatggaaagcgttttgagggaagtagtttatcagaattaaataaaatggttgaggaatcaacgaatgaataaacagaaaggcgtcttcaggacgtctttttttgtatgatcctgttaatcaaacgtttgtttaaagtaagatttgttaattaaacgtttgattaagaaacagtattgactttcattgggagagcatgaagaatagagaggtacaattgaataaatatggaaaaggtgtgctgaatccagtacataatagggaaattggtgtaaatccaatgcggtcccgccactgtaagaagtataaacgatgcgttattccacttatcaatgatagggaaggagtattcgttctaagaagcttcaagtcaggagacctgccttttctaaagcactgattgacctacggatgataggggggtgtatcgagaaggctatatgatgcctattcgttatgcatgctcttatgttaagggtatgcattttttattgtttggaaaaggagagaggatatgaaaaagacagtaagcgaatcaagagtctataagagcagtcgtatttttccaccggacttgaacagtcacggaaccttatttggagggaaattacttgccgatatggatatgttagcatcaatcgcagcaacaaggcattctcgtctagaatgcgtcacggtatcgatggatacagttgagtttttgcatcctattaccgaagaagattcgattcattatgaagcatttgtcatttggacaggaaaaagttctatggaagtttttgtgaaagtaaccgctgaacatttattgacaggtgcaaatcgtattgcagctacgtgctttatttcgtttgttgctttgcttgaaggaaagccgatgcaagtacctggaatcgaaccagaaacagaaggggagaggcaacttaatgtgctggcgcgaaaacgagctcaaaaaagattggaccgtaaagtaacaagtaagaacttagcagaaattttaaccatgttataacaaaaaggggggggagcggagttatccgtctctcctttcttacgtttccatcctaattacttggaatgagaaactttttttgaaaacgaagttaggaaaagatagttgagtggtataggagtgagagtgcaacgaaataaccaaaggagacgaccaatgtggattaaacatgatttttttaagtatattacaggtataattctactattaatttgttttttctttttaacggagttagatttagtgaaaccagtaaaaacaattatcggtacacttttttatcctgtgctcattgctggatttttgtactatgccattaagccggttgttaagttaataaagaaaattccatatataccggatcttgctgccatattaatcgtgtttttagcgattgcaggaatcctctacacaggttttacttttctagcaagtccaattcaaaatcaggtatctgagttttcaaaggagttacctgagaaattgaaagaatcagcaaaagaagcagagaaaatgatggagaagaatgatatggagatgctttccctcgagaatctccgccaaaaagcaacgggctatttaggcaatttaacacaaaatcttggtgatcatattatgcaggttgtgagtgcactaacaagtgccacaacggttcttgtgattgtgccttttgttctgttctatttccttaaggatgatcacaaattaaagccttttttgttaaagataattccgaataaacatcatggggaaggggaaaaggtgcttcgtaacattgataaaacgttatctgcttatattaccgggcaaatcattgtagctgttgtagatggtgttttaatatacgttgcttacttaattattggtctgccttatgcactgatgcttgccctatttgttatgataacagcagtcgtgcctttcttcgggccaatcattggtgtgattcctgcccttgtggtcgctttaacacaagaaccaattttagcattgtatgtcattattgctatgatcgttgtgcaacaattagaaggaaacctggtagcccctgtggtacttggcaaaaggttaaacatccatcctttaacgattattttactactcattgtagcagcagctttatatggctttattggaatgctgattgctatcccactttattcagtcattaaagtaatcgttaagaatttatatgagttctatcgtatacggcatcgatctgaattaactgaataaagataaactcccctacttcactaattgaataggggagtttattgtttagtgcctaaaacctgcaaaactgtagcaatttctcgttataaataaatacgtgccagacgttcataggatttcttccgttctttaggatcgtgtaagtttgtcagtaccatgaattcttctgtctcataaagctcggccaagtcatcgattttctttttaactgtagacggagaaccaataatcattcgctttcggtttgtctcgatcctttctttttcggtagctgtatatcgatatttccttgcttcttcaggggaggggatacggctatcgaggcctttttcaactcgtaaaagccagaggtcctggcttttagcaagttcctcagcatgttcatctgtttttccacacacaacaaaaagcgctatgattgcagaaggggatgaactatagtaggttggtttgaacaattcgtagtatgtttttagcgtattttctccgcgatctggcttaatgaagtgcccaaaaacatagccaattcctaactcggctgctttttttgcactattttctcccatgccgagaagccagagagaaggcggggtgttcgtttgtggtgctgctttgataccagcatattcgtgttcactaggcatggaatcagttaaatagtgagaaagctcttttaactgacgaggaaactcatttaagcttttgtttacgccatctgttaaagcgagtcgcgtttttgctgtgcctccaggagaacgtcctacaccaaggtcaattcgacctgggtgcagggcttctaactgacgaaagttttcggctactttaaaaggactgtattgtgggagtaagacacctccagaacctactttaattcggttcgttgaggccgcgatatgtgccatcataatctcaggagctgtgctagctagcccttttgtactgtggtgttctgcaaaccagtatcgtttatatcctaaatcttctgctaaaatagcaaggtttcgtgtattttcaagggttgtatatgaatcgcttcctgagggaatgggagcttgatcaagaatacttaagtttatcaatcgtcctgcatctccttctattctctttgttagtataagcaatctcattatatcctaacgctttgcataaggatggtatagtgatacgacttcttcttgcgaacatattgtgaaatattgagcaaagtgattgcgactttagaaaagatgacgtatactaagaatatagaaattgtgaaattcatcacatacttactattttatatgtgaagttattcacaatttaataaggaggagttttgatgaaagtagcagttgttggatgtacacatgccggaacagcggcagttacaaatatagcaagacgttatccagaagctagtattactgtttatgagcgtaatgataatgtatccttcttatcatgtggaattgctctatatgtaggtggaattgtaaaggatccgcaggggttattctactcatctcctgaaaaattagaagagatgggcgtaacgatgaaaatgaagcacgaagtattgcaaatcgattctaaaaataaccgtattcgcattaaaaatttaaaaacaaccgaagtgtttgaagatgattacgataaactagtgatggcgactggttcatggccaatcgtaccgccaattgagggaattcagcttcataatatccttttatctaaaaattacacccaagcaaacacaattattgaaaaagcgaaaggtgctaagcgcgtaactgttattggtgcaggctatattggagttgaattagtagaggcttttcagaaatatggaaaagaagtaacgctaattgatggggaggatcgtattttaagtaagtaccttgatcctgaattcacaaatgttattgaagaagattttagagagcgggggataaagcttgctcttaatgaaacggtaactcgcttcgaaggtaaagagaccgtctctaaagtggtaacgactcaaggtgaatatgaaacagatcttgttatcctttcagtaggctttcgtccaaatacagatcttcttaaagggcaggtagatatgatgccaaacggtgccatcattgttgatgaatatatgagaacgagtcaacacaagatttttgctgcaggcgatagctgtgcgattcgatacaatccaactggcgaaaatgcttatattcctttagccacaaatgcggttcgaatgggaacgctcgttggacagaacattatggagcccacaatcagatatataggtactcaagggacatctggcttgcatctttttgattatagtatggcttctactggactaactgagaaggcggctcttcgtgcggagaagaatgtgaaaacaatcacaatcgaggaaaataaccggccagagtttatgccagattatgaagtaattacgttaaaagttgtctatgaagaagagagcagaaaaattttaggtgcacaagtgatctctaaagctgatgtgacgcaatcgattaatacactatctgtttgcattcaaaacagcatgacaattgatgaattaggatacattgatttctttttccagccacactttaataaaccgtggaattttcttaatcaggccggtctccaggcggctttataattgtttgtccgctggcatcactatgccagcggattgcttgtatagtctgccgatacttgcatcctaaccttacgatagccataataaaggatagaaaatgtgtaggagagagtgaagaagtattgactaataaaatttcggatataaatgtggaccaaaagcatacgcgtatttacctcattcgccacggtgaaagtgaatggaatgcagcaggagatctctattgtgggcgaacggatattgggctttctaaagaaggcgtaactcaagcgaagaatgcaggcgactttcttagttcagtggcatttgatcgagcatacgcttccccattgattcgagcacgtgatacagctgaacttattttaggaaaacggaatttaccgattcaactagacgaacggatttatgaaggagattttggcgagtgggaaggacgatccaaagcagcgtttataaaagaagatcctgaatcatgggataattggatggctaatccctgggaaacaagagctggcagaactggtgaaaccgcgcgagaaatgtatgagagagcatcggctttctttaaggaagttagtgacaaacacccaggcgaaaccgtactcgttgtcgctcataacaacaccattcgattctttcttgcaggcatattaggaatgcctttttcaaactatcgtcgcatctttcaagataatacaggaatcaatattctcgacgtggatagcgatgatatcctcatacgcagtctgaatatcaatgctcatctaaataattgaagaaaaaaagcgatgcagctgcatcgctttttttctaatgagaaagttctttgtatgattttttgacaatgctacttaaagcaatgagggcaatgacgttcggtaataccataaatgcgttaaatgtgtcggcaagttgccaaacgaacggaacgttcaagacagtcccgaggacaatgaagataagcacagcggcacgataatatggcacacttttttcaccaaataaatagttcacgtttgtttcaccaaagtaagcccatcctaaaatcgttgtaaagctaaagaacaataaactaaaagcaataaagtagacaccaaagccaccaagcccactagtaaaactagcctgagttaattcgatgccagttaaattggaacttgcgccgtccgttacgagaataacaagggctgtaacggtacaaataatcacggtatcgatgagaacaccgaccatggccacaaatccttgctgcgcaggatgtttcacttctgccacagcgtgagcgtgaggtgttgatcccatacccgcttcattggagaatagccctcttgcaaccccatatcgaatggcttctttaatagaagcaccaagcactccgcctccagcagattcaggagtgaaagctgactcaacgataagtgatagcgctggaagtacttgatcgaaatgtaagacaagaatgataagagccccaatgatgtagagtaaagccataattggaacaacatttcctgcaaatcgggcgatacgattgataccaccgaatagaattaaactaatcaaaattgcgacaccgaaaccgatcacaagaggtggaatttgaaaggcggtttgaaacgcatctgctattgaattggattgcaccatattcccgacaaatccaagcgcacaaataatggcgatggcaaagaaagcggctagttttttactacctagcccgtcacggatatagtaagcaggcccacctttaacaactccgttttctttgacgcgaaacttctgagctagcacagcttccgcaaagatcgtggccataccaagaaaggaagagatccacatccaaaaaatagctcctggtccacctgctgcaatagcagtagcgaccccggctaagtttcctgttcctacttgagcggcaatggctgttgagagggcctggtaagatgaaatgccgttttgtttctttttcgagaaaagggggccaaatgtttgacgaaacccttcttttaaacctgtaaactggataaatccaagacgtatcgtgaagaatagcccagttccaagaagaagggaaatcataataggtccccacagaatctcatttattgcttctattgcttgcactgttgtcaactcgctctcatgaaaaaataagattctccaatgatagcttattttttcactatacttcaacccattaaatcactatggtaaccatttccttagtaatttgtttgtgattgaagacgtttttctgttttcttctgtttttggatccattgataaaagaacaaaattccaataacaaagatgccgagaatcatgtaaagatttgcatatcctaaagtggttacgataatcccaagtataaacgatccggttgcaattcccgtatcgaaaaaggtgaaaaacgtagcagtggcgtgtgcacttcttgattcaggggctgcttgtatggctagcgtctgaaaacttggaacaattgagccataacctaacccgattaacgcaccagcaagaagtaacatccatgcctcggttgttaaactgagtgtaacgagaccgagcgcaaatagaacaaatgcaggtaggataaccgtattcggtcctcttacgtcaaacattcttccggtgaaaggtctggagatgagcatcgctacagcaaatacggcgaaaaagaatcctgcatcttcaagaagaccaattgatttcgcataaagcgatataaatgaaataacgctcgcatatgagaatgcgacaaagagtccaacgattgcaataggaaatgattttttctcaaaaagatcattgaacgttaatttatgactcggagcgggttcactattttcaattactttcaccccgagtgtacagagaacgccaatcgtcataatcccactaaggacaaggaaaattgtcatatatgaaacatattgaagaagcgtaagtgcgataaatggccctgttacaactgctagattcatagacatcgcaaagtaaccaaggccttctccacgtcgttcacgtggaattgtgtctgctgcaattccaccagcagcggttgttacaatactaaaccaaaccccatgaaagaagcgaagaagaagtaacgcaacatagttatccactaatgggtataaaaaggaggctgctgcaaaaaaagctgcgcttgtaacaagcattttctttttcccaaaccgatcaattaatctaccagaaaaaggccgaacaataatggcagataacaagaagattgtaatgataagaccagcttcagattcactcccaccaatttcttctgttacgtaaattggaagtagtgttaatagcgcatagaaaacaatgaaaataaatagattacttatggagatgtttaaaaagcttttggtccaaatcggttgtttattagacatgaggcccctctcctttctttgctccaatttgttttaaaagataataaaaatgagcctgctcttcagatgataattgcgagagaagtgactcttccaatttttgaatggattctttaatgacaggtaagaggtcttctgcttcctgcgtgagacgaacaatccgttcccgtttatcagacccttctgttcgagtaatccagttgcttttctccatccgcacgagcgtgcgtgtcgttgtaggagcttcaacatttaaatatttccaaatgtctgtctgtttcattggaccaaattgatcaaggcagtacaaaatggtccattgagaactatagaggtgatactgctttagcaattcgttcacttcttttgtgataaagcgaacttgttgatgcaagttgtgaaaaatatcgctcgttgaaatcatacttcctccactgaacattcattttatttacctgggtaaataatcacataagatacagtttatcgacattcttacctattgtaaagaaaaggagcttaagaaaaaataaaaaagccattatcggcttttttaatcaagatcgtcttttagatttgttaacggttgatccgctggaccttcaagtacatccccatcaatactgaaacgagatccatgacaggggcaatcccatgtacggtcgtcgtcattccacttcacttcacagtacatatgagtacatgttgtatcaacaacatggaggtctccttcaggacctttataggcaccagcttttttcccatttactcgaacaatcgcagcttcatcattaccaagttctgaaatttcttttgtaaacgataatttgcctttgataaattcactagccacatttgcattttgcacaagaaatgttttgatgcttgggtctgcatgaaagcgtgatggagagaacagatcaaaatagggattttttttatctaaaaggtagtctcggaatagtaaggctgctgccgtgccgttcgtcattccccacttatgaaagccggttgcaatcaggatgtttggctcgctttttgtgaccggacctatgtacggaagtttatcaagtgtaaagaggtcttgtgctgaccatctatttactatttcagacaagccaaacgtttcttcaccaaagaatttcaaggcttgatagtgatctgtcacttgatgtccttgacctgccttgtgactttcacctccaaacaaaacaatcttttctccattcatttgatagcttctaagggaacgctttggtatatcggcacttagatacatgccacctggataggtttgttttgtttttgctgcaatcacataggatctttctgcatacatcctagagaaataaagagccttgccatcataaaatggaaaatgcgtacaagcaatgactgtttggcatgagatttttgctccattctttgtcactacaataggatttaatcctttttccacattgactgccacggtttgttcgtatatctgaccctgctgttctttaatcttctgtacaagaggagaaaggtaagctaccggattgaagtgagcctgattcttcattacaatcgcagctttaattgaaagatcaattgggaggtgattttgaaattcaccttggattcctaatttgtggtaagcgttcatttcattcgttagttttcgggcgtagttatccgttgtcgtatagaggtaggcatcttcctctgtgaaagagcactgaatggataactcatcaattgtttggcggataaaccgaagcgcttcgttgtttgcgtcgtaatattgtctcgctttctcctttccaaagtggttaaataattcatcataaataaggtcatgctgagcagttattttcgctgtcgtatgtccggtcgtaccgtttaagagtcgatctgcttcaagaagaacaacctccttgccggcttttgagagaaggtaggcagtggttataccagtgattcctccaccaacgactacgacatcagtggaaatggattcagttagatttggatgtgcgtcaagctgataatcgtcttgccagatcggttcaggattttctggcaatgtgcggttactgttcatttctattcctcctctaaattctcattcacccctattttttccatcaagatacttttcatgcattaagaaggtgaagaaggatggagagcaattgaactaattaaataaaatatggaaaatagacataatatttcttgtaggaaaggtttaacttataaaaccgtatcctccccaaaatttaacgcagtcgttgattaaatccctgatgaataagaataacaataacaatggaaaaatacttgtacctgattattcgattgaagataaagaagaaggcttatccgattaaacggataagccttttttctatactaactttgttgtccaatcttcacagttccagacatcggttgcaatgtcttgataaaattctggttcgtgagagatcaaaatgatgctccctttgtattcatttaatgcacgttttaattcggctttcgcctcaacatcaaggtggtttgttggctcatcgaatactagtaagtttgattctgtattcattaatttacaaagtcttagctttgctttttcaccaccgctaagaacatcgaccttgctctcaatatgttttgtcgtcagaccacatttcgataaagcagcgcgaatttgtgcctggctgtagtgtgggaactctctccaaagttcttcaatacaggtgttagacgttctagttttaatttcttgctcgaaataacctgtataaaggtagtcaccaagctccactgatccttcgattggtttaatttcaccaaggatactgcggagaagcgtggttttaccgataccgtttgcacccatgagggctattttttgacctctttccattgaaaggtttaatggacgggatagtggctcatcgtaacctatcacaagatcctttgtttcaaaaataagcttgccagaagcacgagcttgtttgaaatgaaattctggttttggcttttcttttgcgatctcgataacatccattttatctagctttttttgtctcgacattgccatattacgtgtggcaacgcgtgctttgttacgagcaacgaagtccttgagctgagaaatttcttgttgctgtttcttaaatgctgcttcgacttgttgcttcttcacttcgtgtactgacaagaagttatcatagtcaccaacatatcttgttaattcttgattttccatatgataaatcaagttaatgacactgtttaagaaaggaatatcatgtgaaataaggataaacgcattctcatattcctggaggtaacgtctgagccagacgatgtgctgctcatcaaggtagtttgttggctcatcgagaagaagaatatctggtttttcaagaagtagtttagcaagaaggacctttgtgcgctgcccaccacttaaatcctgaacatctttttcaaggcctatttcatcaagtccaagcccgcgtgcaatttcttcaacttttgcatcaatgacgtagaaatcattgttagcaagcatatcttgcattgttcctgtttcttctaataacttctcaagttcttccggagaagcttcccccattttcgcaaatagttcattcatctctgattcgtaatcaaatagatattgaaaagcacctttcagtgcgtcgcgaattgtcatgcctcgctcaagaacagtatgctgatcaagatagccaactctcacatttttagaccattctacagaaccttcatcaggctcaagcttacctgtaataatattcatgaacgtcgacttaccttcgccgttcgctccaactaatccaatatgttcaccttttaatagacgaaatgatacatcatcaaagatggcacggtcaccgaatccgtgcgtaaggtttttcacggttaatatactcataggaaaacaccctttatttatggtttaacaatcctcattgattatatcggacaatgagctttgatgaaagtcaggaagaggggaaaacgatgggaattttcgttagaagggaatttgtagtagaaaaggcttgtttttatttaacataaggcatttgacctactaaaaataaaggaacatttacatcgtgtttccactggcttaatcgtgtaagtttaaaatagaagaagcatcatgaacaagaagcaattatgaaggggagggaagcaatatgaacacggcgcgtcgtacgtatggaacggtagtttttatgttagttgtatcattgattatgatgtatttcacaattacaccatcatttgcagatggttcaggaacaccgtcatctccattttcggttacacaggggattgcaaatcaggggagtagtggagctgtagaagggtttattgtaggtaaaccagaatcaacatcttccattgccacatcaagtttctcagatgactatgcgattgcaattgctgaccaggcaaatgaaacgaacatcaatgagatgctttttgtccaggttccatcttcgttaagaagtgattttgggttgcaaagtaacccgggtttaatgggcgaatcagttattgtaagtggaagtttaacagattattttgctcatgctggagttaaaagtgtttcaacgatcgaattagccgacagcggaggttctgatgaaactggagaagaagggtcctctccttatgatgatacatactatcactctgctgttgggaaaacaggaagtgctttgaaaacagaattgcatacgattatcgatgagcatacagagctttcttatagtggcgtgtgggatgccttaagggtgacggatgaagatccattaaaccctaataatgtgcttcttctttatagtggacggtctcaaagtaagtatgaaaatggtggaaatgtagacgactggaatcgtgaacacgtatgggcaaaatctcacggagattttggaacatcgatgggaccaggaacagacattcatcacctgcgcccaactgatgttaccgttaatagctcacgtgggaatcttgattttgataacggtggctctccccaatctgaagcacctggaaactactacgatagcgattcctgggagccgcgcgatagcgtgaagggggatgtggctcgaatgattttctatatggcggttcgttacgaaggcgatagcggagaagttgatcttgaggttaatgaccttgtaaacaacgggtcaacaccgtatatcggtaaagtctctgtattgaaagcttggaatgaaatggatcccgtagattcttttgaagaaaatcgaaacaatgtgatttatgacaagtaccagcacaaccgaaatccatttattgaccatccagaatgggtggaagcgatctggtagaaaaaaagtacctgccgatactgaggcaggtactttttctataaatttcttaataactgtttggcaatctgttcataatgatccttcgtaatcccaggtgcaaattcttctggaagatcatccaggttagggataggcgctccttctggtgccccttctatcacacgtagccgttccccattttctggattcgtccctttccaaatctgcttaattcctagataatctccttcactccaagtgtaaagaacgttatttaatcccttttcttcaaattttcgtgcgtagtcaaatttcgagttatcaagacttggtattgggagcatttttgttaagtctgtacctgtagcgatctcaatcgcttttgcgtagggaagtacatgagttccgccacgcacgagtaagtagcctatcatttcacgtgcagttggatgatctgtcatttcatagacacgcattttatgcgttcgtgcaccaacctcaagaaaaaagttgtgaaggagatcaagaacaagatttccgctactgaagacataatcgccacgccaggaattgcccatactatctgttgcaagagctgtttgggctgtagcaacaaattgagctgtattacgcaggtccttggcattttgtaacggggttaaatcaggtggagcttgaaatgaacttcctgtggttaacagattaattgaggttgtgaccaattctacatggccgaattcttcagctgactggaagatgtagttatttaacgtagataactctccacttccatcacggattgcagcatcccttggagggatccatttgttgtttgtactgtaatcatgcttccttctatcgacatgagtgtttgatagacatacgggtctacagaactgactaattgaggctattgactcaaattctctcatcctctcaaaaaaaggttttaccgctattaatttacgcattgaataggttgtcatagtctataagaatgaaatgaacctatctctatgattgcccataacctgttaggggagagggtgattataattgaaacagcaacctcaagtgacgtatcggggtggaatgaacggaaacaaatgtgtattgggaagaaaatatacattaacacactctgatatcactggtgagctatttttaacgattggaaaagaatatgccattgatcgtatttctttcattcgagatgaggtgcttggaagctttcgaaacgactgtggattgtattattacgcatatgttttagtggatgatccaactgaagaagggagagaacaagtaaggaatcgtatatttcgaaaagagttgccaggggcattatctgctataagagtaggagatacggagttatttcaaacttatccggaacttgatgatgtaccgatttggatttactttgattctaatgaagaacagtgggaagcttacgaatactatggatcatttagagaatatagaaacagccagcacaaatagactggctgtttttctttatttacaattcactgagaatgataggggtaatatccgtttatgggtttgttgtccacaatcctgctgtcttaatgaaaacacgcttgttcattcttagttgggcaacgataaattcggccatatcttctggctggagcatattgtcctgctgtccatcagttaagttattctctactgcaagatcagtggaaacggtacttggtgttagtgcactaacacgaatattatgtttgcgaacttcttgagcaagtgattcagttagtcccattaatccaaatttagaagcgctataggcacttgttactggggcacctttttgtcctgctgtagaagaaatattgataatatctcctgattgccgttcgatcatgtctggcagtacagctcgagtgacataataagcaccgagtaagttaacctgaatgattttttcccattctgcgatttcaagatccatgaagccgccaaattttgctataccagcattattgataagaatatcggtatcaccaagctcgtctttaatcttagcaactgcttttgtcacttcgtcattcgatgaaatatctgcaatagcataagaagttttgacaccctctgcttcaatttctttcgcaacgttttgaagtgtttcttctgtacgtgcgatcagtccaatattgacgccttcttttgcaagagcgatcgctgctgcacgaccaatccctcgagctgcgccagtaatgagcgctgtttttccttttagagctaccatggtgtttcctccttcagtgtgttcaagttccattccaccgtatattctaatcgctcattttattgctgaaaagaattttgcttggattaacatcttgtatgataagatgtaaatgtgtgattattcaaaaatgaataataactaacgagaatatatggcactttgtaagagaataaatgaaaaatattcaaatatgaataagtggggtggttatttgacagagtggaacgaatataaagcgatctttcattctttacaagacgatattttagtaacagatcgaaacggaattatcgtcaaagttagtgaaggaacgggtatggtgtatggcgtgaaagccagtgacttgatgggtagatcagtttatgagcttgagaaagaaggattatttacaccactagcaacgccgttagtcgtaaaggagaagaagcgcgtcacgtttgtgcaaaccggtcctgatgggagaaagcttcttgttaccggacttcctgttttcaatgatggtggggagcttgtaaggattgtcagttattcacacgacataaccgagttaatggaaattaaagctggaatggaagagatgtcttctgagatggagcgtgttagaagcgagcttgagcagctaaaacaacagcaggatgatggaggactgatcgctcgaagtgatgctatgagaaaaatactagctactggaaaacaggttgctggagtagatgtgaacgttcttctcctaggtgagtcaggggtagggaagacagaacttgcgcgctacattcattctaaaagtgaacgtagagaggcgcctttcattgaagtgaattgtggagccattcctgagtctttatttgaagcggaacttttcggatatgaagatggcgcatttactggagctagaaaaggagggcgcattggtcttgctgaaatggcagctaacggaacactttttcttgatgagattggagaactttcgctacaaaaccaagtgaaggtattgaaacttatacaagaaaaacgtttttatcgtttaggaggtagaaaggagattaactcagattttcgaatcatcagtgcgacgaataaagatttggaacaagcagtacgagagaaagtgtttcgagaagatttatattttcgattgaatgttgttcctttagtgattccccctttacgagagagaaaagaagacatccttcctctcatccaatcgtttgttgatcacttctgcaatgcatataaacgaaagcggatattaaataaagttgttatccatgaattaacacagcatacgtggagagggaatgtacgtgagctgatgaatttaattgaacgtcttattgttacttcagatgcattcgttatacacgaagaggatttaccttctacatataaaaaatcaacagaagattattcagaaatgaataattttaatgagacattacaagaaacggtagagaaagttgagaaagaacgtctcgaacgggcaagacgttactttcgtacaacgacaaaaatagctgaggcgcttgggatgagtcaaccaacggtagttagaaaactcaaaaaatacagaataaaataactcctggcacaatacttgcatgttaaaagaagcgaagagtaaaaatttctcttgcttcttttctaatttatatgcaagaatatgaattaatattaaaaatgtcgaaggagagtgaaaaatggaagttaagcaggaaaagtcgtattctcttgaaagtaacagtcaatcggtaaaggcttctcagtcaaaaagagcatattcgtggtttatcattccttctctaattggtatcttactatttcttgtccctgttccttttaatggaaaaatgacaattggtgtaggaattctagccgaatctattcaaatacaactggctccaatcctccctggctttatgactgctattctcattttatctgctattatacctattgttacaaaagcgtttgaacctaaagcgatcatgctccgtccttttcttaagcaactattctatgtgaactggttctggatcagtacgagattgatcggagcgctctttgcggtcatgacgttatttaaatttggaccggaatttatcatttcagatgtatcaggtggaacgatgctgtactcacttgtaccagttcttgcagcctggtttctctttgctggtctgttaatgccactcttattggaatttgggttaatggatttctttggaacagcccttcgctatgtgatgcgaccattatttaaattacctggtcgctcatccatcgatgcgcttgcttcctggatgggggcagggaccgttggggtattgatcacaacgaaacagtatgaagaagggtactatacaaaaagagaagctgccgttattgcaacaaacttttcgatcaattcgattgcattcagtcttgttgttattagcttcattggattagaagatatgtttattcctttctactttacggttgtagttgcagggctagttgctgcgtttgtttgtcctcgaataccaccgctatctcgtaaagcggacacgtactatgaaggtacaggaaagcagatttcagaagatgtacctgagggtgtctctagcttcaagtggggtatacaaaaagcgcttgagaaggcttcagaagtaaaaggtgttaagtatgtagcggggcaaggtgtgaatacagttctagatatttacttcgctttgattccactagtgatggctcttggtaccattgcactgattattgctgaattcactcctttctttacgtatttatcaatgccgattgttccgattctagaactgatgcaaattcctgaagcggctgctgcagctccagcaatgctcgttggttttgcggatatgtttttgccagctgtaattgggacaggtatcgaaagtgaacttacccgttttgttatcgcagctgtttcgttaacacagcttatctacatgtctgagattggtattttactagtaaaatcaaaaatacctatttcagttcttgaacttgcggttattttcctacagcgtacggttattacgctccctattatcgtcgttatggctcatttctttttataaaagctgaatttaaaggaggagatcacaatgtctacatcatttgaacaaagatacagcaacatgtcagactatctagcacctagtatggcaaaagatcatcctaatctgcctgttgtgaaagaagaagggtgttattactatggtgctgatggaaaaacctaccttgatttcacttctggtattgcagttgcaaatacaggacatcgtcatccaaaagtagtacaggcgatcaaagatggcgctgattctcttatgcacggaccatcaggtgtcattatgtatgactccattcttcaactagctgaacgacttcaaggcattatgccaaaagatttggattgctttttctttgcaaacagcggtactgaggccattgaaggtgcgctgaaattggcgaaatacgtaacgaagcggcagtacgttatttcatttacagggtgtttccatggacgttcgctaggtgcccttggcgtgagcacatctaaaagcaagtatcggaaatttttgcagccgaatggattaacgtatcaaattccttatgccgatgtcgctagctgtccaaacgaccaaagcattgaggactattgtgtgaaagaactcgaaaaggattttgagcgcctttttgatcatcaggtcactcctgaggaagttgcttgcgtgattgtggagccagtattaggagagggcggttacttaattcctccaaaagaatggctacagaaggtgagagagatttgtgatcggcacggcatgttactcatttttgatgaggttcaaacagggtttgggcgtacaggagattggtttgctgcccaaacgtttgatgtgacaccagacattatggcgatcgcaaaaggaattgcttctgggatgccgttgagtgctactgtcgcttcaaaagaattaatgagtcagtggccaatggggacacacgggacaacatttggcggtaatccaattgcatgttcagcagcgcttgcaacacttgatgtgattgaagaggaaggcttacttgaaaactctagggaaatgggcgcttatgctttagaaaaattagcgctaataaaggaaaagcatcaggtgattggtgatgtgcgtggtgtaggattaatgattggaatcgaaattattgaccctgacacaggtaaacccgatgggaacggaatgatgcgtattttagacctatcactcgaaaaaggcgtgcttttttacctttgcggaaagcaccaggaagttattcgcatgattcctccgcttattatcacgaaggaacaattagatgaagggcttcgcgtttttgaggaagcagtgactgtttttgaacaggaaaaggcggtccctgtaggatcataataagttttaccctatcatgaattgacgtgatagggtttctttaatttcaaaacgagttcacggatataaacaaaattcgcgtagttatgatcatttccgcgaaaatatttttaaattggtgaaaaaacacgataaaaaaacttaaatggaagaataaagaagctttattccggtttcgtgatcggagatcagggaaatgaatagatagttttaaatagagaataaaggagatccattatgttggaatttctgattcaattcctgaaagagcttggcatctggggtcttttaattagcaatgcgcttgaagcgtcatccttaccttttcctggtgggatgatgacgttaacgtatggttacttattaaatgcttccattattgaaatggtcggttttgcatttctgacaagcgtgatctataccatttttagttttattccttatgggatcggtttgaaagtaaaggataaagtagagaagaagcttaagaagaagaaagtagaacgtgtacagaaatggtttagaaagtgcggatcatggagtattgcgattacacgcccactaggtgtaggaaattatgtgtcttacgtatcggggatgagtaaagtaaaggcatgggtatttgctttgcttacctttgtgggaattttcccttggacaattgcgatgttgtggatcggaaagaatggaaatatcaaatcagtgcaagccatttttggaagcattcagaaatacgtcttcttaatactaatcgtggcagttattggattaattgggtatcactactatcaaaaaaagtgtaaaattgaacataagaaacaggtgatcaacacagatcaaacgtcttgacaagtaaggagaggttactatggatcaattaacttaccaacttgaaattccagaaagtacgaatgttacgcttgcagagcttattaatcataagaaatcaatggttgtatttgtacgtcatcttggctgacccgtctgtcgagcttatcttacgcagttgcgtaagcgcgtaaacgaaattgagaaggaagactttcaaattattgctattgcgccttctaatgcctcatacatccgtcagttcacagaagccttcggagagtttccttttgttatagcgggagatccgaaaagaaaagcctatcgagggatgggtcaccatacaatgccgaagtggaaattacttggacaagcagctattgggttcatcactcgtaagatggatggatttatcccaaaagagcaaaagaagaaagactttgttcttaaatcaatgaaaactcaggatgtttatattcaaggtgggacatggatttatgacgacagagggaagctaatctggcatcatattgatcagtctccagaggaccatgcaaaaatcgactctgtcattgaagtgttaaaaaagcataacgcatagcaaaatcgcttctaacaatgttagaagcgatttttgcgtatcaatttattttaggaggaacatgataggtgaattactgattcacgacttttctgcgaatagcaaatgctgaaccagctacagcaagagaacctactgtaatccaaagtgctgttaggtcagatgactgctcgctcgcaccacccatacctgtcttaggcatatcaccaggcattgcttctccagcgaacttatccggcatttggttaacaattgctccacctagagattcacctacaccgaacatgaacgcatagccttcacggaattgatctgttgatgctttaaaatccccagacatatacgattcaaaagaggcaaccacttgtttttcatgagccattagtgcttcgattgccgcatcagttggaaggttttcttctgttgctgttccaaggaaggtaccgaaattttcagggaatgttgttaataaacgttcttttgccatgttcatcgcttcctcgtcttcagaaagagaggcaacgacaagatcagcttgtgcagcaatatggtcttcctgccagatcttttcaaactgagcagcaccttcatctccatatattgatccgatcgcggctttaaagtcagcggtatttctgtcttcagcccagtttacaaagtcatagtcttctgattgatcataccccttctcaagaccaagtgaagaaagagcaaagtgttcagatgctagactgtttagagttgagcgtaaatctgcagctggtgtaacagctttcgtgttatcaaatttatccggcatttgtgttacgatcgcactcgataatgctttactgatcgcaaacatgtgcttatgtccttcacggaatgttgtataagcttgttcataatttccttctgtatactcatcaaaggtagttagtacttgatcttcatgaacttctaaaacatctgcagctgcttcttttggaaggttaccttctgtcgccgtatcaaggaaagtggagaattcatcaacaaattcatctacttctttctcagcttcttttcgaagttctgcatcatcttcagttgccgcttttacaaaatcagcagaataatcattgtgctctctaaaaatgtcctcaaattgttgcgccgcttcatcgccataaacagatgcgattgctggagtcatatcagctgcgttttgatcgagtgcttctgtcacttcttcagcatcctcagtgccatcatacgatttggtcatcgacgtaacagctagtacaaaatgttcggataagagttgatcaagtgtggctcgtagatcggcagctggtgtgcttactgttggttctgggtcagctgcacctgcaactgttggaaacaatagggttagccctagagccggaaccattaattttttaaatgcttttttcatgttcattttttcttcacgctcctcgtttttattaccgttaattttgattacacacagctaacgaggtgaaaaagagtttggatcactttaagaactatttttttagaaaaaacatattttttaattttccaaaaataattttgtagataaactgcacttatggtagtattaaacttctgtctcagttaaaggcaaatctcagaaggaggtaactgatcttggatcataagaatcaaagtgcctatcgaaaagagaagcagcaactcgatcaaattgctgccgagattacaaaacagcaaaaagcattggaaggatatccccggtattcaggtgataatgtaaccgaacaggtccttgaaagtattcgagaagaaaatcgtcaatcacttgctatagcggtaaaagaaccgtattttgcgagaatggattttcaagaagacgagaagccatcacgtgcctactacattgggaaggttggggtagcacatggggattcacaagattctctagttgtggattggcgagcgcctgttgcgagtatgttctatgcctttacaggaccagaagaggatgtttattacttatcgccagatggcgtgattgaagggaatatcgaactaaaaagaaacattgtgattcgagataaagaacttcagcgagtggtggacacttatgtagaaggaagcgatcatttaagcggctcagatgagtttcttctctaccgcctgagtgaaaataaggataatcgccttcgtgatattgtttctacaattcaagcaaagcaaaatgatattattcgtgcagagcgatcgacccccttaatcattcaaggtgcagcaggtagtgggaaaacaaccgtcgcgctgcatcgattagcttacttgttgtacgaatatcgagataccatacaggcaggaagaatgattatttttgcaccgaaccgcatgtttcttgactatatttctggcgttcttcctgagttaggtgtaggaggcattcaacaatcgacctttaccgattggacattaagcatgattgaagagaaagtgaaattagatacttcagaagacgatcttcaaaaatggttcgccagagagcggccagatatgaatttggctggaggaagagtgaagggatccattgtctttaaacactggattgataaagccctagtcaattatagtcaatcagtgaggccagaaggatctttcactccatttgaaggatgtacgctacccgaagttaaaattaagcagtggttagaagatctctcggcataccctgtcggacggaagcgtgaaatgatcatgaatcgctttaaagtctggattaaagatgagatcaagtcaattgaaggaagtcatgtgcaaaaagagtatcgaaagctagcgaatgagcagctgaagaaatattttaaaaaatggccgaagcaaacagcgctttctttttataagtcattgtttcaggcaaatccaccagagtatgtgcctaagaccgaaagagctcatatgctagatgaggcactcataacagggacatcaaagcttatgaaaaagaaaaatgtatccacatctgacctagctcctcttctctatattcaatttaaattaaatggcgtgcataaagatgatatttttcagcatatcgtgattgatgaggcgcaggacttttctccttttcaattagctttgttgatggaagtgaatcgagctcgatcttttactatactaggcgatcttgcccagggaatttatgcctataaaggcattcgtcagtgggaagaattcagagaccttttcgagaataaagagctttatatggaattagaacaaagctatcgatccacattagaaattattgaatttgcgaatgaagtcatcgctcatgctaacatacccgttcagcctgcagtccctgtatttcggagtggcgagagagtcaccgttcatgaaataacgaaagagagtttattagaccgcttgtttgaaacagctcaggaaatgaaaggacgagggatgaaaaccatagcaattgttggtagaagtgaagaggaatgccggaatttgtatcaggcgctttctaaggacaaggatgttaatcttcttacagcaaaagatcgttcttatgaaggaggaatttcagttgtaccaatctatctaacaaagggtttagagttcgatggagttatcgtggcaaatgcaaatgaagtaaattatagatgcaatgaggaagatgcaaaactcttatatgtgggctgtacccgagcattacatgagcttaagctgttttatacagaggttccttcacagttgttacctggttaatcaaacgtttgtttaagaaatagcaggttaagttcggtttaatatacgataaaaatcagcgaaactctcatgatttctctaccgataataaaagtagttggaagataaaactgaaaaaggcaaacctattgaaaagtagggacgcaaagatttgggcctgcccgcaaaaatgcgaatggttgccagactgccagggtttgagctctgggttcagaaaaaaggagagcatacctgtgaagaaggtacctgttgctgttgttattctcttttttgtactgagctattttgtacagtcaattgtatggcccgaaggaaaagctaaggcgatcggaatggacaaatctcttgctacatggatttggaacacaagtgacattgaaaccaaatcagaggaaacccttcaatttatggaggggaaacaagtaagtgatgcatacttacaaatcaatcgttcaattgtgccatactcctatcactcttttatcgaacaagcgacagctagagggatacgagttcacgctcttgatggagcgccaaactgggcaacgattaaaggggcaacgtatcaaagtaatttatttaattggttggaagcttatcaagcaaatgcgtctgagtctcaaaaatttagcggtgttcaccttgatatcgagccttacctccattcaggatggaccaataattatcagaatacaatcgctttttaccaggatcgtttatcagatggaaaagcacgagcaaaaggtcttggtttattgtttggagtagacacaccgttctggtttgatgaacaaacgtatcaaaatcgacatggaaaaggaaatttggctgaatggattattcaaatagctgatgtgacgacattgatggcttatcgagatcgtgttgatggagggaatgggataattgcgcttgttcgtaatgaaatagcattcgctgaacagtatgataaaaaaatttctattggtgttgagactggagaaacgtcagaagcctcctacattacattttttgaagaaggagaagccaaaatgattgaagagcttctcatagtgaaaacagcgtatgagaattcaacagctgtagaaggtttttctattcattatctcgatagttggatggccttaaaaccataggaaagtgaaaacccccgggatttgtccgggggtttttctatttattatgacaaaatttcttttacacgaccaacttgtccatcttcaagacgtactttaataccgtgtgggtgagttggagactttgttaaaatatctttcacaattccccgcgttgttttacctgatcgctgatcttgtttcaagacgatatcaacggttttcccaggtgctatattactccgattctgtccgttcatgtttaccctcttcctctgtcgttttgtgccgatgctcttctggcaacggatcgacagtatgtttgacgctgtatccttttgatacagctattccaaaagcagcggcaatgacaattgtcataatgattacaacgataattgtaataatgataaccattcccgaactcctttccgtgatgtctgttttcactttaccatgatttgcccggttaagatagaacagccactaaccatatacgtgacacgttctatcatctaactaggactcaggtcttatgcaaagatatagctctagctcattatgaaagctaatgcaagaagatagaataaggatatgaaaggaggcgattatgatgaagaaagcaggcttgttattagtaggggttattgctgcagttgtcttactatcgaaccttggttctttagtaggtatgatcattagcctcggtatcttatacgtagctgctaagaaattccttcaaacggattcaacattaggaaaagtcatttggggaatcatagggttctttgctttaagcatggctgtagcaaatatgccagctatacttgggcttgtagcaatctacatcctctatgtcatttataagaagtgggatgaacaaggtaaagaagaggcagatgatccgttcaccaatttcgagaagcagtgggatgaacttaaacgaagctaatgataaaaaggagagaaaataatatggcgaatttacttacacgcatcaaaaattcgatcgaagctgattttcatagtattcttgatcaaaaagaacaaaaaaatccaatttcaatgttaaatcactatctaagaatgtgtgaacgagaagtggaaaaggcagggaaactggttgagcgacaatcaacgcttttaggtgagtttagaagagaacttgataaggcaagacgaaatgcagagaagcgtgcaggacaagctgtgctagctagtgaagctggcgaaacagatttgtacgagtttgctaaacaggagcaggttcagtacgaagaacgagcagatcggttatcggaatcaatggatgaagcaggacttgaacttaaacgactcgaacaaaaacatgagaagatgaaacataagctaaaagatatgtcgcttaaacgaatggaattaatgggtaaagagaatagcgtaagagcccatcacaaaatggacgtgattcttgaagagagtcatcttaacgaaccatttaatcgatttgatgagatggagacatatattgataaattagagaaaaaggtgaatcgagattactatgtttcgagcatggacgttcgatttcatgatttagaaaaaaaggtaaaaacgcaagaaactcattaaaatcttaaaagaaataatggtattctaaaagaggcgcttgcgccttttttagtgatgaatcgtttttcgattagacggaagcaaggaggtacaccgatgtggaagaatttaaatagcgacacggttaaagggcttttaattattggagtcattctaatactgctagaagtttctttaaatggtggccttctattcttattaattgtatccggcgtattgatttatatgggaaggaaacgtctgccacgaacttccggaaaggtatttctgggagggggtattttcttttttgttacgacggtaatgaatatggtcgtcgtgaagttttttcttctcgtattgttagtatatcttgggtttcaactctatcagtccaaacaaaaacctaaaaaaatccgtcctgttttagaagaacctgaacatgtgaaagaaggtcttgttcatcagcagccgatttttcaaaatagatgggttgggaaacaaaggacacatgaacatgtgtatgaatggaacgatgtgaacatccaggctggttttggagaaacagtcattgatttaagctatactgttcttccgaaaggcgaatcaattattatgattcgtaacatcgtgggtaacatacaggtgctcgtgccgtatgaactcgaagtaagtattcagcattcatctatgctcgggtcagccacaatatttcatcatgaagagcctggtatgtttaataaagtgctttcttacaaaacaaatggctatgaggaagcttctgagaaagtgaagcttgtaacctccatgtttgctggggatttagaggtgaagcgcgtatgagtgtgatacagcgtcatatgttcattggtgcgttgctctcactcctgctgcttttcctcttcactgcggcttacttatcggtctatccaattgcttccttctctctattgtttgaaaaggatttaatggatttaccgtttgggctaatcgttccaatcatgactattatacttggaggagctgctgggggagtatcaggattttacgttagtaaagaacttcaatatgtagctgatacgcttcaagaacttgataaaggacgcacgatacataataaaaatagcacaggtctaaatggtgtttttgaacagattagcaagctgcaaaatcgaataaatgagcaggtgagattagctcaaaagctagcgaatgaaaaagcagaagatcatgaaaagcgtgtccaacaagttgtctcagaagagcggaatcgtctagcaagagaactacatgactcggttagccaacaacttttcgctgcttcaatgctcatgagtgccatcacagaaacgcgagaagaaatggatgatcaagagacaagacaccttaagatggttgaggaaaccattcatcaatctcagttagaaatgcgcgctcttttacttcatcttagaccagccgctctaaaggatcgtacccttgaagaaggaataaaggaacttctaaacgaattgtcacaaaaggttccaattgatgtgagttggaaacttgaaactctcgaactagataaaggtgtagaagaccacctctttcgtatcttacaagaatgtgtttctaacacgttgcggcatgcgaaagcatcgacacttgatgttcttctcattcggcgcgaggggcgaacgattttaagaattgttgatgatggtattggatttaagatggatgagaagaaagctacctcttatggtctacaaaacatgcatgaacgagcattagaaattggaggcgttcttaagttagtcagcttgccacaaaaggggacaagactagaggtgagcgtaccacacgttggaggggaacgaaatgattaaggtgttgtttgttgacgatcatgaaatggtgcgaatcggggtatcgtcttatttgtcagctcaagcagatattaccgttgttggagaagcagacaatgggaagaaaggggtagaactggctctttcacttcggcctgatatcattcttatggaccttgtgatggaagagatggatggcattgaagcaacgaagcacattattgcagattggcctgaagcaaagattattattgtaacaagcttcattgatgacgaaaaagtatacccggcacttgaagctggggctacaagttatatgctaaaaacatcaaaagctgtggaaattgcgaatgccgttcgaaaaacctatcatggagaatctgtgtttgaacctgaagtgactgggaagatgatgtcacgcatgcgtagccgggttcaaacgctacctcatgaagagttaacggaaagagaaatggaaatactcttattaatggctcagggtaaagcaaaccaaacaatcgcagatgaatgttttattgctcttaaaaccgtgaaagttcatgtaagtaatatccttggtaaacttgaagtccaggatcgaactcaggccgttatttacgcatttaaacacaaccttgtgaattgatgagaagaaagcaaaaacagaaagcgtttttgcttttttttgatgcaaaaaataaaacaccagcaccgaaaattaagaaaattcttgtatatcactgtcgaaataagttgatatcatagtactaaaagcctatttatctattgtaaccgcttcaattaaaaatcttaggtttaggttgtttacaaagcattaaatccctattataatcccgattgtgcttacgaaacgaaaacaaaacaacgggagggataatagatgcttcatcacatcaaaacttatctgctaattactttgggtgcactcggtgttgctacccacgttcatttcttcctatctcctaatagtcttgcaacagggggagtcagtggtttgtcgattttgatgaaccatcttgtcccaaacctgtcagtcggaatgtttatgattattttgaacgcagttcttttgttagttggaattctttttctcggaccgaaattcggtgttaaaacgatctatgcaagctttgctttatcacttgctgtatgggcatttgagcgctttatcccagtgactgagccatttagtcaggatatcttaattcaattgatcattggacagtgtattgctgcagctggcatgggacttgtctttcatcagaaagcgtctactggcggtacggatatcattgcaatgattctgaataaattcttctcaatggaagttgggaaagcagttctggtctcagatatttcaattgccctattctcagtcgtcttatttggacctgaaatcggaatgtatgcaatatttggtgtcattctaaacggcttagtgattgattatacgcttcaaagctttgaagcaaagaaagagattgttatcattagtaaagaaagtgaagaaattcgttcctttattgttgaagtaattgggaaaggcgctacaattcacacagcaagaggcgcgtttacttcagatgaaaaagaagtgatcacaacgattcttggaagaaaagatcttctaaaactgaaaaagcacgttggtacggttgatcaaaaagcctttataacagttcacagtatgaaggaaattcttggtcaggactttaaatcacttgcttaatctataaaatcctcgtttccatttggaaacgaggattttatttagcgtttatttactttaaaagcataaacaagagtaaccatgaagagcagtgcagcaagaaagtaggatgaatagacgactagcggaacgtctccattttgattttttacgccaattccaataaaggcccatacaaatacgagcggataaatccaatcttgctctttctttaggaaagtaagcgccaatattgtggcgataattaacagaaggaaagtccataccgaatcagataagccgaaaccatcccagtcgatgtaggttagataataactaatgtttgcgattgtcgctacgctaatccacccaagatatacggaaaaagggagtaaatcaaagaaggacgcgtctgctgcttttgctttcgtgtatagtctgatgagtgttgagagtaaaagaagcataacaataacagataacccgaagaattcataatgccataggaaaatccatagactgtttaggatggagcttaatacaaatagtccgctcgtttcctgatagactggcaaatcgcgacgacttttagggaattggcgaataacccatatccctaataaaagataaatcaatccccaaatactaaacacataaccagcaggtgtaaacaatacatttagtctatttgaaatttctccagtcgtttgtccatttagtggaagtgaattagctaacccgtttaccgttacgacgatcatgtatgcaataagattaagaagaaatttacccataagaacctcctcgttatagtctatagtacatactattccttcttaatattaaagataaccgcctttttatgagcaagagcacatataaaaacctgctccagttaaggagcaggtgagtttgtttagcgattaggaagtgtagcatattctggatctgccacttttacaagttgtttaccaagatttttaccttcaaaaagaccgaggaatgcatttggaacgttttcgaatccttctacgatcgtttcttcgtattttaacttgccttcttgtagccatttaccaagttgttcagcaccttcattaaaacgatcagaatagtcgccaacaacaaagcctttcatgagagaactagtttgaattagtttaccttgaacgcgtggaccaagatctgcttctttattattgtaagaagagatagcgccacatacagggatgcgagcaaatttgttgagtaagctaatagcagcatcaccaatttcgccaccaacgttctcgtaatacacgtcaatgccatctggacaagcttcttttagtgcttgatagacgtcctgtgttttgtaattaattccttcgtcaaagccaagctcgtttttaatataatcaatcttgtcatcagacccagcaataccaaccacacggcagcctttaattttagcgatttgaccaactacagagcctactgctccagcagcgcctgagacgactactgtttcgccctctttaggttgaccgatgtctaaaagtccgaaataagccgtttgacctggcatgccgagaattccaaggtgcgtggtaattggtgcaacacttgggtcgattttgcgaaggtgtttctcgttaactactgaatattcttcccagttcagatgcccgataacaacgtcaccttgattaaagtgtgatgatttagactctgctacttcagctacaacaccaccatttaatggttcatttacttggaatggtgctacgtatgattttgcatctctcatacgacctctcatgtaagggtctactgtaaggtaaagtgcacgcagaagaacttctccatctttcggggatggaatatctgcctcaacaatgttgaagtgctccattgaaggcataccttctggtcgttttgctagatgaatttgtctttgtttactcattcataatccctccattatatgattgatgcttcattcatttcctatctaagctgttccacttaaacagtatcataaaacattacagttcatcaaaacattcgtattctaaatatggaaagcgtcatttgttaggattcccaggatatagggggatatttagttgagagaacattcaaatggttctttttttgaaaagaatcatcgcaattggttatgatacaggtgagaggaggagaggcaattgagtcaaaaaacaagcggatggatcatgaagcaaacttgggaggacctcttattcttgcactggtccattgatccctcctggcttcaatcaatgcttccacctcaattagaagtcgatacttttgatggaaaagcatggattgggatcgttccatttgaaatgacccatattcgatttagaggattgccttccgttccatttgcttcaagactacttgagttaaatgtacgcacctatgtgaaatacggtaaaaagcgtggagtatatttctttagccttgatgctagtcataaagcaggtgtcgcgattgctagaaatctttttcaccttccatactttcacgcaaagatgggtaaaaaaagcgatggaaaccaaattagtttttggtcatcacgaacgcataaagatgctaaacaagccgattatcacattatttacgaaccagtaggtgatcgctacgagacaatagaaggaaatcttgattactggctgacagaaagagatcggctctttatcgtacgtcaaaacaacgtttatcaggggaaaattaggcatgataagtggccgctccaaaaagttgacgtcgccgttctccgagatacactctctcaatcgtatcactaccatgattcttacatcactcatttttctagatctgtgacgacctatttgtggccatttgagaagataacaaaaacaacaagcccctcttcgaagtgaagcgggcttgttgtcttactaagattctagtgaatgctttctttgaaagaaggatggctcaattctacggaatagtttcgttcgcgcaaaagtgaaaagtatgagcgctgcccagattaacgtaaagctgacgacgtgtacagaagtgaatgattcatcataaagaaatacaccttgtacaagcattagcgtaggagcgatgtactgtaaaaagccaatcatggaaagagagatgcggttagcgccacttgcaaataaaaggagtgggacagccgttacgattcctgcagcaagcaatagaccgaaaataactgaatcctgaatatataaagcatccgcaacgctagagcgcactgtcattaaatagattaatgcaaacggcgtgatgagtagcgtttcaatggttagtcctgttagagcaccaagtcttgctttcttcttcaataagccatataaaccaaagctcatcgcaagaataagagaaacccacggtatttccccaaaacgaaaaacgagatttaatacgccaattgtcgcgagcaagaaagaaatcagctgccagaatgacagtttttcttttaaaaatagaattccaagaagaacgctaatcaatgggttaatgtaataaccaagactagtttgaataacgtgattgtgattaaccgcccaaatgaaagcataccaattaattgtaataaataaagaagcaaaggcaatagccattagctttttaggctggcgaaagattgcgtacagttcatctttaaaagaagagattttcctaagcatagctagaatgattaacataaaaacaaatgaccagatgatacggtgagcgagtacttcttcagatggcacactcccgactagcttccaatatagcggaagaatcccccataagaagtaggcgcctgcaccggaaagtataccgattgtttgttcattatctaagtttttcatacactaatcctcgtttctatagtgtcactcttaccagtttagcttcctttccaaatcattacaacgaaaaagagttcaggttgcaacatacattgtgtaagagagggaagggggaaaggtgatgaggattgaacgaattttactagatcaacagattggagacgtaacaggtaatgggcttccagatcttgttcgtcttactggtacgaaaccttatggatccgacacgccgtttgtcgatgaggtgttgttaacgattcaaaatgatggttcgggagtagatgtttctttctcactgcccggaagtagtggctatcgtcctactctttatttgggagattttacagggaataaggtgaaggaaatattagttcgcacagattcaggaggaagtggaggcatcacgtatgactttctgtattcttatctcaatcaatctttaagattactttttgatcaacaaagcttttatgagtcttttacttatgatgtgaattatcttgattactatcaagcaaaggtagaaaataaaacgttaaaccagagttacattgtgagtttgctttataagggaaaggaatatctttcggaaatttataaggagaatggccaattaatagcaccaatagcaggtgacgtactgcctccaggaggcgtatatccaatcgacttacagcgtgatggagtggatgaattgttggtttatcagagggtaatcggcagatacaatgcggatggactaggctttctttcaacaccgcttcagtggaaagaaaaccaattcgttcctatgtatcaaacgttatgtatctttggatagatggtatgtaaaaaaaagggggagggttccccctttaaaggaacttcaatttattgcttttcaagaagagctgcaagtacgtgtttcttaaatttctctgtcttgcgtccttcaatgtaacgtacatcatgtttttttagctgttcaacgtaccagcctttgcttgcgtaatgcatcgaaccatcctttctctaatgaaaattctataaggattattctataaaccttaaccgtcaaccatgttatcatccattggatttattgaaaaggggaaaacagtaattcatttagtggaaattattcttcttatttatgacaaaataaaagcaaaatggatcataacagaaaggaaggatatgcatgggttttggctagcttatgagcgaagtgcaattttggtccccgagtatcagcataaagtgcataaaaaactttatgaatcgtaatattaccccttctttgcatacgcgcttaaaggagaaggttgttctgaagcgaatgtatgtataacagcgtggaaaagtgaaggtcgacgtgaagcgcaccgacaaaggaggagcggtaatggatggttctatttcggttcaagatctagtaaagacgtataaaggtgatgtgaaggcagtccagggcgtcagttttgaagtggcggaaggggagttttttgcttttcttggtccgaatggcgcagggaaatcgacaaccgttcagatcttaactacactcgttaaacctacaacaggatccattcgaattggcggggttgatgttggagaagagccagagcgcgtgcgctggaatattggagtagccttacaagaaacgggaatcgatccggtactaacgggaagagaattaattgaaatgcaggcgcggttatttgccttcactaaaacagaagcgaaaataagagctgctgagttacttactctagttgatttaaatgttgctgctgatcgcccgtgcggaaaatattctggaggtatgaggaggagactggatctcgctctaactttagttcataagcctaaaattctttttcttgatgaaccgacgacaggactcgatccatctaacagaaaagctatttggaaagaaattaagaggttaaataaagaagaaggcacgacaatcttcctcacgacacaatatcttgaagaagctgatcaattagcggatcgcattagtattattaatcaagggaaaatcgtagcttctggaagtgctgaagagttgaaaagaacactcggttttgatgccattcaacttttatttgaaatggatgaagaagcagagcgagcaggtcaaattcttggagatcttggggagaatattgaacgttcaaaaaatgaggtgacgctttatacagagaatggcacccaacttctctctgatctcgtccgtaaacttgatgaacataagctttcgccgaaaacattaaatgtaaaacccccatctttggatgacgtctttattaatgtcacgaacgaacaaaaggaaagggcgttagggcatgagtgaacaaagaaagggctctttcttaatggatacactcgtttttacgaaaagaagtatcataacaattatccgaaacccattgatttttatccctaacttaattatcagtcttttctttttgtttgtatatgaaggagggttaagcgggatttcagagctaccggcatttgaaggggccaattatcttgcatttattttaccagtctctatcgtttcggcggcgatcgggggagcgggtggagcggggcaagcgcttgtaaaggatctcgaaaatggatatttttcacgacttcttcttacgccttcttcaagacttgcgattgttcttggaccaatcattgcaggaatgctacagctacttattcaaacggtattaattcttgttgtcgcttattttcttggtctagaagtagcagctggctttggcggagtaattgtggttttgttgttaacgcttggatggggacttgcgttcgcagggtattcagtaggtgtagctcttagaacaaaaaatgctcagtctgcacaagccggaacatttgtctttttcccacttatttttctcagcactacgtttgtcccttatgaactgattgaagcagggtggttaaaagtagctgcaacaatcaatccaacgacctatttatttgaagcaatgcgctcggtatttattgatggatgggaagcctggccacttgttaggggattcttagtaatcgcgctcttatgtgccattacgattagcttctcagcaataagtgcctcaaaagcggttagtgctgactaaagaaggatcgcgcagacttcctgcgcgatccttcttttttgtagccattattcatctttctgatcggattttgttgcatggataagaaaccggtgagatggcaaatcaataaaaccatttttctcgatttgctcgtgaagacgatagagggcggattgataacggttcgttgtgaagtcaggaatctgccatggaatcgcttttaaataatatataatcgccccaatgtcataaaatcttgttgaaggaaaagcttcattggcttcaagaatatgaaagccggcaagttcaagttcttgaacagcataatctaagttccaatggtcaaactcagacttcaaaggagcttctagaacacgattaagttctttcatatcctcgccacccacttgttgtgtaatgaacgatccagttttgttcagaatgcggtgaacctccgttggtgagtaagaatcatgtttattcatcaccaattggaattcttcatttgaaaacggaaggttatggtcatcttcaaatcctttaacaattactccttgatgttcgagacgagcttttgcaataggaaggttaggtggatagccttctgtagctgatagcttctttggaaatggttttagcgcttcaagaaattctccgccacctgttcccatatcaagaacgctctcgcttgtccgaaattgtttgattactgaagaagtgtaagaccatggaagcggggtggcactcattcgttcagtgtctgtaatataagaaaagtcccatcctgcaaaaggtttttccccctccgccatgaagaattcgaatacagagtttttcatcaataaaaaccctctcctgttagttattaccattatatcagggaggtttaaattataggggaatgaatatgtcttttaagatttaaaagtgtcaaaaatagggtaaaacaagatatgcgagcatccaagtgtatcgatcaagcaaatcaattgaatctgtaatgtagattaaaggacgtggaaatagtggatacaacaaaaagatatgatctagtaggaattgggatagggccatttaacttagggatggcagcccttgcggatgaatcagaagtagacgcgatatattttgatcaaaaagaggaatttaattggcatccaggcatgttgattgatggagcggatctgcaagttccgtttctagctgatcttgtcacgattgcagatccaaaaagtccttatacgtttattaattatttacatgaacatgatcgcctttaccaattttatttttttaataaactagatattccgagaaaggaatacaatacctatactcgctgggtagcatcaaagttatcaaattgttttttcggtaaaaaagtaatcgatgtcatctatgctcaagaaaaagagtgctataccgttacgattgaggatgtgaaaacgaggcgctctgatgttattcaagcgaagcacgttgttcttggtacagggagcgtacccaatattccacaaggctttgaatcatatccacttgaagacgttcttcatacgaatcattaccttttccatgaaaaagagttaaagaaatcaaaatccgttacagttgtaggatcgggacaaagtgctgcggaagtattttatgatctccttcatgatcaagagcgatatggttatcggataaattggctaacgcgatcagctggtttctttcaattagaatcagcgaaattaggtcaggaagtattctcgcctgattatgtgagttactttcacggtctttcgtttgacgatcgtaaagacgccctttcaactcttggtacattgagaaaaggaatcgatccatctacattaaaaaatatttatcaccttctttatcatcgttctgctgagcaaccgctagacgtgatgattcaacctttaacagaagtaaatggagtggaaaagtcagaagggtactatgagttaagttgcagacagtggcaagagaacaatgagttcgaggtcaaaactgaaaaaattgttctggctactggctacaagcctcattttccagaatggtttaaacgaatagaggatgaaattgaatgggaagatgagaagcggtttaaagtggaacgagatcaacaactcgtttttaaagacggaagaatgaaccacattttttccttaacaaacttggatcattctcatggaacgggagctacgaacctagctctttcagtcgagcgaaataagcgagtgttgaatgctgtagcaggaaaatcactttttaaggtgaacacgaatacggtttttcaacaattctctagtaaagaaagataacaaccttttagtccaaaaagtagaataaaaaaggagctgaatcgttcagcttcttttttatcttttcttataaacgagcgagtaaccttcaagattgacaacatgattaatgccctgacgaaatgtagcaaaagtggggatagtaggatctaagttaaggttcattagccactgcacgacttgctttgtaattccgacataaacgaagttctttttggtcattccctaacatcaagccagataagaaggtatcctaccttaactcatgcatcgtctttgtattaggatatcacaatgctcgccgcaaagcggtcgaataaagtgatggtactttcatccactatgtgaaaaaaagttgtttcgaccaactcattacctccgtaattcaactaacttttccttttattatagtggaaagaggttagaatgcctattaatatcgaatggaaaaggagcgctcgtgatcatggacttgtttttcttgtgcttgaacttcatcaacagctgaaaagggactccctttttgtaaggcagattggaactttgtaagtgtgttttcctctccctgtgcttcaatttccacagagttatccatctggttcatcacataccccgttagcccaagttgagctgctttttgctgtgtgaaagcacgaaatccaacaccctgtactcttcctttcactataaactgataccgtttcattttatgtcatcctttccgtaaagtcttataacgttcttttcctaatttctctgttattaaacggaggtgaatggtgaaaaggtcgccggagtagaaaatggaacgggagataaagtaagtgaaaaacaatgattgtgaccacttcaagtgaaagtaagtagaatggccaggggccaagatatgagatgagcgtttgactggcgggttcattcattaaaaacatatagtttgagccaagtgtaaggttaagtggaaacagcaaaagaacgtaaatgtttaagcctgcaaatgacatccataatgagcgataagagggatgagctttttcaacgataatcataaaccaggtggcaagaagtattcccccatgagcaataaagaagtgaaaaaaacgaaagtgtggaaaagcatatggcccaaggtccggagtaatcatagcaagtagggcactagcggaaccagcaaaataagtgataggaaatagcgttttattctttgttagaacgagtgcgatagctagaaatagggatatactactaagctgtagtggcaaagtagtggtgatgctccactcattatagtaggcgaaccaggtatgaaaacttatctctgatagaagtaagagaaaagcaatcattagtcgaataacgaggttgggaagtttgtttcttaaggtttttcgaaaaagaaacactccaattatacaacttcctacaatgaagagtgtcaaaagatgtgaaaaagaaaatagggtaaatgaactctcggtaaaccatgaaaaatatctctccattgacaacacctctatctaaataaggggatttagagttgggatacataatgaaataagctttcgagactagtatcgaaagcttattaatcatagacattctcagttgatcgaacttgaatcatctatgttttttaaggcatgcttaacagatgggaaacttttcacagaagataaagagaaatccgcctgaatcccttctaaaacaaaatcgggacgaattcctgttatccttaattcagcacccattaatttaattagttgatgaagttggtaaacacctttgtgaagttcagaagtgaaatgactgactccggacaggtctagtattaggaactcatctccgcttttttggatatgagaacttacgttatgtaagagaagctcaattcgttcttcatcaatttttccaacgagcggtacgatggaaacattccggtctatcggcacaatcggtgtggacaatcgtttgacctcatcgaggtagtgctcagaacgttcttccgcttcttttctcttagtaatatcttgttgcacaccgacaaagtatgtttgattttcactttcaatgtgaacgggatagatttgcagttcattccaaaaatattgcccattttttctatagtttttaatttcgattttaaccttgttttctttattaattgcgtctctcaattgagcgattgttcctgggtccgtgtcttctccttgcaaaaatcggcaattaaagccaaggatttcttccgaagtataccctgttaacttctcaaatccttcattcgcatacacaattggattgtccggaagttccggatcagtaatcacaacacctgtatcaacatactcgattgccgttctgacaaattcatttcttttcatacgcctaaattgttctttgtttactttcatgataaacagctccatgacatcgacgttctcatttgatcatcaccttttacaattgaatggtacttctagtataaaactctatcgtagaaaatccaataaaaacccatctttctcctttatgtaatgagtaactgggtggatttttctgaaaaattagcaaaacatctttcgagaagaaaggtagtttggtatacatggtataataagagtatttattgtgatcgaatgggagggccttgttatggatgcacttgatgttatgggaaaaaaagaagagatcttcccttacttccagccgattgttagcgctgataagcagcaaatcattggatacgaagttcttggaagaattaaaacagaagaaggaatgaaaagcctcggctttttctttcaggatcaatcgattcctgaagagtacatattggaaattgatacgcacattcgtgattgtgccattgatatatttttagagcgaggtacgagtcagagcgtgttttttaatgctagtgcaagacatttactatttgaccatggtgaaacgctaacacattctcttgaagaatattttaataaaggcatcgcttatgaacaaattgtgattgaagtgtctgattatgatattgctgatgaaagccttcagaaactgcaacatattcttacttactataaaagccttggggtacaagttgccataagtcatgccggaaacacaatgagtaatattgagaaaatcgctatactaaatccgaacataattaaagtaggattattaaacttaaaagacaaaggaatgcctcctgagtatagggaagttctctatgcgttatctatgttaggcagaaaaatcggcgcaaccctattgtttgaagggattgaagcgatcggacaattaaagtatgcctgggagaatggaggaagatattatcaaggtcattatcttggtaagcctgctgcagactttcatgatgtgaacaagtacagagcactcctaacaaaagaatttcaacattttattacacatgagagaaagcgccttctttcactttacgagctttcccaaaactttaaccgtcatttgcagcagcagattaagcgaaataagcaaaatgattggaatactattgtgtctgaagcagctcattcgcttgggaatgcgtgttttagaggatacatttgcgatgaagacggtcatcaagtttcagctaactattatcgtaatggtgatggaaagtgggagttccaacctgaatatgaaggtgataactggagttggcgcccctatttcctagaaaacatcgtaaggatgaaacatgatcaggtaggaatcctttccgatctttatagtgatatagaaacaaatgagctcattcgtacctattcttatcctataaacgaatcttactacttgtttctcgacattccatacctttatctctacgaacgagatgactattaaagcgagactccctttagtaatcgatgttccacgtggttattcatactgaaatttgaatgaaatcacagtaacaagggtagtagtaatagagtaatctgaggagggatcatatgcttaatagaatttctgtgaaaacaagtaaacgagatgaaatgattgatattacaagtgacgtgagaagcgcggttcacgaagcaaatatcaagcaagggattgtaatggttttttctgctcatacaacagcaggagttacgatcaatgaaaatgcggacccagatgtgaagcacgatatgctaatgaggttgaatgaagtttatccttgggagcaccctaagtatcgacacgctgaagggaattctgcttcgcatctaaaaacgagtacagttggggcttcgcaaatgatcatcattgaagagggaaatttgattctcggcacgtggcagggagtttatttctgtgaatttgatggtccacggaaccgtactgtttacattaaggttatggagggataatgatgatccgagttctattcgtatgtcttgggaacatttgtcgttcaccgatggcggaagctgttctccggtccaaagtagcgaaagctggattagctaatcagattgaaatcgactcagctggaacgggcgattggcacataggcgaacccccacatgaagggacagcggacattctcttaaaacaaaacatctcaacagatggtataaaagcgcgacaggtgaaagaagctgatctgcttcactttcaatacgtcatcgcaatggatgcaggaaacctcggagaacttcacgaaatggcaggaattaatccaacaacctctatttcaaggttaatggattatgtgagtgaaagtgaaatagaagatgttcctgatccttattttgaagggaattttaaagaagtttatgaaatgatagatgctggttgcgagaaattattggaacaaataagaatagaagaaggtttatgaaccatatcgaagaagcgattagagaaagcggtgacttgacttctattgagatgatagaaggtgtgtcaggcgggtcaataaatgaagcttactacgttcgaacaaaagatagggaatactttgcgaaaagtaattcatcagcaccaggagatttttttcacgctgagaaaaatggtcttgagctgttaggacgacatggggtctcggtacctgaacctcttttaattctgtctcaaggtaatcatgagagtgtttttcttatggaatggattcgagctgtgccatcgagcaaagaaggggaccgagcactcggaagtctagttgcatccttgcatcagaagaaggagaattttgctggtttaaatcatgccaatttcattggtgaattagatcaaataaatgaaccatccactgattgggttactttttttagagatcaacgacttgggacaatgcagaacctcgctcgtaagaaaggaaacctctctaaggaacgtgatcaacgtttgtcaaagctccgtcaacgtcttgatacgattattgggcatcatcccgatttttcgctcttacatggtgatctttggggaggaaattggctcatggctgatgaaggtgcttatttaatcgatcccgccgtttattatggagaccgagagatcgatattgcttttacatatttatttggtgggtattccaaagcattttacgaccaatatcaagctgactttccgctagagaaagaatttaccgatcgtattcccatctatcaattatattatttacttgttcatctgatcttatttggggaaagctatggaagtgcagtggatcgcatactgaaaaagtatacgttttgaactgcagtggtttcattatgaacgattaagggaaataaatgtcatcttaatctaatgaggaggaaatgaaatgagtcaaacatattcaggcggtagtcaaaataaactgtttaaggcagtccttattggtggactggcaggtgcccttatttcacttctagatcgagggacgagagaatccattcagaatggttcgaaaaaagctggaagtgttttgcgtgacgttaagaataatccttcttactatacggataaatggaagcaaacggtggatgatgctagtgagcttatgaaggaagtacaagatgatatttcaactttatcagagaagtttaacggactgaaagaaagttcagttgaagcatttaatcttgtgaaagaaacgcagcacgatcttaaagaaataggctcgagagtagttgaagccggtgaagagctaactggtaacaacggcgatccaatgacacattaatcgagtcccaggagggtaaatagtgaatgcatcgctaggacaatttacaaaacagcttttttcaagaataaaagaacatcaggtgactgacttgtcagcgcaacttgcttattatttcttgttatcgctgtttccttttcttatatttgctattaccctcctgactcattttgatttctcacaggaccaaattcttgatttaatcgctcaatatgcaccatctgagtcatttgtcacgatacaagagaacattattcttgaagatggagctcgaaaagggcttttatccttcggggttatcgcgacaatatggtcagcttccaatgcgattaatgccattattaaatcacttaaccgtgcctataacgttcaagaaagtcggcattttctacttgcaagaggcttgtctgttcttttatcgttagcaatgatttttgttatagtcgttgcattggtattacctgttttcggtgaaacgctgtggagatttttcgttgcattttttgagttgcctgagtcattaagctttatgtttgggattattcggtggattttaagtctttcaatcatgattgttgtatttatgtttatttatttctacgcaccgaataaacgattgaattataaagatgtgctgttaggatctatctttgcttcagtgctatggcaacttgtctctttggctttttcttattacattaataacttcagtaactattctgcaacgtacggaagtcttgggggcgtaatcgcgctaatgctctggttttacctgacaggtcttgtcattattattggtggcgaagtgaatgccacttcgaattattttagaaaaaaagcctgatagcgcgcgtggcgctatcaggctttttattttaataacctcagtccgtttaatatcacaagtattgtactaccttcatggccgagtactcctaaaggaagggtgaggaattgaaagaagttagatgcaattaaaataagaataacggaaatagagaatatcacattttgttttacgattttgtttaatcggtttgaaagctttacggctcgtgtcagttttccgagatcgttcttcataagaacaacatctgcggtttcaagagcgacatcagtaccctgccccattgcaatccctacatcagaggctgcaagagcgggtgcatcgttaatgccatccccaatcattccaaccgtttcgtatttctcttttaattctttcattcgagttactttatcttcaggaaggcaattcgcgtaataagtgcggatcccgacttcttcagcaatggcttttgccgtttgctcgctgtcaccagttaacatcacggtttcaattccacgcttttttagtgccttcaccatattcgccgattcgcttcgaactttatcttttaaagcaatcattccagctatgccctggttatctgcagcaagtacgattgtttttccacttgattgcagctgacgatagttttcttcaaataaattgaatccatcctcttcagacaagaacgctaatttaccgactttccaacttatcccgtcaattgtggcttccacgccccatccagaatgatccatcatatcatttggctctagaaagttgacgtctccggcatgatcgacaatcgctttagcaagtggatgtgttgattgtcgctcgattgaagcgacgattttgataaacgtcttttcattaatatcagttcgggtgaaaacatctgtgacgacaggagagccttccgttaacgttcctgtcttatcgagcgcaacagccttcattgaacctagctgttcaagatgcacgccgcctttaaaaagaataccatttcgtgcgcctgcagaaatagcagatagcgtggcaggcataatcgatgcgactagtgcacaaggagaggcgacaacgagaaagaccattgcgcgatagatcgtttcatcccatgtccagccaagtagaaaatggggaaggaccatgagaagtgcgcctaccattaaaacgattttcacgtaccagccttctaacttttcaataaaaagctgggaaggtgctttttgatcttgtgcttcttgaacaagtgcgataattttttggaaaaccgtatcctgactacgtttggtcattttaatcgataaatgaccagagatatttaacgttccagcaaatacctcttcgtcaattcgtttaataactgggatggattcaccagtaatagccgattgatcaagagatgtctgcccttttgtaatcacaccatcagcaggcacccgttctcctggtttgactagaatgagatcccctattgaaagagattctgctggtacaatgcgttcttctccattagatagaatcgttgccgtctctggttgtatttccatgagagactgaagttcacattcgcttttattaagagtgtaagtttcaagggctccactgagtgcgaaaataaaaataagaatagcgccctctgtccagtaaccaatacttcctgccccgatagcagcaataatcataagaagctcaacatttacatctttttcagtaaaagagtcttcaattccctctttcgcttttgcgaatccaccgattataaatgcggtgatatataagacagattcaatcgtaggagagtagataccttctgtgatccatgtaaatgcaataataaccccacttaacagggcagcacctagttcgccatgtttttttaatgtattccaccagaatgacgagtgggaagggtatgtgtctgaccgtaaatttatctgttccattatcattcctccttttcctaattgagaataatagtcatcatcattctctttataaacgtgcaatgctgtgaccacttgtgaggtcacagcatattaagtactgacaaataagtcatttgatttcattactgagaatgaatttcaatagattagaattattattatgttttaatgattttattctaccacatacttcacttcttgactatgtttataatcacaattgggctgatggattttacgtttaaggataggaaaaaggagggaatggaaataataacaaagcaatgatgaggaggagaaaaatgttgttaaaagagaagctagatcagttaaaaaatgctcatgttcaaaagcctgataaagtgtttaccttatatttaaatacggaccgtcgtgatgctgaccgacaaaatggcgaatggaaaattcagcttaaaaacggctttcgtaactttgaagattatttaaaacaaagcgataataaagaagagcttgaaaaatacgaaaaagtaaaagagaaagttcaagatgagctcaatcgcatcgaaaatgatttaaagcgtggtcttgttattattgcttcctcagacgaccaaatatggtttgtggagcgcacgcaggtaccagttgaaacgaatatatattgggaagaagaacctcaacttgaagcgctagagaagttgaaaagtgactatccgaacacaggaatcattctcgttcatcatgactatgtacgtatacttgaaacagagcttggttttctaacaaaaagcgaagagtatgcctgggatcctgacgaagataactggaagatctacgaaggaaccactggaaatgagaatattgctggaaacggtagtacagcccagcgagagctttatgaagatcgcattaaagccaatcgtgaaagatggtataagtcaatggcagcgaaacttgacaaaaaagcgaaaaatcgtcagtgggaaagaatatacgtagctggtgaaaaagaagaagctagtgaattgaatgagttaatgaacaaagagtcgatcgtcgtcggaaaaaattattctgataaacgagatgatgaagtcattgagtcgctcgtttcctaacgagaaaagcacccattcgggtgcttttgttgatttaataagcttgtttcgttgctttaacagtaaaaatctttggaatacctcggtcatggagcttgatatttggttcctctgatacttgtttaataatcaaatcctcatctgccatgctcgttagaatttcgccgagcgtccattttcgctgcaagaccacgctgtcttccttttcatttgttagatgcttctcataagcgactacagttttgtgaattgtaggatcaaaataattaccatccactttatgcttcttacctttagatgtaataagcttagtagaaatcggatgaaagtcttgaaggacaaacgtgccgccgctttttaagaggcgagacactactttaaacaacggatgaagatcaaggaaataatgtaggatcccgagctccatcacaatgacatcgaactctccatcatgatgatgatccatctttaaaatatcagctacaatataggtgaggtcaataccacatttggtggctacttcctttgcgtaacgttcattttcatatgaaaaatcaatcaccgttgcatcggcgcccataagactcatcgctgttgctttcattccgtgtgaacccattagattggctactttctttccttgtagtgcaggaagataaggcaataaggatttcattcgtgaagttgggttttcttttaactttattgcagcttcttctggagtaccgaaacgatttaataaagcttcatatgtttgttgattccaagattttttgttttgttctgtcacactttcttgaacgttatttaggtgtgcttcaacagtcatgcgccattctggaatctgctgatagtagtaaagtgaaaggcaagggacgcttgcttctttaaaatcaacataaactaagtaagggttcgttcggatgaccgtgttatatgtgcattctatacgaacagatatatcagcaatctgataaacagcataagaaatatcagccttgtgttctggtattgcattgccgtattttaggttgaattcctgaagtacggactcaaaagcatcccattgaaccgaaacggctatagaatgaggtgcatcaactgcaccttgaagccaaagtgctgtttcgtttataaaaaaataaggaatgttatagttattcaggtctgaagatagttgcaataagacattttctttggagctcggcatttttccacctcaattttattacatgaacatattttgtatagaatactatagcatatagacagcccataaggcatctgaagaatagggagagacagagattatgcagactcagaatgaaggtgtgtcaacgcaaaagtgggtgaaaagaggcggatccttcgcattaggtatctacttacttgcacttttctatgcaacgttgtttatttacaattattatccgtatgggaaatccgttaaccttgttctatttgatagcattaagcttatgtgggaaagcggaagttattggcttatcttaaagaatatcatcggaaacattttgctttttatgccgcttgggtttttgatgccactagtcagtaaaaagggcaaatccgtccttatcattggaatcatcggatttttaacgagcacggttattgaattacttcagtactttgtggctcaccgtatttttgatatagacgatattctcttaaatgccctcggagcacttgtaggttatggggcttatcatttcgttcttttcatctatcagaaaataataaagagaaaataaaaagaggcagcgaattcgctgcctctttcatacctcagtcttctttttttgctttatcaagaagttttgtaattcgtttcgtaagcattttacgtccttctccgcctgcctggaaatggcgcagtttgccttctgaatcaaatacgtaataagcagggacatattgattatcgaatgcatctgttagtttgtggtcgctatcgacaaagataggctgactaatatcatgctgatcggcaacctttttgatttcatcaagatcaagatccttctcagaacgtggcatatgaacggctacaacattcatgtcttcactatactcgtcacgaaattcatttaccattggcattgcttctttacataggccgcaactaatcgaccagaagtgaacaagtgtaagtggcttgttgccaacaagatcacttttcttaacttctccgttaaaccattgtgtagcgccttctaattcaggcatttcttcgcgtagtttcattctctatcgactcctttattcggaattaattataatcattatcagataatcacagttattattatagtacatatccatcataagtcaatgaaaagggttcattccatatagtattaaaatggctataaaaacgtttctttactcacgaagtagaatattgtctcattggctcaggatttttatgaacagccgttgcaataaataaagttagcaacataccgctaatcgcatagaaaatgcttcccgtagcaaaccaatcgataaaaaccccaccaagaaatggtccgagaatactgccaataccaaagaaaatgcctgctaaaatgtttcccgtcggcagaaggctagtcgggagaagatcggctaagtaagtgatgcttaaggaaaaaagtgatccaaccatcattcctgctaggaagaatagtgtaaatagcaacggaatggatgttgtaaagatcgcacttgaaaaacaaacccagccaatcaaaatactaataagcaggatgtttttacgtccgaatttatcactaatgatcccaagtggcatttgaaacaccagacttcctacaacaaatgcgggaagtagaatcgaaaccgcttttacgtctaatcctgctcgaagcgcatacacgggaaaattcccatgaagggaagcttcgaggaaaccgtatccgaaagaaggtaatagagctgcccagccgatttttaatacgtgagcatatttagagagaacccgttcagagccatgcgttaatggatcagggaactcatttttaatttttgatagtaacaaccaggtaacgcaagcaattcctgaagcaagtaagaatggaaggtacaaggaatattcaactaagatcgtagagaggggtcctgctgcaaaccctagcccaaaagcagagccgtatattgcaatgttccttccccgtttttcttttggagttgttgttgtaatccagagctgtgtggcaaagtgtagaaggttatcaccaattcctacaattacccttaaaataaaccagaaccagaaagcctgccagataggaatcaacgtaattgaaacgataacaagaaaaagtccaacagcaatggcaggtttgtacccgtatttgcgcacgggtttttcgataaatggcgaagcaaataaaattccgatataaagagcagaagcatttaacccattcatacttgacgaaacgcctgcttcttcaagaagaatagatagtaatggaagtagcataccttgagaataccctgaaataaagacaatcgaaattagaattaggaaacgatatcgttttgattcaaacaaactgttcacactccatctggccaaaaaaggaaattcttatcagtgccattataatagaatggaaagaaaagggctaccattcgcaatttttcatttcctgatttaaaataagagcaacgtctagtaacgaggagtgggcatgttggaatttaacatgaaaaaagaagaaacaggttttacggctgattttgagtatgggacacttcacatatctggagatgaacagtttggctttcgaccttaccagctgcttgtctcgtctgtagcagtttgcagcggtggtgtgctacgacagattcttgataaaaagcgaatgaaatatgacgatattaaaataaatgctgatgttacacgcaatacagaagaagcgaatcgcgttgaaaaaattcaccttcactttacgttatatggtgaccttgacgatcaaaaggttgaaagagcacttgaattaacgaaaaaacattgttctatggcgcaatctgttattggcagtattgacctggaagaatcctttgagattgtagctgaataagaaacgaaagaagggacacggccgtgtcccttctttcgtttctttcgtgtctgctctacaattctagcgtttctggagtgttttctccctcgttcatgaggcgaattgtatcaggcttgattttaagaacgatgtagttaggatcttcaggtgaatcaaaccagcgtttcagttcatccccccaaagtttttccttcgtttctttggaatcatcgatggtaacctgcccctgtacttctacgaaacgatcatgccatccttcgccatcgtaaccaagtaggacatgcacatttttattttgttcgatgtcttccaccttatgtgtttccttacttgttggtgtcatgagcgttaactcgtcattgaagaaagtcataaatcgtgaatgtggtttattatccttcactgtacttagcgtaccaacatagtgagaatcgaaaatgcttaaaaccttattttttatttctgattgagacattgccattacaaattctcctttcgaatttaactctagtcttaatcttcctctattctcaaattctaaaacacctgaatatgccattatttcctacaaatcattgtggcgcattcgatcgtttttcaaaccgatactaagggtataccaaagtgagattctaaaacgttaagtaagaagggtatcagatgaacaaaacacacgactttactcaaggaaatattgcgaaacaaatggtctttttttcgttacctatattcttaacaaatttactccaaacgtcgtaccaatttatcgatagtatttgggtggggaacttactcggggcaaatgctcttggagcgatttctattgcagctccagtgatctttactgttctctcattcattatcggagtgaatagtgcgacgttaaccgtattgtctcagagaaagggagcttctgatcacagcggactaattgaatcgctaaacgcatttgttgtagctttaacaattctctcggttctttttgggattattgggtttcttttcactgatcccattctaaaatttttaggaacgcctgatgagatatttgaaagtacgaaagtgtacttacgaattaattttcttggtattttgtttttatttggctataactttattgggacagttttacgggcgcttggggatagcaaaactccgattcgcttcgtactgtttgctgttattttaaataccgtattggaccctcttttcatttcttattttaattggggaattgaaggggcagcttatgcgacaattctttcacaaggggcagcctttttgtatggcgtgatttattcagtatggaaatctaaaattccatttacaattccgcatcttcctgactcaaaagaaattaagcgtatttccaagctcggtataccagcaggattgcaaatgatgaccgtatctgcaggagtaacagcgattatgggaatagtagcgagctttggtacgcaagtagttgcaggatttggagcagcacaaaggcttgatcgaattattatgttacctgcgtttacacttggagctgcagtgaacagcatggctggacagaatattggctctgggaaatgggggagagtctctgcgatctctaaaaatgggattatcttaattctttccgtttctcttaccattagcgccattatctttttttctgctgaatcaatgattcgcctgttcattaacgatccggagaccattgtatttggtgaaaactacttaaaaacggttgcctttttctatccgtttcttggcattaactttgttttaaacggcgtcgtgaaagcagcaggtgcgatggttcaagtgctcgtacttaatattatttcgttctgggtgcttcgtgtaccgcttacttaccttttctcaaaatggttaggagcagaggggattgcatatggaataggagtaagctttatcatctcaagtctattcgcgattggatattaccgttatgggaaatggcgtgaaattgatttgtttgaaggtaagaaagaaacaagtgatgacaaaatccctcaaaaaaagaatggttaaatgctcaaggaaagtatcgtcttttagctgtttcctgcgttacaatggacaatggagtctatgcagttaaagagaggatgccatcattgaaaatgaagcgctttttgttctatgtagttgggttattcgtattaacagctgggataacattaaccatcaaatcagatattggtgcgggggcctgggatgcccttaatgttggattatcggaaacaatcggatttacggttggcagttgggtcattattgttgggataatcttgattattgtaaacgcaattctaatgagagcgtggccggatttctttgcactcattacaattattgttataggtttattcattgatttttggttattaactttatttgcagactggacaatttcggatgttttcgtagcatacgctgtttttgcaattggaatgatcttggttggacttggaatcgcaatttatcttcaagcgaaatttgccgttattccgattgatgggttaatgctcgcgattcatcataaaacaggtctaagcattcgaacttcaaaaacaattggtgagctaattgccctacttgccgctgttattttaggaggtccaatcggaatcggtaccctcgctattacatttggtattggtccgcttgtacagtttttctatcctacctttgagaaaatgaacgcttaagcgttcatttttttgtataagatggatgaatggacattaatgacgtctaaggcttttaaatatctcactttgttggataaaagaaaggtttctagaaaaaaatagggatatgagtctgaatcatttctaatgaacagttgccaacaaaggagaattaaaatgaagaaattagtcttaattatcctacttttgacctttatctcgccactaaattccttagctgccgaggggaagaaagcaggaaataatcaatcgctacaagttccagattcgacggtcaatatttcaaaggagaacacatacccgaaccccgcccaagatttacccactttacagccgagtgaactaacgaaagagttgactggatcggctgaggttcgtattgaaaaccctgagcttattcagatattaaatgactcctcaatttcaccatctaagcttgcgattggctatcgtgcaagcatctatctgggcaagtgggcgctgaattatgactctgctgagacaaatgttaattggcaatataagcaggcgaatgtgaaccgagtggacaatagaggtggaagtggcccagttcaaatgacgtaccgtcaagaagaagagaaaaaagtaaacggcggcctaactgcctcaattcctgatagtgaagatgtaaagaaaatgatgatgatgaaggcttctgaaaaaacgaaactatctctttcttttcaaacaatgattgggaaagatacgaaaaaggggaatgtttataacgttggtgcaaagcattatgggacactgacaagttttgtacctgcagtgaatgagaaaggcaaagtaacctatggtgaagtgtatcttgtgttaaaaggaagcaaaatgaaattggaagtacgaaatgtaacacagcagggaattggggcatggatacctgttcaggattatttaagttttgaatttaatactcgtcaataaccagcagaaatgctggttatttttacgaaaaagggcaattcttttgagattggggataattacctgagagagttgtaaggtaatgcggatagaaagcagatcaaacttcacacactaaataggagggtagagaaggaggggttagatgaggataactttattaacgattgctctatttgtgggcacgatgactggagcacatgcgatcgataatgaatcgcatgattggtattttaaacgtagtaaaaatcatgcacccgctacgacagaacctgaatttcaagaattgctaaaaacgtatgatagttattttattggtcagtcagagaaaaaagagctatatatgacttttgataatgggtatgaaaatggttatacagatgagatcttagacgttttaagaaaagaagaagtacctgcaactttctttgtaacgggacattacttgagagatcaacccgatcttgtgaagcgaatggtgaaagaggggcatcttgttggaaatcattcgtggagccatccagatatgacggcgatttctgatgacaaaataaggactgagttacgaaaggtcaaagaggaatatgctcgcttaacgggggaccatacgatgcaatatttacgaccgccccgtggggtttttagcgagcgatcactcgcaatttctcatgaagaaggataccataacatcttctggtcactcgcttataaagattgggaaacgaataagcaaaggggtagtcagtatgcgtatgactccatcatgaaacaggtgcatcccggcgctatcatgctacttcataccgtttcaaaagataatgcagaagcgcttgaaaaggttatccaagatctaaagaaagagggctatacgtttaagagtcttgatgatcttgttttgaaggaaaaactgccaactatgccttagaaagactgccagagatggcagtcttttgcatgtggtttggaagagggatctacttcgaggtacaactagtaatcaagtgtggtatttgcgataatatacaggacatgatgaagggggcggtatcgtgtgggctgagaaaatatttcctcaaaaaccgtacaatgtgaatcgacttttccgaagattaaacatggatccgcttcagtgcgttgatgatcataatcaaatccttaaagttccgttaatcatacaacaagaaaaaggggtttattctgttcagttcattggaacagacgaacaaccttgctttgagataagtggaaaagatgttagcaaaagagacgaagttgttactcgcattaaccaaatgtttgactttcaaatggatacacctagtatctattcaacattaagaaaaactaatattcattcattagtcgacgattatataggtatgcctattatttgtgagcctgatgtgtacagtgctttactaaagaatattgttcatcagcagcttaatatgaagtttgcttatacactaacgtatcgctttgtgacgcattatggtactaaaatggatgacgtatggttttatcctaaccccgaggttgtaagcaagcttaagatagatgagttgcgagagctacaatttagtaaaagaaaagcggaatacgtgattggaattgccgagaagatgctgtcgggcgatcttgatttggagaagctatatacacaaacaaataatgaagtgtatgatgagatgcttccaatcagaggtgtcggcccgtggacagttgaatgtgtccttctttttgggttaggaagaaaggatattttgccagcaggtgatgtaggcattcaaaatgcactcatgaagtggtatcagctaccaacgaagccgtcaaaagaagaagtactggcttataaaaagaagtggtcaccgtattcgagctatgtttccatgtatttatgggaaagcttaagcggttaaatagaaggagagattttgttggataacaaaaaggtgaaagggacagggcttacgaatggtcaaacgattcctttaacaattaaacgattaggaataaacggagaaggtgtaggattctttaagagaactgttgtttttgtaccaggagcactgcctggggaagaaattacagctgaagtgacaaaagttttccctaaccgagcagaagccaaagtaaagcggcttcgtaaaaagtcaaaggatcgtgttactcctccatgtcctgtttatgaagaatgtggtggatgtcagctacaacatatgagttatcaggctcaattacgtgagaagcgtgatatcgtgattcagtcatttgagcggcatgcaaaattaggtgaaaacgatttaactataaaacccgttatcggaatggaagatccatggaattatcgaaacaagagccagctgcaggtcagaaagcaaaaagggaaggtcattgcggggttatacggcgcgggttctcatgaacttgttgaactgacaaactgccttgttcaacatcctgaaacaaatcgcgttacacgtcaggttgtaaacattttacaagatttaaacatttcaatttatcatgaaaagaagcgaaatggtcttgttcggaccattgtgacaagagtggggtttgaaaccggtcaaattcaacttgttcttattacttcagaagaaacgattcctaggaaagaattgttgattaaagaaattaagaaaagactgccagaagttaggtccgttattcaaaatgttaatgggaaacgaacttcgctaatatttggtgagaaaactcttttattagaaggtgaagaagtgattcaagagtcattaggtgatttgaatttcgaattatctgcgcgtgctttcttccaacttaatccacgtcaaaccgtaaaactatatgatgaagtgaaaaaggccgctaatctgactggtaacgaaaatatcattgatgcttattgtggagtgggcacaattggtctttggcttgctgaggaagccaaagaagtaagaggaatggacgtcatcaaagagtcaattgatgatgcaagggagaatgctcgaagacacggttatgagtcaaaaatgacttatgatgttggaaaagcagaagaagttgtaccgaagtggataaaagaagggtttaagccgaatgttatcgtggtggatccacctagaacaggttgtgatgatactttattagctacgatggtgaaagcgaaagcagatcgcattgtttatgtatcgtgtaatccttctactttggcaaaagatgctagctacttaatgaaaaaaggatataagctggagcaattgcagccagttgatatgtttccacaaacaagtcatatagaagtagtatccgttttcaagaaaaaacagcgctaaaatcgtcagtcgcgtagtctcgactgaaaagcgaaaatagtcatcaacaatttccacagacttatacacacgttaaaaagagtttacacgcattactaacaaatttatcaacattatccacaaaaaatgcagatattatcaacagttttagatgttaataaattttcccgttgtgtcgaggatcatgaaatgttgtccacattattaacaacttgtggataacatgttgttaacttcagaattgcatttttgttctgaatataaaaagggaccattgcggtccctttttatgttatttgtttttcttgttacgctgatctgctgctcgtgctctttctgctgctttcgcatcagctgaatcgaattcacttgcaaattctacatcttcgttttgtgctgatggaattgggtttttagcctgacgtttttgtttaccttctgaataatttggacgttttgccatcttaatcagctcctgtaaatgtgtttggagaggttctctccactcattaggatggctttttatcagttaattattcatatttacttatgaccagccctgtcagcgcgtttaaattcacgcccaaaaagtacatcttgtgtttttgttaacgtcattttggattctttgttatctctgcctttccgtttatccacaataatccctctcttctttaagatggtactagcattgccatccaaaaaagttctatgcacatgtggacaaaggacatgtgcaaacgatttgttgttagtcaactaaaaaaagttcctctgaaaggaacttatgcttccatttgaatctcaacagagtctattccctcacgcatcacatgtaggtggtaattgtcgcgttcgatttcatataaatgatatgatttttctccggcgttgattttctgataaatttctggccatttgttattggctttttcaacatatgggattttttctgctgctttttgcgagcgcgtattttccttgttgatcctcataaaaatggttttgatttgcttatcaaaaaacaactcgttgaaaaaggcttcttttgcaagttgattataccctttgccgtgatagggggtgccgatccaggttccgagaaatccagtttcttgttcaatatcatacagattaatcgtaccaattgggttaccccattcatcaagaatggtacgagaaacaagctcaccctgttcctcagcttcaattagctgttttgttaagaacaaatactcttcgtaagaacttgctttatgacgcacgaatgggaagacagctgggtcaaccatcaagtcaaatagcacatgacattccgacaggtcacgatgtttaatcatgagtttccctcctgtcgagggcagacgaatccccaccctcgaataatagtatgttgaattattattcggggtgggaatcgaacccactaggaccagtcattgctggtggcgcaccaattgccttcccatattcagatatgaagttgttagttcattttattttaattacaaaagtatcatactcgatttattcaaaaaaagatactagtttttcgcgtatttttcttagtgaaatgtaaactttttgtaagcctctatgtgacaagaaaaccatagtaatttaacgaataatattcccgttaatcatggttaaaagagggcgagcatcatactgaaaaggatgattggaccagagtactaagtcggcatcttttccgacttcaatgctgccaattcgatggtcaacgccaaggctttttgcgggattaagggtaatgccttcaatggctttttcttcacttaatccttctctaaccgcaagtgctgcacaaatgtttaagtattggatcggaacgtacggatgatctgttgtaatcgacacttcaatcccatgactatttaagattccataagtagcccatgtcttatttttaagttcgattttagaacgtctggtcattgatggtcctacggttactttcaggttttgtccactaagttcatcggcaataagatgtccttctgtacaatgctcaattctgagatcgagattaaattccctggcaaagcgaacggctgttaagatatcatcagctcgatgagcgtgtattctaacagggatttctcgattgagcgctgcaattataggtgctatacgcggatgctctttttgatttgagcgacttgcatcatagaatgcttcacgcagtaatcccataatgcccattcgggtaattgagtcattgtttgattgactatgcactcgtttgggattttctcctaaggcaattttaagtcctgctatttctcttacaatcattttctctacattttttccatgtgtttttaaaacagtcgttaagccgccaataatattggcgctcccaggcataacttgaacggaggtaacaccaaaggcaatggcatctttaaagccaacgtctaatggattaacaccatcaagcgctctcacatggggcgttagagcttctaccgtttcattggcatcatttccagcccagccagtcccttcatcatatagccccaaatgtgtgtgagcatcaatgaacccaggaaaaagatgataccccttcccgtcaataactgtcatttcaggttcctcaggtatagacggggatattttatggataagaccgtctttaacgagaacatcagcacatggtagtaatggggaagcaaccggatagacgcgagcttgcttaaataatattgtcatctcattcacctattatctattagttttaatgtttgacatagccgttattatgtttttatatagtatagccattatcgggaaaggttgctatataatcgagtgtagacagctaagaattgtattaatcggttttaagggcatttataggcttggtaagttataaaaaaacctgctgatattataccagcaggttctcgagagcatcttttaatttaatatagcggaaagggtagccgagttctttcgctttttgtggtaggacacattgaccttttaacacaattccactcttttctcctaaagcagcctgcactggcgcttctggaacaggcatccagtgtggtcgattgagtacttcaccgaccgttttaccaaaatcattcattctttttggttcaggtgccgtaacgtttaatggtccttgaactgattcatgatcgacggcaaatctgatcattccaacaacgtccatgatatgtacccaggaataccattgacgtccgtctccaagttttccacccataaataatttatatgggagtaccattaatggaagtgcaccttcttcgccaagaataacgccaaaccgagcaagaactgttcttacaccgtgattttgtgctttcattgcttcatcttcccattttcttgaaacatcagccagaaaatctgagccgggatctgtatcattttccgtaaatgattgatcaagagaggagccataaaagccaatcgccgaagcgtttacaagtacgcgaggtttttgatcaagtttgtctatgattgaagtgatctctctagttgcggagatacgactatcgagaatacgttgtttccgctcttccgtccatcgtccactattgatcgactcgccggctaaattaataaatgcatgaatattaggcagttctttttcaggctcagcgtcgtcctgcaaccatttcacatatgtaacaccttttttgacaggtttgtttgcaggattacgtgttaggatatacacagagtgcccatcattaacaaatgactcagttagagcgcttccgacaaaacctgttcccccggtgatcgcaatgttcatattattttcctcctaagcgtgcgcgatatacttctattacttctttacccataatcataatcctttaatcaaatgctcaaacttaatggctaatttcataaagtgctacaatggaactggaggtgagtgcatcgtgaaggttacacgaataacgactcagaaaaataataatgagcgtttttcaatatttattgataaaggatctggtgaagagttcggtttcggagtggatcaggatgttttgattagctttggtctccgaaaaggtgttgaattaactgacgaaatgcttgaaggcattcagtttgaggaccagataaaaaagggcatgaattacgctttgaattatctatcttaccggatgcgctcagaaaaagaagtgaaagattaccttctaaaaaaagaggtgccagaagaagcatttccgaagataattgaaaagcttaaacgctatggctatataaatgatcttgagttcgcaatcgcatttgtaagaaccaagataaatgcgggtggaaaagggccgtttgttattgcacaagaacttaaccaaaaaggggttactaaaccaatgattgataaatcacttgaagaatattcttatgaacagcagctcgagattgctaaaaatttagctgaaaagaaagcgtcaaagcttaagaagtcttcagcaacggaacaaaaacagaaagtgaaccaggagctgagagcaaaaggattcgaccgagatattattcaagaagtgatggagcaaatcaatttagataaaggcgataatgaagaatgggaagccctcgttatgcaagctcaaaaagccgaacgtcgctacagtaagctaggacgtagagaatttgatcaaaagatgaagcagtttttgtatcgtaaaggattcccatttccactaattaataagtaccttgaagaatttaacgatcaataaaaatttctttctgccccttatcttcctcaatgatttgtcttgctttctctgaagctgactttaatctagtgggatcagatatatggttcgaatgagaccagaaaggggtattcattccacccatatagaccgccgtagcgcttacacctgtgctttcaagttctttccacaggctctctgtaaatcctctcacagcatattttgaggccacataaacagtttcatgtttctttcctttcaagcctgccgtagagatgatattcataatgcgccctttattttcttttaatatcggcagaaatgcttgggttgtgaaaatcgtcccttttacatttgtatctatgacatgatgaatgtctgaaatcgttatctcttctaaagaaccgaatgtccctattccggcattatttacaagaagatcaatgctaaggtcatcttctttcagtttcttagtcaaatgcgctagatcatcagggtttgtaatgtcgcattggtagctcagacatgtcgcgttttctttctcgatatgttgacagatagaggtaagtttttcttttgttcttcctactaataccatacgatgtccctcttttgcccagcactttgcaagttcagcgccgaggccagacccagcacccgtaattaagatggttttcatagtaaatcactccttgatgtaagcgtagcatatttttgtcaggaagcagaaaataaactatacttgggggaagaatagagtagtggaggttaagaatggaaaagcgtttcagtgaaatgagtgagcaggaattacgaagtgaaatagcacttcttagtgaaaaagcacgtcgagctgagcagatgggaatggtgaatgaatttgctgttcatgaacgcagaatagcccttgcaaaatcctatttaatgaaccctgagaactttgctccaggtgagaagtatgaaatagatggcgacccaggttcaacatttacaatcgactatatgaacggaacgtttgcctggggatatcgtgagggaaataaggaaatagaagcatttcctatctcgatgctcattgaaaaagagcagcagtaatgctgctctcttcatttctcatttctaagatcgttttcgcgtttgcacttgaagaacgatatcgttatacgtttgctttgattgtccatttacctgattgtgcgcgtgttttgggtttgcagttggagattggaatggatcctcatatttcgggtgaagccgatttcggttatttttacccatagctgctgcctcctatatgagaaaattatccctgacggttgcctgtacgattagacgcgctcatgcgctcctgtggatgagtgttaatcgatccgtcagctcgtttcgatgcatattcttcttttgcgcgtggttctccagaaaatttcgcatctggaaaaccggtttttttgtttctcatctttgtgcgcccctttccaatatcgtgttgtgaagcaggcacacaattagtatgcgaatcagaacgttatgttatgtgtggtttatttaatttctacgttgaaagtacaacatgaaaggagcatgcctcatggaagatctatttcaaaggcttactcataaccttcttgagaaaaacgaccatctttcttatggacaggcaagaacaatggtggagttactgtgggaggattttgaatcatcaagagcgaaggctggaagagagtataaaggtcaagatgtaacagaaaaaatcgtgaaacagtggattgattattatggaccagttcttcatgattttatgatgaataatccaaaatacaaaggatattttggagacgatagaagtataaagcactaaatagaaaccggctggacatttttgtccagccggtttcttatataatcctttcaatgagtcacttagcagtgatcaatcgacagcaggatccaatttttttctaagcgtgtcttcactgtatacccaacctgtataggaactagtaatttcaagctgatcttccatctgtacaacagcaacaaaaggatagtgacctttattgcgatagcgaagatcgataaatcgcacttcgtatccaacttctttttcttcaatttcccatcgatatacgggtgaaaaagaaaggaaagcacttaagttcgggtcttcttttgcagattcgagtacaggcgttttagggactggcacccgttcaaattcatcttgaacgtgtatagtcgttccctcagcacgagcgacatagaactgtgtttccgacttaactgcaatatgccatctactccaacgaatcgtaggtgagacaatgacttccacggcatcaggaattcgttctcttacagaacggatcacttttttctgttctgaaatcctccatagataatagagaatgagaacgccgtatatctttaaaaaggtgaacccaggatttgcaccgacgtaccatagaatcagacctgcaatatggctgaggaaaataaatggatcaaagatatttatgacgccaagtgcgacccatctattggaaaatggtcgaatggcctgtgttccataagcattgaaaatatcgacaaacacgtgaatgaagacggcaagaaatgtccataaccagagatgaagccagtttgtttctggataaaaaagcatgataccactactaataataatgggccagagaaggactgcaggaatcgagtgggtaatccctctgtgatggcgtatatagacagcgttattttttaattttaatactgtatcaaagtcaggggcctgcgatccgattagcgccccaattagaacgctttgtgcggtaatagggtcctgcgcaatagctggatctaaagttgcgagagctccaatccccagtcccatgaccacatgtgtcccagtatccatagggtaagatcctccttgtgaagcagatcgattaagttgccaaaatcgcataaagtttagcgttctctctttagttatacccaattaaaacaaatgtgaaaagttaaaaggtgaatgaaaaggtatgatgagttattatatgtgatagatgaaggtggaggaagtttaaaagtgaattataatcgttctttaacaccatttactatatcatatcggagagttgatgtatgacagagaaagtgacagaccttttacatttatttgacgaacaaaaattccaacaagatcttattgcttggtttaaaaaagaacagcggacgcttccatggcgtgagaataaggacccttatcgggtgtgggtttctgaaataatgctacaacaaacaagggtcgatacggtcattccttatttcgagcgatttatgagcctctttcctacagtggatgcacttgcagaagctgaagaagcagacgtattaaaggcatgggaagggcttggatattattcaagagcgcgaaatctacagagcgcggttcgtgaagttgcagagtcctataacggaatcgtacccaatcagccaaaacaaatttctgatctgaagggtgtaggtccttatacagcaggtgcaattctaagtattgcatacgatataccggaacctgcagttgatggaaatgtcatgcgtgtactatcaagaattattggaatatgggaagatatcgcaaaaccttcagctaggaagacgttcgaagaaataacacgacgaattatttcaaaagacgacccatcatcatttaatcaaggaatgatggagctaggcgcaatcgtgtgtacaccacgatctccttcctgtttcttatgtccggtacaggagcattgtagagcttttgcggaaggatcacaggaagagttaccgattaaatctaagaaaaaagcgccacgccctgttccaatagctgtagtggcacttgaagataattcagggaaatttcttattaggcagcgaccggaaacaggccttctagcaagcttatgggaatttccaagcgttgaactgagtgaagggtcaaaagaggatcagcttcaaaatcatataagggaagaatatcaaatcgaggttgaaattgagaaagagttagctacttttaatcatatttttagtcatctaaagtggcaattaaccgtttataaaggatcgtatgatggtgaaatttctcctaagaactttaagatggtagagaaaaaagacttgaagaacttcgcttttcccgttgctcatcaaaaaatcacacaaatggttctagaaggagaggaataattgtggagttgaatttagaaaataaacgcgttttaattacaggtggctcaaaaggtattggcaaatcgattgcgaaggcattttatgaagaaggtgcaaaggtaggtatttgtggaaggaatcgcgaggatcttgagatggcgaaagatgaaattggcccgaaccttgctttattcgaagcggatataacagatgaaagaaaacgtgtacaactattggattcatttataatggaatttggttctattgatatcctcataaataatgctggaggaagcagtggaggagctattatggaaacaaacctctctgaatttcataaggcgatggatctcaatttctattcagcggttcacctcagtcaactatcagcagaaaaaatgaaggagctgggtgaaggggtgattgttaatatctcttctatttttggtcgggaatctgggggcaagccaacttacaatcattcaaaagcagccatgattagctttacaaaagcaatgggtgatgaagtaattcaagatggtgtgcgagtaaatggcgtagcaccaggggcaattcttcatccttcaggaaattggcaaaagcgcaaggaagaaaatccagaaaaaattgctcagtttgtagaaagtgaaattccaggtgggagatttggtacacctgaggaagtagcaaatgccgtcgtttttctagcttctgacaaagcatcctggatcgtcggtgccaccatcacggtagatggtggccaatcaaaatctaatttttaacgatgttaaaagccctccgtgagttcccggagggcttttgtttatcattttaatcaggcataaaggcagacagcccaccacgttgttcaatttctttcatgatttctctatgaattgccaggccctcactgtttaaataaggtgcaatttgctgcaaactgtggtgaaaaaaagaaagctcctggtcagcccaatcctttttcgccatcatggatagctcagtcatatctcgatgatccatttaagatcctccttttcgattatattttgctacagaaatgtatgtagtatgaagggaagttttgagaaaccaagagaggattttttattttttgaaatagcatacataagaatgtctcatctggatattctattgtttgtgggaggtgataagccatggcaaagaaaccaggacaaactcaagctggtacaagtattcaacacgtaaaacagcagaatcaacaagcttctgcaggacaagcaggtcagcaacaatacggtgctgaatttgcaagcgaaacggatgctcaagaagtgaaagctcgaaatgcgaagtctgctcaaaacaagcagcaagcatctgcaggacaagcaggacaagcaggtcagcaacaatacggtgctgaatttgcaagcgaaacggatgttcaagaagtgaaagctcgtaacgcaaagtctgctcaaaataagcagcaagcatctgcgaagaacaaccagcagcaacaataagagaacttcccatgcagggctgacttagtcagccctgtttttctttcaaatgattaaaggatgatagggattttaacgaaaacatcgaaacacttactagaaggaaggaggcttcatatgtgtggacgcttttccttaacaacagaactcgacgctctactagaacgttttcaaattgaacagacaactattgaaggctatgagccaaggtttaacatcgcgccatctcaacaaattccagccgttattcgagcaggtcatagtaatcgaataggaacattaaggtgggggttagttcctttctgggcaaaggatgtttcaattgcatctaaattgatcaatgcaagaagtgaaacagcagataaaaaggcaagctttaagcacgcacttaaaaagcggagatgcctgatcttatccgatggcttctatgaatggaaacaaatcgaaaataggaaaatccctatgcgaattcaagtaagaaaaggtgagccgtttgcaatggctggtttatgggaaaaatgggatgatggtaagctcacgcactatacgtgtaccattttgacgactgaagcaaatgagctaatggaagaaatacataatcgaatgcctgtcattttaacaaaggaagcggaaaaaatttggcttgattcttctgtgaatgatgtagctgaattaaatcagtgcctgaagccttttgcatcttctgagatgaatgcctatgaagtttccacaattgtcaattcaccaaaaaacgaaaaaccagaatgtatcatacctatttaagctgcttcccgttacaggatgagacagcacaagatttttgtttttgacaaaacctcctacttctctacagaactttccaaaggtatttcacctcacatatggaatttgtttgctgaagatgtttcgtatatgtgagttaacacgtttagtttgaaaggagaaggttagatgaccgagtttgatgagcttattcaacaacaactcaagcttgctgatcagatgatttataccagggaagaaatacagaagttagaggcgacgttatctggggcggatgaagcgatgaaaacgattatcgtagaaaaaaaagaacggctgtggcatttggaagaagagtttgaacgacttattgagaatgtcatctctacctttgaaaatacaccaatttattgatagcaaatgaggtgccattcaattcgagtggcgcttttattttaattttattttgttaagcgttataatggagaagaatatagatgagatgtaagaaatttgatgacagccatgtatttacggtaagaaagaaaggatactgtgagtctgcctatatgcaaaaggcattcatcgttttccggaatttcttaggaaaggagaaggagatgagtttcccaacgaccgggacgagaattcaaattcaaagctataaacatcgcggtacgcttcatcgtacttgggaagaaagcatcgtactgaaaggtacctcaaaagagatcattgggggaaacgatcgcattctcgtgacagaagctgatggaagacaatggcgtacgcgtgaacctgcgatttgctattttagtgcgaatcactggtttaatgtcattggaatgattcggacggatggactttattactattgtaatttaggtacaccatttacgtacgacgaagaggcgttaaagtatattgattatgatcttgatattaagatctaccctgatatgacctttaaacttcttgatgaagatgagtatgaagcacaccgcgaagagatgaattatcccgaagccattgaccgcattatacaacaaaatgtaaaagagctgatgaactggattcatcagcgtaaaggaccatttgccccaggttttgtggatcaatggtatgaacagtttctacaatataggtaagaaaaacctgttgaatgtttttcaacaggtttttgcatgatataaaaaagcacgtgaatagctaaaggatgatgccatctgggtagtataaaaagatatatgactttcgtcaggccatataaaaaacaaattgggattacgattggaatcggaatagtaaagtttggaattcctcttcttcttccattgattttaaagtatgtcattgatgatattatcaatgcagaaatgccagctggggataagtatgagcaacttctttggttgatgggaggagctttctttctattcgtcgttgtcagaccaccggtagaatacttccgtcagtattatgctcaatggattggaagtaagattctttatgatataagagataaattattttctcatattcaacaattaagtttgaagttttactctaataacaaagcaggcgaaatcatttcaagagtaataaatgatgtggaacagacaaaaacctttgtgattactgggatgatgaatgtttggcttgatctcattacgatcgtcatcattatcggtatactatcgtttatgaatgtctggcttacgcttgcagcaattgttcttcttcctctctatggactttcagttaagtttttctataagcgtcttcgcgacttaacgaaggaccgctcacaagcacttgcagaagttcaaggtcaccttcatgaacgagttcaagggatgtcagtgattagaagttttgccctggaagattatgaacaagatcaattcaacaaaagaaatacgaatttcttagaacgagcacttgatcatacaaggtggaatgccaaaacgttcgctgtcgttaatacgattacggatgtagcgcctcttattgtgattgccttttctgcgtaccttgtgatttcaggaggacttcaaattggtgagatggtagcctttgtaacttatatggatcgcctttatagtccacttagacgattggtaaactcatctacaacactaacgcaatccattgcttccatggatcgagtttttgaatttgttgatgagaaatacgatattgtggatagagaagatgctcgaaagttgagcaacgttcgaggaaatatacagtttgaagatgtttatttcaaatataatgaaaatgatcttcctgttctaaaaggaattgatcttgatgtaagggctggtgaaaccattgctcttgttggtatgagtggaggtgggaaatcgtctcttgttagtttgatacctcgtttctacgacgtaacgggtgggcgaattcttatcgatggcacggatattcgagattacgaagcaagaagtcttcgtgacaatatcggcatggttttacaggataatattttgtttagtgaatcagttcgaatgaatattatgatgggaaatccgaatgcttctgaagaagatgtcatacgtgcagcaaaagcagcgaatgcgcatgagtttatcatcagccttccggaaggttacgatacgcccgttggtgagcgcggtgttaaactatccggaggacaaaagcaaaggatcgccatcgcgcgtgtctttctcaaaaatcctcctattcttattttggatgaagcgacatcagctcttgaccttgagagtgaacatcttatccaggaggcgctcgaaatacttgcaaaagatcgaacaactttcatcgtagcacaccgtcttgcaacagtgacgcatgctgatcgaattgttgtcgttgaaaatggacaaatttctgagagcggaaaccatcaagaactgatgaaacaaaaagggtcataccataatctgttccaagtacaaaatttataatgattcatcaaaaagcatctattttagatgctttttttgtttaattatgcacattatcgcgtaaaagtgacaaagaaagacagaaaattacctcaatatacgttgccaattgattaaattaatgtaataatgataaacagattttagttaaattaaaaaattcagaatttatagaaaggggtgagggtgtggaacaaccagtattaaaagttagcgggttagaaactcacttttttacagatgatggagaaattccggcagtcgattctgttgatttttatgtcaacaaaggagaggtgcttggcattgtaggggagtccggatctggaaaaagtgttacctcattatccattatgcagctcattcaggcccctggtaaggtagtcggtggtgaaattacatacaaaggtgaaaatcttatcgctaaatctgagaaagagatgaggaagataagagggaatgaaatcggcatgatttttcaggagccgatgacatcgctgaatccagtcttccgaataggaaatcagctgatcgaaggaattcgaatacataagaagtggaacaagaaaaaagcctgggatcatgctgtatcaattcttaagttggtaggattgccaagagctgaagagctaatgaatgaatatcctcaccaattatctggtgggatgcgtcagcgcgttatgatcgcaatggcaatggcatgtgaaccagaagttcttatcgcggatgagccaacaactgctctcgatgtgactattcaagctcagattcttgagttgatgaaaaagttgaataaagaaacgaacacatcgattattatgattactcatgatcttggagtagtggcagagatctgtgatcggattgctgtcatgtattctggaaaaatcgtagagcaagggaaaactcaggatatatttcagcaccctaagcatccctatacgattggtttaatcgaatcagtacctgacgttcgcgttcgaaaagacaggctgtattcaatacctggaaatgttccaaaaccaggttctatccataagggatgtcactttgcaccacgttgtagtttcgcttttgataaatgttatgaagagaatccaatgctattagatgcaggaccggcacaacaggccagatgctggcttcatgaagatgccgagaaagcagctgtattagagagagtgaaaagctaaagggggcgcctattttgcaagaagcactacttgaagttaaacagctgaagaaacattttcccattcagggaggcgtacttaagcagcaggtaggaacagtaaaagccgttgatggtgtgacctttacattacataagggagaaacttttggactggttggagaaagtggatgtggaaagtctacaactggacggatgttgatgagactgcttgaaccaagcgaaggtgaagttctttttgatgggaaagaaatgacggccttaaacaaaaaggatcttcgtcaccttagaaaagatattcagatggtgtttcaggacccttttgcatcgcttaatccgaggcatacagttgaaaaaattatcgaagaacctcttattgttcatcagcttggtaataaagcagagcgtaaaaaaagggtaagagaacttcttgaaattgttggtctaagtgcctaccatgccaagcggtatcctcatcaattcagtggtggacagcgccaaagaataggtatagcacgggcactagcagttaatccgaagttaattattgcggatgaacctgtttcagcacttgatgtttcgatccaagctcaagtattaaatcttttagaagatcttcagaaagagcttggcctaacatatttgtttatcgctcatgatttaggagttgtccgtcatattagcgatcgcgtcgcagtgatgtaccttggacgtattgttgaaatggcagatagtgaaaagctttatttggattcgaaacatccgtatacacaggctcttctttcagccgttccggttccagatcctgaatatgggaaagacagaattattcttactggagacgtgccaagtccatcgaatccgccatcaggatgtccttttcacacaagatgtcctaaggcgatggacgtgtgcagctctgttgttcctgaattcagggagatagaacctggacaccatacagcgtgtcatctgtatgaagaagaccttgtataaatcacaaacatgactaagggggaagaacatgaagaaaaccattttttcattagtatttgtattgctactttcgattggtctagccggttgcggtggatcaaacgaaacgaatggcaatggcgggggtgactccggagacggaggcgaagaagcaggtggaacattgatctttggtcgcggcggtgactccgtatcacttgatccagcatctgtaacagacggggaatcatttaaagtaacaaagaatatttttgatacgcttcttgattacggtgacgataacacagatgtgcaagaagcccttgcgacagattgggaagtttctgacgatggtaagacatatacgttcacacttcgtgaaggtgtaaagttccatgacggtactgactttaacgcagacgctgtagtttacaacttcgaacgttggatgaatgggactgaagaagcgttctattactataaatccatgttcggtggatttaaaggtgatgaagggcacgttattgaaagtgtaacggcgaaagacgattacacggttgaattccaattgaagcgtccacaagcgccattcttgaaaaacatcgcgatgtctccatttgcgattgctagtccagatgcacttgagaagcaaggcgataagtttggtgaaaatcctgtaggtaccggtccatttgtatttgatcaatggaaccgaaatgacaaaatcgtactaaataaaaatgaagagtactggatggatggctatccaaagcttgatagcgttattttcagagcgattcctgataactcagcacgtctaaatgcactaatggctggagaaattgatttgatggatgggctgaatccttcagatgttcagcaggtagaggacaatgccgatcttcaaacgttcttccgtccttctatgaacgtagggtatcttggtttaacaacaaaccgcggcccattaaaagataagcttgtccgtcaagcgctaaaccacgcagtagacaagcaagcgcttattgattctttctatgcaggacaagcggagccagcgaaaaatccgatgcctccggtaattggtgggtataacgatgagatcgaaccttatgagtatgatcttgataaagcgaaggaacttctaaaagaagcaggctatgaagatggatttgaaatggagctttgggctatgccggttccacgtccatatatgcctgatggccaaaaagtagcagaagttcttcagaaaagcttcgctgaaattggcgtagatgctgaaatcaaatcatacgagtgggcaacttatcttgaaaaagctcgtaatggtgaagctgatagcttcttgttaggttggactggcgataacggtgacgctgataacttcctatacgtccttcttgatcaagataacattggaagcaacaactatacgtactatgaaaaccaggagcttcatgatcttctaatcgaagcacagtcaactccagatgaagaagagcgtaacaagctttataaagaagcacaagaaatcatccatgaagatgcaccgtggattcctcttgtacactccaagccagcacttggcggctctagtacaattaaaggtttctcaccgcatccaactggatctgacaagctaacaaaagtaacgcttcaatagcaaaaaaagaaggggagtgatgcactccccttttattcttcataatgaattggctttatacatattaaacgacatgtcattttacagacggaagaagaggtgagtagatgcttgcttatacagttagacgactgctgatgctcatcccagtgttgtttgggatgacactcattgtattctttatgattcgagccattcccggagatccagctcaggtcattttaggacaacaggcaacagaggaagcaataaaaagtttaacaaaacagcttggtctcgatcagccgtggtatctacagtatatcgattatattaaaaacttatttacaggagatttaggcacttctcttcggacaagttcagatattagtggagaaatttggccatatcttgccgctactcttgaattgtcgcttgttgcgatggttattgcgatttttattggtgtaaatgcaggtattattagtgcctggttccaaaactcatggtttgattacacggctatggtattagcgctagttggtgtatccatgcctgttttctggcttgggttgatggaacagtgggctttctctcttgaacttggatggctaccatcaacgggtcgcgaaaatgtgagaaaccctgtagatgctattacccatctttatcttattgataccttaattcaggggagaatggatcaatttgttgaagttattaagcatttgattctacctggtattgctcttggtacgattccaatggctattattgcacgaatgacacgctcaagcatgcttgaagttatgcgatctgattttgttcgcacagctcgtgcaaaaggaacgaaaatgttttgggttgtctataaacactctttaaaaaatgcctttattcccgttctaaccgttattggactacaaatgggcttgcttctagggggagcgattcttactgagacgatctttggttggccaggaattggtcgatatatttacgacgcgattaattttagagattatcctgtcattcaatcagggattttaatcgttgcggtaattttcgtttttattaatttaattgtcgatctgctatatgctgcaattgatcctcgaatcaaatacaactaaagggggcttctaaatggctgaaattgctccgcaaaaacaagtgaacgttcaaaaacaaccagacgaagaagtactatcgccatggcgtgaagcctggaaaggattcaggagaaataagctagcgatggtcggcatggggattgtactttttttcattcttctagcgatctttgcaggagtcatcgctcctgaagggattaacgaacaaaaattaggtgaacgacttcaatcgccctcagccagtcattggtttggaaccgatgatttcggtcgcgatattttatcacgcattatttatggggcacgaatttctttatgggttggtttctttgccgtactcggttcagcagcggtagggagtttactaggtatggtagcgggatactacggtaagttagtagatacaattatttcacgtatctttgatatcatgcttgcatttccaagtatccttcttgcgattgcagttgtggcagttttaggaccgtcgttaagaaatgcgctgatcgcgattgccatcattaatattccaaactttggacggcttgttcgttctagagtgttaagtgtgaaacaggaagagtatgtaatggcggcaagggctgttggaatgaaagactcaagaatcatttttcatcatgtattacccaattccctcgcacctattattgtgcaagggacacttgctatcgcgaccgctattctagaagcggctgcacttagttttctaggtctcggtgcacaggcgccacaaccagagtgggggaaaatgctagcagattctcgttcgtacattatccaggcaccatggacggtgttttttccaggacttgcgattatgctaacagttcttggatttaacctacttggtgacggtctccgtgatgcgctggatcctaaaatgaagaaataaaaaaatcagccgattcggctgatttttttatttggcatgaagctcttgtatgtcgacttcattttcttcctggtgatacgaatggaagctatcgactagcagatcaaggtgttctagatggtcgttgtaatcaataatcataccgattaaaggaaagattgtcatccaaagttcgcggttacattcaccactttcgtataaatcaacatagcgttcggttaaagtagattcaccggatccaactgtgtttaacatttcctcaggagactgatgcctcactttgccgatatattttaaatggatacgttcgtgataatttgtcaactcatcaaggtgagtctgaatcatctttcttacctcatccggcatgatcaaaatcttgacatcaagttgatcaagcatttttagaatagcgagtgatttttctgttgtagcgatcatctgtctgaatagaacgagcttacgagcttttacaaaatctcttcgtttgaaataggttcgttcttccttataaagaagaaagtactgatcacttttcaccgtgtcttcttttaacttaatcaagttttctttaaggactttgtgttccgcatcattcctcgtagcaagtcgaatccattgtgagatatattcagtgttgcttacgattttatgaaacaattttgtttcatacttcggtgggaggaaaatcaaattcacaaagaaagaactgacgaccccaaccataatgacgagaaatcgattcgtggcaaaagtgataaattcctcttgtggcgcgttcataattaatatcactgttacaacagcaagtggaatcgtactttcaatttttaacttaatattaatggcgataattataatagcgcctaagccaatgacaatgggctgatttccgaaaagaagaacaagcacaacggctagcagggctccaataatgtttgattgaaattgatcgataatcgtttgatacgatctgtagatggatggttggatcgcaaacaatgcagctacaccagcgaaagtaggtggctctaatccaagccatgttgctaaatataaggcgatggtaatcgcaagccctgttttaaaaatacgggcaccaaacttcattctgttattatcctttcgttgcatactattaatatagagagtaacctctatttcctcttttaaacatatgagacgttctagttatacatcggaatggttcggatagcaaggcttatttcaaataataccaaagatagtagaaaagacagaatgaagttgcttcattctgtctttgtcaatttccattaagccatctgttggaagacgcgttttactgcttccagcgtttcatcaatgtcttcttcagtgtgttctgttgttagaaaccaagcttcgtatttagaaggggcaagattaattccttcctgaagcatgagtttaaagaagcgggcaaatctctctccatcagaatcttcagcctgtttgtaattaattactttctcgtcattaaagtagacggtaagagcccctttgagacggttgattgtaatctgaatcccggcttcctttgcgtgttgaaggatgcctaattcaagtcgttctccaagtttgtctaagtggtcatatactccttcttcttggaggacttccaaacacgctatacctgctgagatcgaagcaggatttccggccattgttccagcttgataagctggtcctagaggagcaacgtgttccataatctcgcgcttaccgccgtatgcgccaatcgggagacctcctccaataatctttccgagtgctgtcatatctggctcaacaccaagtaagttctgggcaccgccgtacataaagcggaacgccgttatcacttcatcgtagattacgagagcaccgtgttggtgagtgatttcattgacctgttcaagaaaaccttcttcaggctcaacgattccaaagttaccaacaatcggctcaacgagaacacccgctacttcatctccccattttttcattgcttctttataagcctcaatgtcgttaaatggtaccgtgatcacctctctggcaatgctttttggaacgccagcagaatccggactacctaaagtagcagggccagaaccagcagcaactaggacaagatctgagtgtccatgatagcaaccagcaaatttcacaattttgttgcgaccggtataggcccttgcaacacgaatcgttgtcataaccgcttcggtaccggagtttacaaaccgaacgcgttcaagagaaggaatagcctcctgaagcattgaaccaaagcgattctctagaacagtcggtgtcccatatagaacgccattttccgctgcagttgtgatggctttcgtaatatgtggatgtgcatgaccagtgataatgggaccgtaagctgcaaggtagtctatgtatttgttaccatcaacgtcccagaaataaggcccctttgctttttccatgaagacgggagtgcctccgccaacgcctttataggatcgagatggactgttcacaccacctagcataatatcgagtgattctttatgatgttgttctgatttagtgaaattcatattgacctccttgtaatgcgtgttcatcaatttccattgtagcatgagtagcgcggaacaaaacactattcccgcttagcatctaagctcaatgattgtttaatgttcacggctcttgtaaactaagttggtgtgtgtaaaaaggaggataacgtatggaaaaggttattgatgtgcagtcattgcgtaaggattttaaatcgcattcaagtcgttcaggcttaaaaggagcgtttcgagatctgtttacgcgtaattataaagtaatatctgctgttcaagatatatcgtttactgtgaataaaggagaaatggtagggtatatcggtgaaaacggcgctggtaaatcaacgagcattaaaatgttaacagggattttaacaccgacgtctggaactgttcgagtgaatggaatggatcctcataaagaacgtgaaaagtttgttcgctccattggtgttgtatttgggcaacgttctcaattgtggtgggatattgccgtacaagaatcgtttcgtttacttaaaaaagtttacaatgtgccggatgatgtgtataacgaccatatgaaccacgtcattgaatcacttgatattggaccattgcttgataagcctgtaagaaagttatcgctaggacaacgtatgcgatgtgagctagcagcagcgcttcttcataatccaaagcttttgtttcttgatgaaccaacaattggtcttgatgtgcttgtgaaattaaagattcgtaatttcttaaaagagattaacgagaagtacaagaccacgattttacttactacccatgatcttacggatattgaagcgttatgtgatcgtgttgtgatgctggatgaaggacagatcatctatgatggcaagcttgcaaagcttcgttcaaactggggcgaaggaaagcagattgaatttcagtttggagaacaagttaagtttgaaagtctggaacctctcttaaaagagttagaagcagaatggacaaaaggtgatcgagaaaatgtctggatcgcgaacgtgataaacgaagaacatgtgatttctgaagtgattggtcgagtagtgtcagcaaaccgaattacggatattaaaattcatgaaatttcgacggaagagattattcgaaatatctatgaagaaggtatgcggaatgggtaagtacctagaaatgattcgggttcgcttcttaatgatgctcgcctatcggacgaactattatagcggaattttaatttacagcattaacattggagcttactactttttgtggaatgcgatttatggtggaaaaggagaaattgaaggattatcggtgattcagatgacaacctatgtggctgttgcctggatggcaagagctttttactttaataacattgatcgagaaatcgctcaggaaattaaagaaggtaaggttgctgtggagtttatacgaccgtatcattatttaatgatgaaaacgatgcagggacttggtgaagggatttttcgattgagtttcttctctattccagggatgattattgttagccttatttttccgattgaattttcagctgcattttctacgtgggtattttttatgattgctattattctaagttttattgtgaatacacaaatcaatttgctgactggcgttctcacctttttcttctttaataatgatgggctcattcgagcaaaacgcgtagtgattgatttattctcgggattattacttccaatcagtttttaccctggttgggcacaacaagtgatggactttcttccgtttcaagccattagctatattccaagtatgatttttactgaaggttttacaggaagcgcggtttgggaagcgattttgttccaagttgtatggactgttattctcattcttccaatacaggcgctatgggtaattgcgaaaaaacgcttgattgtacagggagggtaacagatgaagcatacgagtattttctttctatatgtggcacagtatatgaaaacaaggctaacctatcgtgttgacatgttgatggagattatgtctgacttactgtttcaggcggttaatctcatttttattttggtcgtatttggtcatacagatatgcttagtggttggtcgaaagatgaaattatttttatttacggttttttcctcgttccatttgcgatctttggcgccttttttaatatttgggattttaatgaacgatatatcgttaaaggcgaaatggatcggatactaacaaggcccgttcatagtttgtttcaaattattttagaacgcatggagcttgaatcgttgtttggtgtactgacaggtatcgctgttatgatctatgcgggtaatcgtcttgatttaagcctatcgtggtatgacccaattgtttttcttttcatggttctaggcggagcttttgtctatgcagggatctttattttgctggcaagtatcagcttctggtctgatagcagaacaagtattatgccaatgatgtacaatatcggaaactatggaagatatccggttgatatttataacaaagtcattcgctttgttttaacgtggatcttaccttttgcttttgttggtgtatatccgtctgcttatttcttgggtcgtgaagaatggtacggttatgcttttcttacaccagttatgggggctgtcttttttggatttgccatctttatgtggaatattggcgtaacaaaatatcgaggtgcaggtaattaaaaggccagagggaatccctctggcctttttgtttatgattaggcaggttctaataatgatgaatcgatcttttcttttaattttttcatgccaagcctaacgcgacttttcactgttccaagaggaatcttctttttggaagctacttctgcttgactatatccctctaagtagatgagcttaagaatttccttttgatccgtattcaaagaatttaaggctccattaatgatatctttgtttccaaagtcatcttgattataaatttctttatcgaccaaatgatgatcttcaacaactgtttctttaaaattgcgctgttctttcttaatccggtcaatagctcggttccgtgtgatctggtttacccatgaggaaagctttcctttatcaggctgaaattggcttctcttattccaaacttctaaataaacatcctgaacgatttcttcggcaatttgctggtcattgactatgcgacgggcgatgcgtaaaagcgtctgatggttttcaatacaaaagactttgaaatgctcctcgtttcctcgttcccagtaagcaatcgcataattgcctttactcattagtttgttcctcctccgagctttgctagtagctctattcccttgaattcgaaataaaaacaataaaagtgtaaaaaaagtgatccaattgcaaatgtttcgtcgtattaacaagtgaacaaaggttatacaaaagtataacaaaaattaaatcaggggagtggatggaatgcttaagaagtttatggcagctgcggttgcaatggttatgatgttcggaataattggaggaacggcgtttgcagatcatcacgaagcaatggtacgcgtgattcatgcttctccagatgcacctgcagttgatgtgtatgtggatggtgaagcagtagtagaaggtgctaaatataagcaagcgacaaattacttggcacttccagccggagaccatgaaattgaagtattcccagctggagaaaatggagaaggggaaccggttatcagtcagtccgtgacacttgaagaaggaatgaagtattctgctgcagctgtcggtaaacttgatagcatttctctttgggcactgaatgatgatatggaagcttctgaaggaaaagcaaaagtaagagtagtacatgcttctccagatgcacctaatgtagatgtagctgttaaagacggggatgttctgttctccgatgttgcattcaaatcgacgtctgattatgcagaagttgatcctatgactgttgatcttgaagttcagccagcaggatctgaagacgttgtccttgaaatccctggtgttgaattgaaagaagggtatgtttactcggtatatgctattggtcttgtagaaggtgaaccaacgcttgaagcttggccaatggttgatgcgacaaacatgccttcagaaatgccgcaaactggtatgggtggtacagcagatcagtcgaatacagttgcgtgggcacttctaggtggagcgattctagcagcaggaactggaatctatcttcgcaggcaaacagcctaattttacacaaaggaggagcagtgatgctggcaaaaaagcttttaatgatgattgtacttttaggagcagcggcaggctgctcttcttctacttctgatcagaagggtggaaaggaaggggtttcagctaatgaaacgcaacttatatctgctccagatttaacagcatcttcttcatctaagagtaaagaatccgttgaaccagctttagaaggggtcattccagctcaattatctattccagccattaatgtagatgcaaaagtggagcatgtcggccaattaccagatggccaaatggatgtgccgaaagatgatcgtaatgttgggtggtatcagtttggagcgaagcctggtgaaatagggaacgccgttcttgctggtcatgttgataataaaacaggtccttcggtgtttttttatcttgataagttagaaccaggcgatatcgtcacagtttctagtgaaaatggaaaggaatttgacttcgaagtacaggagatcgaatcgtatcctagagatgaagcaccactcgaaaaggtatttggaacgagttctaaatcacgtcttaatttgattacttgtacaggaacattcaatcgtgatgccggcacacacgaggagcggatggttgtctatacgacgcttgtttcaaaatagttcgtcctaaaagaagaaaacgcctcatagctttatatgaggtgttttctaatgttcctattgattatgtgtgcgatcatccttgcttttattagtgttggaagaagtataatatccatcatgaaaagaacgagagtacctggaagtctaatatcagtgtataaaatgtttctcttatttcttgtttatataacgatgatcatcgcatttggatgtgtctatttaagctttatcatacttgatgttcctgttcttcaagaaggtcaggtggatcttgctgatatgccgctaacaccacttgcaagaatccaagcggttctctattttagtgctgtcactctactatctgttggttatggtgatctgacaccgattgggataggacgatggattgcgattattgaggcgttaattggttacttgatgccggcggcttttttcgtaacaacgattgttgattacagggaaaactctaagttgtaagttgaatggaatttcgttacgcttagcttatgatgagctaaggaggcgtaaaaatgaagaatgaaattggtcaaaaagcttctgattttaagttagaagctagcacaggagaaacggtatctctttctgactacaaagggaaaaatgtcgtactatatttctacccaaaagatatgacacctggatgtacgacagaggcatgtgattttcgtgatcatattgaaggattcgaagaactggatacagtgattttaggtgttagccccgatccagttgaaaagcacaagaaatttattgataagtatgatcttccgtttcttcttcttgcagatgaagatcactctgttgccgaagattatgacgtctggcaattgaagaagaattttggtaaagaatatatgggcatcgtccgctccacttttgttattgataaagaaggaacgctcgttaaagagtggcgcaaagttcgtgtaaaagatcacgtagagtctgcattaagctatattaaagaaaacttatcataaacgtttgtctacagggcatctggctatacttcttgcatttgttgtacatagagtatagtagatcatatcttcagttgagagcgcatcatgcgctctttttttgatttagaagaaagagcttatacttaaatgccaccgctgattcggctatacttataattaagaaactcatgaaagtggtgaaaaaatgaaagtattatcaactggtaaacttagtacgaaaattaaagagcgcttaaaagaaagctatccagagctcaaatttcagttcttttcctcaatggaagaagcagaaccatatctttccgaagctgaagttcttcttacatatggggaagacctaaacgatactcttattcagaaagctacccaacttaaatggataatggtcctttcagcaggactagaacggatgccactacaagcgattaaagagaaaaagattcttcttacaaatgcgagaggtatccatcgtatacctatggccgaatataccctttccgtcatgcttcaagtcgctagagacacgaaagtagttctcgcaaatgaatcatcgaaggtttggaagaagaaaaccccgatacgcgaaatcactggtagcacaatcggagttattggaacgggtgctatcggcagtgagattgcaagggtagctaaagcctttcgaataaaaacgcttggcgttaatcgatcaggtcataaagtagagcactttgatgaaatttataaaaatgatgaccttttaacaatgcttcctaaatgtgacttcgttattagtgtgctacctagtacggatgaaacaatgaattattttaagaaagagcaatttttagcaatgaaagactcaggcgtatttattaatattggtagaggagatactgtagaggaacaggatctaattgatgcattaaatgaaaatcatctagcccatgccgtgctagatgtgtttaaaaacgaaccacttgatgcgtctcatcctttttgggaaatggagaatgtaaccgttacgccgcatcattctgcaatatctgacaactatcaacctagagcgattgaaatttttgagcataacttattgcaatatcaaaatggaatgaacgattttaagaatgtcattgatccagatagggggtattaaatttgaaaatttatacaaagacaggcgataaaggggaaacatctctcgtttatggacagcgagtattaaaaagcgatattcgggttgaagcttatggaacatgtgatgaggcgaattctcaaattggacttgcactaagttatcttggtgcgactcactttgagggaaaagaagagtgggagtctatttttcataaagtacaaacgtggcttttccatgttggcgctgagcttgcaactccaaaaggaaaaaaagtaggatggacaattgaagaagcgcatattaatgaaatggaaaagcaaattgacgcctgggagcagcaaattgaacctttgcgtaactttattttgccaggtgggcattcagtgggagcatgcttacacgtggcgcgcacaattgtcaggcgtgctgagcgtctgacgactatggtcgaagagacgaatccacttgttctttcatttttgaatcggctctctgatttcttatttgttgccgcgcgtttcattaactatcatatgggagagaatgagtcagttcttcaccaaggtcagaagtaagaaaccctctataggcgtgccgttattgacaaaaccctcttttaccatgtacactaattataaacattacaaagtaagaatgcttgttgaaagcgaggtgcatgacgaatggctgaagagaaactgcatgaagcaattgatgcgatgaaaaattcaggagtgcgtattaccccgcagcgtcatgccattctggagcatttaatccagtccatgtcacatcctacagcagatgaaatatataagtctcttgaaggaaaatttcctaatatgagtgtagcaacagtttataataacctgagagtatttaaggaaattggactggtgaaagaattaacgtacggagatgcttccagccgatttgattgtgtcacaacagatcattatcatattatttgtgatgattgtggtaagattgtagactttcattatccgggattggacgaagtagaaacgcttgcggaacaggtaacaggcttccgagtcggcgatcacagaatggagatttacggaaagtgtccagattgccaaaaaagcaaacattaataaaaaagagcttccgcatatgtagcggaggctcttttttcactgcgttctgttttgggctttctttacattatatttctcatcaaactctttgccgtccaagtcagggtccatagttaaaggctgtttgcaatgcatacaggcatctacacgtccgagaactttcgtcggtttttcacaatttggacagactacctgtatcgctcttgttgagagcattccgatccaaaaataaacaacagcacttgcgattgttgcaagaaatccaatgagcataaagatggtcataagcaagacggaagtcttgaagaatattcctatatacataatcgcaattccaataaaaacgagactcagcgcgaacgtacgaattttattaatcttattagtatactttaattgcattacatgtccctcctgcacccaattatagcataagcaaaaggtgtaagcactttccatattaggcaaattgattaaagttatttcttagtagtgtaatgtttctatagaaggaactagtagttttctaagtgaaacttcaaattcagggattgcttaattttcgacaggatttataatatggactgttgaatacttaagataatactgaaaagagaaaaatgattttggtaatgaaacaaaagtataagtagttctggaggatcgaataatggaaaatcttttaaggccgatttaccaagagagagcaagtcacccaggaacgctcggtgtactagtaattgaaaaaacgaagccttttcatccgcttacagataattttgatgtagtattactgatcatcgttcaagataatgagaaaccatggttcgttaaacattatgattttgaaggtaagaaagcagccatgcacgtagtgtcggaagagcaagttaatgaatggttgatttcgggtagccatcgacgtcttgtagcctggcttgttaatgggaaaattattttcgatcgtaacgagtacatagctgggttgaaagagaggatcagggactttccttatgaagagcgcactcgtaaaatcggcgtggagtttgcaagattaattcgtcgctatacagaaggaaaagaattgtttgcatcgaggcaatacatggacgcctataattttattcttcatgctttgcatcacctggctcgtttatcagttattgagcatggattccatccagagattacggtatggaatcaggtgaaacacattgaacctgaaattttcaagctttatactgagctcttatccggggaagacccgcttgataaacgcctggaattactgctccttgctaatgatttttcattatcatcaaaatcaaaaaacgcgactgttcatattaggaaggttatgaatgaacgtagtaatgcctggacttatcaggaactaatggaagaagagcagcttaaagaatatggcatagatcttggtgccctgctagaatatatgattgaaaaaggtttggttgaagtgcatagaagcgagacaaaaggatctggtatatttattagagaatacagcgcaatcgaataaatgtaataagcggagaaaaaatatcaagaaaagggttgaccctattttttctccgtggtatattattacttgtcgccgcgagagattaacacggcaacaaaaaactttaaaaaagttgttgacgccaactgagttaatgtgttacattaataaagtcgctgaaaacgacattgaaagaaacgaattgctctttgaaaactgaacgaaacgccatgtaagtagttgtttctacggaaacaaattgttttaaaagctagattaagctttctatcggagagtttgatcctggctcaggacgaacgctggcggcgtgcctaatacatgcaagtcgagcgaagagatgggagcttgctccctgatcttagcggcggacgggtgagtaacacgtgggcaacctgccctgcagactgggataactccgggaaaccggagctaataccgggtaatacatcgcaccgcatggtgcaatgttgaaagttggctttctgagctaacactgcaggatgggcccgcggcgcattagctagttggtaaggtaatggcttaccaaggcgacgatgcgtagccgacctgagagggtgatcggccacactgggactgagacacggcccagactcctacgggaggcagcagtagggaatcttccgcaatggacgaaagtctgacggagcaacgccgcgtgagtgacgaaggccttcgggtcgtaaagctctgttgttagggaagaacaagtaccgttcgaatagggcggtaccttgacggtacctaaccagaaagccacggctaactacgtgccagcagccgcggtaatacgtaggtggcaagcgttgtccggaattattgggcgtaaagcgcgcgcaggcggtcttttaagtctgatgtgaaagcccacggctcaaccgtggagggtcattggaaactggaggacttgagtgcagaagaggagagtggaattccacgtgtagcggtgaaatgcgtagatatgtggaggaacaccagtggcgaaggcggctctctggtctgtaactgacgctgaggcgcgaaagcgtggggagcaaacaggattagataccctggtagtccacgccgtaaacgatgagtgctaggtgttggggggttccaccctcagtgctgaagttaacacattaagcactccgcctggggagtacgaccgcaaggttgaaactcaaaggaattgacgggggcccgcacaagcagtggagcatgtggtttaattcgaagcaacgcgaagaaccttaccaggtcttgacatcctctgacaatcctggagacaggacgttccccttcgggggacagagtgacaggtggtgcatggttgtcgtcagctcgtgtcgtgagatgttgggttaagtcccgcaacgagcgcaacccttgatcttagttgccagcatttagttgggcactctaaggtgactgccggtgacaaaccggaggaaggtggggatgacgtcaaatcatcatgccccttatgacctgggctacacacgtgctacaatggacggtacaaagggcagcgacaccgcgaggtgaagcaaatcccataaagccgttctcagttcggattgcaggctgcaactcgcctgcatgaagccggaattgctagtaatcgcggatcagcatgccgcggtgaatacgttcccgggccttgtacacaccgcccgtcacaccacgagagtttgtaacacccgaagtcggtggggtaacctttatggagccagccgccgaaggtgggacaaatgattggggtgaagtcgtaacaaggtagccgtatcggaaggtgcggctggatcacctcctttctatggagaattacgaaggtaacttacgttaccaaccttacatgagcgtttcgtttagttttgaaagaatgatttattctttcaaaacaggtgaagtgatgaagcttacgctgattcaagtagtagccttgttccttgaaaactagatagcacaaacaacgacatccaataattattttttatgcaagaacttagtaataactgatgcgttacggcagcaatgcctaacaaatcgaaggttaagctactaagggcgcacggtggatgccttggcactagaagcctaagaaggacgggacgaacaccgatatgcttcggggagctgtaagtacgctttgatccggagatttccgaatgggggaacccaccatctttaataggatggtatccatttctgaatacatagggaatggaaggcagacccggggaactgaaacatctcattacccggaggaagagaaagcaaatgcgatttcctgagtagcggcgagcgaaacggaatcagcccaaaccagagggcttgccctctggggttgtaggacgtctctttggagttacaaaggcacggatagacgaagcgacctggaaaggtccatcagagaaggtaacaatcctgtagtcaaaatccgctgccctccgagacggatcctgagtacggcgggacacgtgaaaccccgtcggaatctgggaggaccatctcccaaggctaaatactctctagtgaccgatagtgaaccagtaccgtgagggaaaggtgaaaagcaccccggaaggggagtgaaagagaacctgaaaccgtgtgcctacaactagttggagcccgttaatgggtgacagcgtgcctttgtagaatgaaccggcgagttacgatcccgtgcaaggttaagctgataaggcggagccgcagcgaaagcgagtctgaatagggcgaaatagtacgtggtcgtagacccgaaaccaggtgatctacccatgtccagggtgaagttcaggtaacactgaatggaggcccgaacccacgcatgttgaaaaatgcggggatgaggtgtgggtagcggtgaaatgccaatcgaacctggagatagctggttctctccgaaatagctttagggctagcctcgcggcaagaatcttggaggtagagcactgattggactaggggtccttaccggattaccgaatccagtcaaactccgaatgccaacgatttatccgcgggagtcagactgcgagtgataagatccgtagtcgagagggaaacagcccagaccaccagctaaggtcccaaagtatacgttaagtggaaaaggatgtggcgttgcttagacaaccaggatgttggcttagaagcagccatcatttaaagagtgcgtaatagctcactggtcgagtgacgctgcgccgaaaatgtaccggggctaaacgtatcaccgaagctgtggattgtcttacgacaatggtaggagagcgttctaagggctgtgaagtcagaccgaaaggactggtggagcgcttagaagtgagaatgccggtatgagtagcgaaagacaagtgagaatcttgtccgtcgaaagcccaaggtttcctgaggaaggctcgtccgctcagggttagtcgggacctaagccgaggccgaaaggcgtaggcgatggataacaggttgatattcctgtaccacctcctttccgtttgaacgacggggggacgcagaaagatagggagagcgcgctgctggaaatgcgcgtccaagcgattaggctggtgaataggtaaatccgttcaccgtgaaggctgagtcgtgatggcgagggaaatttagtaccgaagtccttgattctacgctgccaagaaaagcctctagtgaggaaagaggtgcccgtaccgcaaaccgacacaggtaggcgaggagagaatcctaagacgatcgggagaactctcgttaaggaactcggcaaaatgaccccgtaacttcgggagaaggggtgcttcctcgggtttatagcccaggggagccgcagtgaaaagatccaagcgactgtttagcaaaaacacaggtctctgcaaagccgtaaggcgaagtataggggctgacacctgcccggtgctggaaggttaagaggaggggttatcccttacgggagaagctctgaatcgaagccccagtaaacggcggccgtaactataacggtcctaaggtagcgaaattccttgtcgggtaagttccgacccgcacgaaaggtgcaacgacttggatactgtctcaacgagagacccggtgaaattatagtacctgtgaagatgcaggttacccgcgacaggacggaaagaccccatggagctttactgtagcctgatattggattttggtacagcttgtacaggataggtaggagccatagaagtcggaccgccaggttcgatggaggcgtcggtgggatactaccctggctgtactgacattctaacccagcaccgtgatccggtgcggagacagtgtcaggtgggcagtttgactggggcggtcgcctcctaaagtgtaacggaggcgcccaaaggttccctcagaatggttggaaatcattcgcagagtgtaaaggcacaagggagcttgactgcgagacctacaagtcgagcagggacgaaagtcgggcttagtgatccggtggttccgcatggaagggccatcgctcaacggataaaagctaccctggggataacaggcttatctcccccaagagtccacatcgacggggaggtttggcacctcgatgtcggctcatcgcatcctggggctgaagtaggtcccaagggttgggctgttcgcccattaaagcggtacgcgagctgggttcagaacgtcgtgagacagttcggtccctatccgtcgcgggcgcaggaaatttgagaggagctgtccttagtacgagaggaccgggatggacacaccgctggtgtaccagttgttccgccaggagcatagctgggtagctacgtgtggaagggataagtgctgaaagcatctaagcatgaagcccccctcgagatgagatttcccacagcattaagctggtaagatcccttagagatgatgaggtagataggttcggggtggaagcgtggcaacacgtggagctgacgaatactaatcgatcgagggcttaacctaaaacgaaaagcgaagtaagccgtttaaatccgacaagcgttggaagcttttgaatcagacgcgctttttgcgtcagaatcaaaaggtgaaacgatcgaggatttggcttacgtagctggacatattattggaatacgttgtgcgtgctatctagttttcaaggaataatatttttcttgaaaaacatgatgaaatatagtatgatatattttgtcgctggcaaatcacaaaatgtgaaatccagttattagtctggtaatgatggcgaagaggtcacacccgttcccatgccgaacacggaagttaagctcttcagcgccgatggtagttgggggatctccccctgcaagagtaggacgttgccaggctgatattattccacagtagctcagtggtagagctatcggctgttaaccgatcggtcgtaggttcgaatcctacctgtggagccatggagagctgtccgagtggccgaaggagcacgattggaaatcgtgtagacggtcaacgccgtctcgagggttcgaatccctcgctctccgccaccagcctacataaatagcagcagtggcccgttggtcaagcggttaagacaccgccctttcacggcggtaacacgggttcgaatcccgtacgggtcaccaatatcattttttactctgtggaggattagctcagctgggagagcatctgccttacaagcagagggtcggcggttcgagcccgtcatcctccaccattttctaaggtcccgtggtgtagcggttaacatgcctgcctgtcacgcaggagatcgcgggttcgattcccgtcgggaccgccattttttctttcattcccattatcgcggggtggagcaacaagcgatacttccttgaaacagcatcgagttgtttcgacggatacgcttcgaagcataaccttgtagagaaagaaacagtgcacagcgtaatgagcaggtgcagtatcattttattcccattatcgcggggtggagcagttcggtagctcgttgggctcataacccaaaggtcgcaggttcaaatcctgcccccgcaaccaattaaatttttaaacatggctctgtagctcagtcggtagagcagtggactgaaaatccacgtgtcggcggttcgattccgtccggagccaccatgttgccggtctagctcaattggtagagcaactgacttgtaatcagtaggttgggggttcaagtcctctggccggcaccattttctcgaaatgagatcaatttccattgcactttcataaaatgtgtattacaatggtaattgtcaatttggaggggtagcgaagtggctaaacgcggcggactgtaaatccgctccctcagggttcggcggttcgaatccgtccccctccaccatttttataggggtatagtttaaaggtagaacagaggtctccaaaacctccggtgtgggttcgagtcctactacccctgccaatttcattcttttatggcggttgtggcgaagtggttaacgcaccggattgtgattccggcattcgtgggttcaattcccatcagccgccccatttttgggctatagccaagcggtaaggcaacggattttgattccgtcatgcgctggttcgaatccagctagcccagccattttgttgcggaagtagttcagtggtagaacatcaccttgccaaggtgggggtcgcgggttcgaatcccgtcttccgctccattttacaaaggcggcatagccaagtggtaaggcacgggtctgcaaaacccttacgccccggttcaaatccgggtgccgcctccaatcttaatattttttctttaaagtcctgccggagtggcggaattggcagacgcacaggacttaaaatcctgcggagggtgtacctccgtgccggttcgagcccggcctccggcaccacttattttttgcctaaattaaacatggtactttgccggtgtggcggaattggcagacgcgcacgactcaaaatcgtgttccgagaggagtgtcggttcgaacccgaccaccggtaccattacatacgtttttaaaagacttcaacgttctcgttgaagtcttttttatatatcttaaccttcttaatcttattttgagtgaaacccgatttaactaactagaaaacggcatattaagcgatataattaaattcagcaaggaggctgtctatggattttgatctacggaaagctgtgttaattgttatcgggggaacgttactcttacgtgtggcaggtcgtaaaatcgatctcccaaaggaggcttgcacaagttgtcatcatgattgggattggctcattacttattcaacccattgtaggtaagaacgtgtttacgacactattagtaggcctgtcacttgttttaactctcgtttttgttgaatatagtcagcttaaatttgattggctagaacggtttattactggtcgctcaaagattctaattaaaaatggggttttgcaagaaaataatcttaaaaaattgcgctttactgttgatcagcttgaaatgaaactaagacaatcacaaattcactctatctcggatgttgctgatgccacattagagcccaatgggcagcttggatttcagcttaaagaatcgaagcaacctgcgacgaacgaagaggtagcgaaaatctttgaagagttaaagaagattaaccaggttctccgagggaacacacctttagtggaaccggctcttcaaaattctgttgataaaaaatccactttatttgatgaagtggggtcaaatgttcataacccaccagtatctgataaacttcaatgattcataggaaagaccttattgagcaaattcctgctcatttgaaaatagaggtgataaaatatagttacgtaaaaaataatggttaactgaaagagtgattttatgagaattgaagtatggtctgactttgtatgtccattttgctatataggaaaaagacgtcttgagagtgcgcttcagactttcccacagcgtgatcaagtagaagtcgtatttaaaagctttgaacttgatccgaatgcgaaagaatctaatggagaaagcatggctgagctcttagcagcgaaatataatgtgagtctagaacaagctcagggtatgtgtgagaatatgaggcaacaagctgaaggagaaaaccttacgtatgatttcgatcaaatgattccaacgaattcatttgatgcccatcgtctagttcactatgcaacagagcatggtaaaagtaatgagatgtcagaacgtctcttttatgccttctttactgaatccaaaaatatcggtgatcatgaaacacttgcgtcacttggtgtagagctcgggttagacgctacggatataaaacgtatgcttagaactgaagagtttacgaaagaagttcgcagtgatgaagcaatgggaagtcagctaggcatccagggcgtaccgttcttcgtatttgacggtaaatatgccgtgtcaggtgcacagcctgtcgaaatgtttaaacaggccgttcagaaggcctggggagaagggaatcagcttgaggtcgttggtggtaatgcagaagcgtgttctgctgactcttgtgatcttcctaaataaaagcttaagaaagctctcttattgaaaagagagctttttcttatcagtctgtattttcttgcttaatcgttttgtaagctgaatcaaggttgcgaatgcgacgaacaatttcagagtttttgttaaggttgtcatagatcatagatgaaacgacggaacgatagtagctattcattgcctctaattttgagaatacatctcggtttttttgtatgtattgtcgaaaattttcttcgaaaaatggtgtagagaatggttccatatgcgttctcctttctactggtagttccgattatagatggacatttagaaggcgtcaaacctgaaaccgtgcgtaaaagtctcctgaaagtggaatgaaagaattgttttgttaagaaattatgaaaaatgtgttgtttcttacatactttctatggtattctatctacatcagcgaggattgtagaaattcctcgaattttcaccattgacccaacgcagtgtttcgttaatattaacgaagcgttgcgtttttttatgtctggaagattcctttaaatggaaatttcgttttcgacatgaccaccatgaatttgatgaaacatttcagcagaagcgttgacaagctttttgcattctgataggtgtagcgacggttggagataaaagagctgaatcgcgtttgttgtattttccgtcacagccgatcgtttagaatcgacaatcggacttccgaacgcacctctttggtcggacgaatggattttgttatgaaaagagacctcacgaccatttaaaccttcatagaaggtattattatctccaatatcgatcgtaatatctccttcgatttgatcaagatcatagattccaattggaattttgtattgaagagaaagtaagttgttgatgtcagcagcagagtgaacgagaggtatcgtacttcctttttttaatcgtcgtaagagagcttcagaagagggacgatatcgagtaggatccgtgccgaattttttgaaaatggatcgccattctgagacggcgggaaacgaattgagattgatctgttcaaggtccatcatcattgtttcttgataaaattgaaagcgaccgcgtaccatttgcggtgacttttcaaccacgatattatgataaatagcataaccaattttaaaattaggataaagctctttaatagatggagcgagagtaatattggtcatcacactttcctcctagttcatatttttcgttcattttatcatataccaaattttgaagctttaaaggaggtttgcctcatatatgaaggaactaaaaaaacagctagaacgtatagacggaaaagggtataaggcatacaaggacattaaaggacgctatcactttaatgattttacccttgcgattgattacgttcagggagatccgtttgcaagcccttctcgggtaagaatcatcgttcctcgcgcaaaaacaattatagaacgtgaatggtttgaatcgtctgtgaggaaagttcgaacggaagattggattgcgcgagaagtaggtggggccattagaacgacagagaagcatgcaaaaggcactgggaaaagtggattgctctttatcgatcaacctggtcaaaaggtcattgagagagccgcagtgaacgtcacagaggaagacataacaatctgtttatcaattggattacccgctcaaggtaggagagttcttggcagacaggcgcttgacttgcttttgcatcgtattccagacgttatgaaaaaatctgtctttgcactaaataaagatctcattgttaaggctctttttttagccgatcaacaggaggcgattcgtgactacctcactgaaaatggatatgttagctttgtagcaaatggagctattttgccacgtgagagtggggttagcgatcgtcctatgcagcaaaaggccatccaatttgaatcgcctgaaagtatggaagtatctcttaaaatcccacatcggccagaacctttaagagggatggcggtaaaagaagggattactttaattgttggtggtggttaccatgggaaaagtaccctcttgcatgctatggagcatggcgtctatgatcatatttcaggagatggaagagagtatgtgctcacaaatcaccacgcaatgaagattcgctctgaagatggtcgtcaggtaactggagttgatatatcgccatttattaacaatcttccttatggcaaggatacacggtctttcacatctgaaaatgctagtggaagtacgtcacaggcagcaaatattatagaagcactagaagctggtgcagatacgcttctaattgacgaagatacgagtgcgacaaactttatgattcgagattatcggatgcaacagttagttgaaaaagaaaaagaacccattaccccatttattgatcgtgtaaagcaattgagtacagaacgacatatatcaaccgtacttgttatgggtggatctggggattactttgaggtagctgaccaggtcattctaatggaaaattatcgtccatacgatgtaaccaataaagctagagaaatcgcgcaagactcggtccgccaaaaagaaggtggagaaacgtttggtgatgcaagaaagagagtacctgaacggagtagtttgaacagtcaaaagggaaagaaatcgaaagtgactgctcgaggactgaaccaaattcaatatggtcatacggaagtttcctttcttcaagtagagcaacttgttgatcccagccaaacaagatttgctgctgatgttcttcatttcctagaaagaaatcatacgttaggagataagtcgattcctgagctgctggacttcattgaagaaaaattaaatagtgagggactaggttccttttcgttatttcaagatcagcatccaggagacattgctcgaattagaagaacggaaatggcggcgatattaaatcgtattcgaacgttaaaaataaaataaactcacgccaataaagaaaggagggtaatgaatgacaaacgcacaattaaaagctgatattgtagcatacagtaaaacaatcgggattgataaaataggcttcgctgcagcagatccgtttaaaacactcaaacagcggttagaacgtcagcaggagcttgggtttcaatcgggattcgaggaatctgatatcgagaagagaacaaaacctgagcttttattgagcggtgcaacgacgattgtttcgattgctattgcttatccttcgcgaatgaaggatagcccaagaagtaagaaaggcgaacgacgaggactattttgtcgcgcttcatggggcgttgattatcatcatgtgcttagagagaaactctctctcctagatgcatatattaaatcgaaggttcctgaagctagaacgagttcaatggtcgatacgggcgaattatccgatcgagctgtagctgaaagagccggcattggttttagcggtaaaaatacaatgaccataacagaagaatttggatcatgggtctaccttggtgaaatgattactgatctgaatttggaacctgacgagcctgttgaggagggatgtggagactgtaatatttgtgtagatgcctgtccaacgggtgccttgattgaaggtggccagcttaacgcgaataaatgcattgcttttcttacgcaaacaaagggttttttacctgatgaataccgctctaaattaggcaatcgtttatatgggtgtgatacgtgtcagcttgtttgtcctaaaaacaaaggaaaagattttcatcaccatcctgaactcgaacctgatccagaaatggtaaaaccaaaattgatcccactcctaaccatgacgaatcgtgaatttaaagagcaatttggtaaagcagcgggctcatggagagggaagaagccaatccagagaaatgcgattcttgctcttgctcattacaaagatgaaacagcaattgatacccttgtggaagtgatggtaaaagaccctcgtccggtgatccgcggaacctcagcatgggcacttggaaaaatcggtggtaagaaggcccttcatgcccttatgaaggagcaaatgagagaaaaagataaggatgtggcagatgagatcgctaagggcctgtcaatgcttgaaaataagacttaatgctgatggtcaaaccattagatgcgttgtaagatagtgaaaaatgtacaataaagaagggatagaatggagaaacaagtgatttattatggggagtttcaatcgccgattggtccattaacgttgtttgctagttcgaaaggagttagtaggctcgattttggttgccatgaggatgtgctgcctgctgctgaaacatggtacaagaaacatcatgtaaatgcggaccttgttttcaattctgatatgattgaaccaattgtcatacaattggaggaatacttcagtggaaaaagaagggtttttgatctcctgcttgatccaataggaactatttttcagcagaaagtatggaatagcctctcggaaattccatatggtgaaacgcgttcctacagagatgttgccgtaggtatttctgccccaaaagctgttcgagcaattggttcagctaataatcgaaacccgattcccattattgtaccgtgtcacagagtgattggaagcaatggtgctctcgttggatacggtggtggtgtcacgaagaaagaatatttattatcacttgaacaacaccatgccatgcatgcaatgttgccataacaagatttgaagcctatttgctacggttcatacgtagcaaataggcttttttgaatttttcgtcttaggcataatgctacaaaaagcgggtggtttcttgtaaaatagcaaatgcagttaaatcacagatgaaaaatttaaataaaaagtaatgaatacaacaagcaaatgaattgtattcagagccttctttagaggagtggaaatgatgaacagctttttgtcgaaaagccttatttacgtagcaggattatttacccttgcctttggagtagtattgttaatcaatgctgatgttggaattgctccctgggatgctctttatgtagctctttctgatcaaatcggatttacagtaggatcatgggtgtttatcgttggaggtattttgattttcattaacggtctcattatgatgagaaagcctaatctggctggttttatcccgattattttactaggactgtttgtagacttattgaatttaaaaatactaacctttatcgatgtaaatggaatcgttcccagatggattttgtttcttgttggattagtcattatgggacttgggatagctgtgtatttatttgcttcattggcatctattccaaatgatgaattaatgcttgcacttactgaacgaactggatggagtattggtgtcacaaagacgataacggaagctattgcatttgttttagcttttcttcttggtggtcctattggtgcaggtacgttcgttgaagtcctcctactcggtttccttgtcggctggtttgataaactccttaaaaaaataaatcattcttcacctgaagcagctgcccattcttgattccgtgtcatgtgtgggtttcccttgtcataaattgcgatgaggggggacgcatatggggtggggagaagagttaaaatctttttggaaagatcaggcaactagtttaataaatggtacagaattagctagattaggaattcgtccatcaacagaagaagcagcagcggcccggtatctgcaacaatgtcaggagagaggagccgctgttattcgaataaaaaacaaaggaatccttcttagcaagaaaggtttttcaaaagatcaaatgtatgattaccttctccatcaacagttcttgattaagcaaggagagaaactttatcaagaagaacgagtggaaaagagattcgccaagatgaatgaaggtgatcttgttctagattgttctgtggaagttgaaggagagcagcctcaaacaatagagagtgaaggggacgatcgcgttcgcatgaaagggtcatattatgatcgattatctgctcttaagtatgcagaacgctggtgggacgattataacccggcatatcactcattcgatgttgattgtacgaactatatttcacaatgtcttcatgcgggaaaggctccaatgcgtggttatcctgatcgcacaaaaggatggtggatgaaagggagtaactggagctattcatggacagtggcccatgctcttcgctggcatataagtggctcgaagactggtctacgcgcacgtgaagtagcaaatcctgatgatttgattccaggcgatattatttgctatgacttcgatggagatggtcattggcagcatactactttcgttgttgataatgacgagaagggatatcctctcgtaaatgctcatacgacaaatagcagaatgcgctattgggcttatgaagattctacggcgtggacccctgaaatcaagtataagtttttccatattgaagattagtgaattccatctccatttaaaaacatgctataatagaaatgttttgaagtggaggtgaatgaagatgtctttaaatatcgtcctttttcagcctgaaataccggcgaatacggggaatatagcacgaacctgtgcagctactcatacaagtttacatttaattcgtccattgggcttttcaactgatgataagatgttgaaacgtgcgggattggattactggcaatatgctgatgttcattattatgattctctagatgagttttttgaaaaaaatcaggatggggaatattactatataactaaatatggtacaaatacacatactgattttgattattctgatgaagacaagaatacgtattttgttttcggaagagaaacaaacggcttgccagatgaattgattgagaataataaagaacgttgtcttcgtctaccaatgactgatcacgttcgtgctcttaacctttcgaatacagctgcaattatggtttatgaagcattgagacagcaaaattaccctggaatgaaataaaaaagaacgacttttcagcaaagagctgtaagtcgttcttttttttgatagacgatcgaagcgttattcagataaagagttccaatatctccgtttctaaacgctcgtctccgcttttcttgttacctactaccttttttggttttgcttggtcggtcgttgtagccagctgtgaagattgctgctaggaatgctaggattactactaaaatacccaggaaactcatggtctcatcctcctcaggtaaaattgtgtccaaatctacctctcattataaaccatgtgaggtgaggtgtgaatgttttgaggggaattcttggtgttatgggtggtttgaattggaaaaaaatacggttattcgataggatagagatagaaagataaaggaggttttttgatcatgtatgttgtcatgaatgaattaaaggtgccagatgaagctaaggacatgatgaaacaacgttttggtaagagcgcagagagtatgaagaatgtagaaggctgtttagaatttatgttcctggaacaatctgctgagaatggaaagttaattgtgttcacgaagtgggaaaatgaagaggcttatcagaactgggtgcattccgattccttcaagaatgctcataaagaaaagcgtgaatcgaaagagaaatcacccgcaactggtaatgaacttagtgagtttactgttgtctatcatacgtaagagttagagccggtttagccggctctttttgtttgttttataaagttcttttgatctctcttttacgtgaacttatttagcccttatccctgtctttacgttcgaaaagaaagccgaatgttataggacatccccgcataacatgtattaaatccgatgaatcaaacttggagggggctcgtaatggatatcttacgtaaaatccagcagcatcgagaagatgaaaggcggctgaagtgggagggaaccttcagcgagtacttagacattatccgggaacgacctgaagtagcgcagtcagctcattcacgtgtttataatatgataaaagatgcagggattaaagaagttgatggaacgcggaattattcttttttttctgaagaactgtatggtctagaggaagccattgaacgtcttgtcgaagaatattttcatccagctgcaaaacggttagatgtgcgaaaacgaattctcttattaatggggcctgttagtggtggtaaatcaacgctagtcactgtattaaaaagaggtttggaaaaatactctcatgaagattcaggagccgtatatgcaattaaagggtgtccaatgcatgaagatccactccatttgattccacatcatttaagagatgagttccatgaggaatatggaatccgaattgaaggaagcctctctccgcttaacgttatgcgtcttgagcaggagtatggtggtcgtattgaagatgtcatgattgaacgcattttctttaacgaagataagcggacaggtattggtacatttagtccatcagatccaaagtcgcaagatatagcagacttaacaggtagcattgacttttcaacaatcgctgagtttggatcagagtctgatccaagagcatatcgatttgatggcgagttaaataaagcaaatcgcggtatgatggagttccaggaaatgttgaaatgtgatgagaagtttctatggcatttgctgtcactgacacaggaagggaatttcaaggcagggcgctttgctttaatttcagcggatgaactagtcgtggcccatacgaatgaagcggagtaccgttcatttatctcgaacaaaaagaacgaagctcttcactctcgtattattgttatgcctgttccatataacttgaaagttagtcaggaagaacgtatttacgagaaaatgattcgtgaaagcgatgtggcagatgttcatattgccccacatgctcttagagtggctgctattttctctatcttgacgaggttaaaagatacgaatcgtcagggagtagatcttgttaagaagatgcgactctatgatggagaaatcgtggaaggttttaatcaagtagatgtggatgaacttcataaagagcattcagatgaagggatgagcggaattgatccacggtatgtcattaaccggatttcttccacgattatacgaaaagaagtaccgtccattaatgcactagatgtattacgttcactgaaggatggactagatcaacatgcttctatttcgaaagaagacaaagagcgctatatgaactttatctcgatcgcacggaaagaatatgatgaaattgcgaagaaagaagttcagaaagcttttgtatactcctatgaagaaagtgcgaagacgttaatggataactaccttgataatgtagaagcatactgtaataaaaataaactgcgtgatccactgactggtgaagaaatgagtccagatgacaagctcatgcgttcgattgaagagcagatcggaatctctgaaaatgcgaagaaagcattccgtgaagagatcttgattcgaatctctgcttacgctaggaaaggtaagaaatttgattacaattctcacgagcgtttaagagaagcgatacagaagaagttatttgcggacttaaaagatgtcgtgaaaattacaacttcttctaaaacaccaaatgagaaccaactgaaaaaaatcaatgaggttattgctcgtcttatcgatgaacatggttacaattcgatttcagccaacgaactgctccgttatgttggaagtctcctaaaccgataattttcaaaaaagcatacctcaaaaaaggggtatgctttttggaatgtttgaatgtgccaaacattctttatgtaatcgcttaccaaaccgggtgcgcttgtgccagctaattaggagtgatagattagacgtaaagacgtattgaaaagaggtttgagatggagaaggaacgcaatccgctttgggagtggataaaggctttttcaatagctgtcgtcctggcgattgttattcgagaatttctcatcacgaattatgtggtacacggcgaatcgatgatgccaacgatccaagacgggaatcgtttaataattaataaaattggctatgaagtatctgaacctgatcggtttgatcttgtcgtatttcatgcgaacgaagaagaagattatattaagagagtgattggtcttccgggggatacaatcgaatacaaaaatgataatctctacgtaaacggtgaaaagatgagcgaaccttatcttgaacgatacaaggatgagatatttaacggtaatttaacggaaaacttcaatcttgaagataaaacaggcaaaatgaaagttccagagaactctttatttttaatgggtgataatcgtagacatagttatgatagtcggcatattggttttgtaccaatggatcaagtagttggagaagtaaaccttcgttattggccacttgaaaagttcgacttcacgttcgaaaaatgaagtgcaaataggttaataatggttaagatctgggtacgtagattaatgaggtgatgcatgatggcagaccgaaaagataaaccggacaatagctcaatggcaatggatgaagaggaaatgcaggcgcttggtaaagagatggaagaactagagacgaatgacgaacttaagaaaaaaggtcgtcgtccagacccagtacagcatgaaaagaaagacgagaaaaaataactcccagctgggggttattttttttgaaattaaacgtagggatagcaaaagaggaagaggaaggttctatattttgtccaaatccaataagaagttcgataaaacggtaatttgtcagaattaattgtcaattatcgcttgtatttgcataggataaagtatactattcaacgcagccaggggatgtccatataaggatgctgcttttgaacaatcatcatgagcgatcatcgatcattgaataaatttccgatagaaattttatttttttaaggaggggaataaggcatgaaagacaagaattccaacaatttcgtcgtctctcaggagaattggtccctccaccgaaaaggctatcaggatcaacaacgccatgccgaaaaagttcaggatgctatccaaaacaatctcccggatctcatcagtgaagagaacattattctttccaacggtcgagatgtcattaaaataccaattcgatcacttgatgaatataaaattcgttacaactatgataaatcaaagcatgttgggcagggcgaaggcgatagccaggtgggagacgtagtagcacgtgatggctccggcgaaaagcagccaggagcaggtaagggtgaaggagccggtgatcaacctggggaagattactacgaagcggaagtgtcgcttgtagaacttcaggatatcctatttaaagaacttgaattgccgaatttacgtgaaaaagaaacagctgatgttgtccagaagaaagtagaatttaacgatattcgaaaaactggtctaatgggtaatattgataaaaaacgcaccatattaactgcgtataaacgaaatgccattagcggtaaaccagcaattgcaccgatctatcaagatgatcttcgttttaaaacgtggaatgaagaaattaagcgtgagtcaaaagcggttgttttggcgatgatggatacaagtggctcgatgggaaaatgggaaaagtatatggctagaagctttttcttctggatgtctcgttttcttaggtcaaaatacgaaacagtggagatcgagtttatcgctcatcatacagaggcaaaagtcgtcacagaagacgattttttttcaaaaggagaaagcggtggaacgatttgttcatccgcttatcgaaaagcgcttgaattaattgatgaaaagtattctccatctcgctataatatctatccattccacttctcagatggtgataatttaacgtctgataacacaagatgcgttaaactggtgaatcaaatcatgaaggtatccaatatgttcggatatggagaagtaaatgcttataacagacactccacactaatgagcgcttataagaatatccatgacccgaaatttaggcattatattttaaaagagaaaaaagatgtttaccatgccatgaaaagtttctttcgaaaagaagaagaagttcgttcataaaacttcccttaaatggggagtttttttctttttgtatggtaagtaacggattaccagcaacattaagcttttagttaagaaaggaaagagcatactaatgggaagaaaaaataggagggacgctgatgaagtttttattcgctctttttttctcccaccttatcctattacaaatgccgtatatcgtgactgcagaaacaaatttggttgaggtccactttctggatgttggacaggctgatagtattttaattaaatttggagaagaaaccatgttagtggacgcaggcgataatggtgatgggggaatggtaaccaattatttaaaagagataggagttacgcaactggattatctcgtagctactcaccctcaccatgatcatatcggtggcatggatgaggtgataaaaggttttgatgtgggacgggtgctgatgcctgatgtatcttatccaaccactcattataaatctttactcaaggaaatgaagaaaaaagacattcctgttacgacggcgcacgaaggcgtgaaaataaaactcggtcgtcgtgttagtgtacaggtgatttcaccttccggaaatgcggagtacgaggattttaacgattacagtgcagtacttcgtcttaaacatggggataatcgttttttatttatgggggatgccggtgtagaagtagaaaagcaaatgctcgttggattgaaaaagaagcagctagtatctgaagtgttgaaaatcggccatcacggagcaaactctgcaactacagatgcatttataaaagctgtgagtcctgaaactgctgtgatttcagtagggaaagataaccggtatcattttccggataatgatgtgctccaaaggttgcgtgggaatgatgtttccattcttagaacggatcaaatcggaacaattattgcaaaaagtgacggaaagaatattaccttccataccgaaaataatcttatctcacataaaaaggaaaaataatatattcgaattgagtctacactataacggtggaaggcaatgcctttccaagctcaatgatcatacaacctgggaggaatgcttgtgcaaaacaatctgcaaaatctcatgtctaagaacattgtgtctgtaacgccagagcagtccattcaagaagcagccgcgttaatgaaccaacacaatattggctcattaccagtaatgaaaaacggccagctttatggaatggtcacggatcgtgatattacaactcgtgccactgcgactggaggaaatgctaattgtcaggtgagtcaatgtatgtctgataacattgtttcagccacttctaacatgagtgcagaagaagcagcggctttaatggctcagaatcaaatccgacgcttgcctgtcgtagaaaacaatcaggttgttggtatggtatcacttggagattttgcaactaaaacgcctgagcaacaagaagcgggtacagcgctatctagcatttctcagaatggtactccgaaggcgtaaagcaagggagactgacgtcgtcagtctcctctctttttacatatgataaaatcaaggtacaaacagacctaaaaagggtacatagtaaaatagatctaaagtggagggaaagcagatgtcagaattagacgtatcgaaattcgaaaaaaagattgagatcaggcaaattcgtcatgagaatatcgacgaaatcctagcgttacaaaaaaagtgttttcctggaatggatccctggaaaagagaacacctggaaagtcaccttgatatctttccggaaggtcagttttgtgtagagcttgagggagaaattattggttcctgttcaagtctgatggttaactttgatgagtacgatgaccagcatacatgggacgatattacagatgaaggttatattacaaaccataatccagatggctataacctatatggaattgaagtaatggttcatcctgaatatagaagaatgaagatcggcaagcgcttatacgatgcacgtaaagatcttgctcgggaattaaatgttaagagtattataatcggtggacgaattccgaattatcataaacatgcagatgaaatgaaggcatctgaatatgttgaggaagtaaaattccaaaatatttatgatcctgtgttaacgttccagttaatgaatggttttaacgtgatgaggatcaatccgaactacttaccagacgataaagcttcaaagcagttcgctacattaatggagtggaacaatgttgaatacaaagccgtaacaagaagacattttaggtcctctttccctgtgagaatctgcgccattcaatatgctatgaagaagataaattcctttgaggagtttgcaaaccaggttgaatattatgtagatgtggcagctgactttggctctgatttcgccgttttccctgagatctttacaacacaacttatgtcgtttatggatgagaaaattccaagtaaagccgtccgtaaattaacggagtatacagagccttacattgaacttttcactgaattagcagttaaatacaatgtgaacattattggtggctctcattttgtattagaggatgaaaagatctacaatattgcatatttgtttagaagagacggaacgattgaaaaacagtataaaattcatgtaacaccgaatgagcgacgctggtggggcatccacggttctgatggtatagaagttttcgatacagactgtggtaaaatcgcgattcaaatttgttatgatattgaatttcctgagctcggtcggattgcaacagataaaggggcaaatattctttttacacctttctgtaccgatgatcgtcaaggatatttacgtgttcgttactgcgctcaggctagagcggttgaaaatcaaatttatacggttattgctggtacaatcggcaacctttctcaagtagaaaatatggatgtccagtatgcgcaatccggcatttttacgccatctgactttgcattttcaagagacggcattgctggagagtgtcacccgaatattgaaactgtcgttgtaggggatgtcgatcttgaaattctaagaaggcagcgtcagtctggaacggttcgtcaattacgagatcgtcgaaaagacttatatgaaattcattataaaaagtaagccgttcaacggcttgctttttttgtcgttttttaggaagtggtgtttttttcctaaatagcattggctgatcacccaattcgtattatgattgagtaagaataggagaaaatctgaccaaaaaggaaggacttcagtcggttttctagaaatgatacaaacgtgataaagaagctatacataacaggaggaaaaaaatggactggaaaaacgagtacaagagatggacatcagcaacttcacttgatgaggaattaaaaagggatctggaagctcttagtgggcaggataaagcacttgaagatgctttttacaaaaaccttgagtttggaacaggtgggatgcgcggagaaatcggtcctggtacaaatcgaatgaacctgtatacgatacgtaaggcgtctgaaggcctagcgcaatacatagatgcgaacggtgaggaatatcaaaaacgaggagtagcaattgcgtacgattcacgtcacaagtcacctgagttcgccatggaagccgctaagacgttagcgacacatgggattcaaacatatgtctttgaagagctacgccctacgccagagctttcttttgctgttcgaactttaaatgcctgtgctggaatcgttatcacagccagtcataatccgccagagtataatgggtacaaagtatatggcgaagatggaggacaacttcctcctaaagctgcttcagaagtgatttcatatgtagacggcgtagagaatgagttagaggtgaccgtttcttctgaacaagaattaaaagacaaaggactcattcaaatgattggcgcagagattgatcgtcaatacgttgagcaattaaaaacgcttcgcgtgaatcaagcactactttctgaaatgggtgagcagttaaagatcgtgttcactcctttacatggaacagctaatatccctgttagagaaggattgaaagcatatggttttaacaatgtaacggtcgtaaaggaacaggagctgccagatcctaacttctctactgtttcttctccaaatccggaagagcatgctgcatttgaacttgctattcaatacggggagcagcaaaatgctgacattcttttagctactgatcctgatgctgatcgcgttggtgtagctgtaaagaacaaggaaggtaaatatgttgttcttactgggaatcaaacaggtgctcttctgttgaattatattattacccagaaaaaagaaaatggtgaacttccacaaaatggggcagtcctaaagacaattgtcacttctgaaatcggtcgtaagattgcggaagacaatggcctgacttcatatgatacgctaactggatttaagttcattggcgagaaaataaaagagtttgaaacgactggggagcatactttcttattcggatatgaagagagctacggttaccttgttggagactttgttcgagacaaagatgctgttcaagcgtgtcttgttgcggcagaagttgctgcattttacaaatccaaagggatgacgctttatgaaggacttcttgaggtattcgaacaatatggttattatcaggaaggacttgaatcactaacacttaaaggtaaagaaggcgctgaaaaaatcgtgtctttacttgcgaaattccgtgaagagccacctactgaagcagctggattgagcgtacaaagcgtagaagactacgagataagtaaacgaacttatttaggtcaagataagagtgaacaaattgatttgcctacttcaaatgtattaaagtataaacttgaagatggatcatggttctgtcttagaccttcagggaccgagccaaaggtgaagttttattttggagtgaatagtgataatctagaaaacagtcagagtaaattggctgatcttagaaaatctgtgatgagtaaggtgaatgaccggttataataggatagtggtgaaagaaaaccaggacaatgttcgtcctggttttcttaattaactaaaaacataaaaaaaaccggttagttaaccggtttttctactattggtgaagttgttgtttattcaattgatgttcgtaatcagctttattcttacgaatgagatgaaatactttgtctttcgtttcgctatctagtttttcgagaattttacctgctttgtattcgttcgaggtaacaatctttcgataaattttagataaccgtttatcatcttcggataaatccaaaaggcactgcctccttataatgaactaaacctttttcctatccttaaattacgatttattttacaatatatgaagagaagtagcaagaaattaatataattatgacagaatattcttatatatatactaacataaatgaacatgaaagggagtcataccatggaatatacaaatgaaatgaaaaatcgtttaaaaagagttgaaggtcaaattcgcggtgttctccgtatgatcgaagaagaaaaagattgtaaagatgtcattactcaactttctgcgagtcggacggcaattgatcgtacgattggattaattgtcggttcgaatcttgaagaatgtattcgagaacagcttgataaaggtgagtccacagaagacgttgtaaaagaagccgtacaactattagtgaaaagtcgctagtttaatttttcctcaaatatttcatagtgtcggataaattcatcttgtggtcaatcgaaacgaatgagagtgtatataatttgcacgctggagaaatagtgaataatagatcttctcatttctgttattcgctttcagttacgctcgcgatgaatagatagagataattgcttttacgtttatttgaagaaggaggagcaaatgaaacgtcttagaattggaatcttagtagttcttgtttttttggcgtacagtctctattctacttatcaagagaaagaagtgagtgacccagcacaaatgcaagctgcagaagtaatgtctgatgcgaatgaaataggaattcaagaaggaaactatgcacctgactttacattatattcgctcgaagggaaagaagtgagcctttcagatttcaaaggaaaggttaccttcattaatttctggaccacctggtgtcctccttgtaaagaagaaatgcctgatatgcaggagttttatgaggaagatgcgaaagagtttgatgcggagatccttgcagttaatcttacaacgaacgagtcatcctcacagactgtaaaagattttgcaagtaaaaataatcttacattccctattctaatggacacagaaggacaactaatgaaaacattcgcgaccattacaattcctactacttatgttatcgacaaaaatggtataataatgaagaaggtaattggcccaatgaacaaagaaatgatgagtgatttggcatttactgctcaataaagtgattattaattcgttatctatgtctcgttgttcgttcctttgttctttttagaagacgattttaggtaacactgaagataaacagttgacacataagggggagtgaactgtgatgaatttaggatttggtgtcatgctatttgttatactggggtatgtccaatacagttggatttatgaaacagtagatgggattgggtacgaattcaaatcaaaatggtcttacatatcgatgtcagtgtttctgggtgtgttagtcggctatttcattacaactggtctctatcaagcttattaaaaagagctaattgttttaaatataaagtttgaaagaaaatgtttccgttgacgttttatgaaatagcacttatgctgtacattgtatactaaaaccagcccaaaaaggctggacggcgatttttctgagagaccgatctctcattttcatcgccctctgttgattaattcgacagggggcgattttttttgttttcacacagtaataagctttttctgaagttgaaattaacaaaaatggagtgaatgggggatatataaatgtggaagtatgtattgcttgttttagctgctggatgcagtctgggatcactatcaacaattacaaaaatagggattacaagagggttttctgttggagaactattagcaggacagtttgtcattgggtggttgatcctacttattctacttcttatctctaaaaaaaagccaagttttaaaggggctaaatttttgttgattggcggggctatgatcggatgtgtttccatattctatacgcttgctgtctcaaagcttccagcttccattgcagttctgcttttattccaattcacatggattggtattgtcattgattccttgtatcaaaaaaaatggccagatttaaaaacgtttttttccgttagcattcttcttatcgggacgattctagcgagtggaattattggaagtgagaagttagcttatgatccaatcggaatcatgttggggcttttatcagcaatttgttttgccatgtatatttttattatggggaaaacttcggtggaagttcctgcaatacagaaaagctttttcatggtgaccatcgcaggagttcttgtgttaacgacattttctccagaatctcttttacatggtaggctatcgttagaatggatgctgtttggtttcttcttagcgatacttgggaatatatttcctgtcctttttatggcaataggagtaccgaaagttggttcgagtgttggaacaattcttagttcttcagagcttccggcagcagtgtttctctcggctatcattctacatgaagccgttcatatgattcaatggggtggcgtccttctcattcttactggcattgtcatttcccaatggaatgtttttggtgaaaataaattagaaaaaaaagcagcatagtgttaggtaactgacaaatagaaggaaatgaagacgaatgtatatccttataacctattttcgtaaaggggaattgcgtaatggaattgttacgtattgaagacacgtggattcagcttggaattgccattggaatcttccttctttttctattaatgaggaaaattttcgcgaagtatatttataatctcgttcttaaattaagcagaaaatcttctaatgaatttttcacacatctttttttagcgtttgaaagaccgctacgaatgctatttgtgattataggattaaatatttctgttcgatatgtttcttttcttgatcatcataatgaactcttcaatgacattatgagttcagcgttaatttttttagcggcttgggggctgtataacttatcctcagcctcttcattatttttccaaacgatgaatacgaaatataatttaaaaattgatcaacttctaattccatttctatcaaaaacgctccgtctcttaattgttgccatgactttcagcgtcattgctggtgaatttggttatgatgtgaatggttttattacaggacttggactcggaggattagcctttgctcttgcagcaaaagaaacgattgagaacttctttggtggcattgtgattattactgaaaaaccattctcaattggggagtggattaaaacgcctagtgttgaaggggtcgttgaagacattacgtttagaagtacgaaaatccgtacgtttgctcaagcacttgttactgttccaaatgcgagactagccaatgaaaacattacaaactggtcaaaaatggggaaacgtcagattacgttccatcttggtgtcacgtacaatacgccttcagaaagacttgaaacgtgtattactcgtattgagaagatgcttcgagatcatgatgaaattcaccctgaaacgatctttgtttcttttgatgagtttaatcatagtagccttgatatttttctttatttctttacaaatacgacaacgtggggcgactttttaaatgtgaagcaagacgtgaactttaagatcatgaaaatcatggaggaagagcaggtttcgtttgcattccctacgcaaacactgcatgttgaaaatgcacgatctcatgaagaagaaaaaatgtatagctaaagaaaaaggcaggtctccatttaagagatctgcctttttgctatgcgcttctctttgaaaaaacgttttgttctttggcagtcggcttccttttactccagatggtagcaagaataggaccggatatattatgccatacactgaagattgcactaggtactgctgcgattggattgaaatgagctgctgctagtgctgctccaagccccgaattctgcatcccgacttcaatggagatagctcgttgatcaggttcattaagtcgaaataattttgcgagaaaatagccaattattaggccgagcaagttatgaagaataacaattgagaagatcaacagtcctgtctctgcgatgcgctccttgcttgcgccaacgactgcagccacaatagcgacgatagagatgacggaaacaaggggcaatgcttttacactttcagcaactttttctttgaaaataagctttacgataaagccaagagtgattggtataacgaccatttggaaaatcgataagaatagatctccagctgacaccggtagccactggctcgcaaataatagaacgagtgcaggcgttaataaaggagcaagtagcgttgagacagctgtaatggctacagataaagctgtatttcctttagagagataagtgatcacattggaagccgttccgccaggacaacagccgactagaataacacctacagcaacttcagcgggtaactgaaatacaacagcaagagcgtaagcgagtagtggcataatgatgaattgtgccgctactccaatggcaacactttttggctgcttcaccacttccttaaaatcattggtagagagggtcatccccatcccaaacatgataacgcctagtagtatggttatgtaggaagtaatccacgtaaatccatcaggataaataaaacctaacactgcaaaaagaagtacccaaatcgcaaatgtatttcccgcaaagcgacttgcattttcaagagctttcattccaccacatccttagaaattttaaccttgattatacgcttatttaaacaattttcaatactatctgaaaacttattcaactatttttccataacgattttcttccccctaatcatgaacctacttgtccggtcatacatattagtaagcaatacattaggagggaatgacatgtctacagagaaagaaatcttttatgccatagaagagattacggagatcgcaaaagggttcggactcgattattacccaatgcgttatgagatatgtccagcagatattatttacacattcggagcatatggaatgccaacgcggttctcccattggagttttggaaaacagtttcataaaatgaagctgcaatatgatctaggactaagtaaaatctatgagcttgttattaattcagatccttgttatgcctttttattagatacaaatagtcttattcaaaataagcttattattgctcatgtattagcgcactgtgacttttttaagaataatgttcgtttctcaaatacacgaagagacatggtcgaaagtatgacggccactgctgagcgtgttgcttattatgaacatcactatgggaaagacgaagtagaaaacttccttgatgcagttctctcgatacaagaacatatagatccttctatcatgcgccctagactaacttataattatcaagacgatacaccaattccagtaaaacatgattcaccatacaatgatttatggtcaatcgataaggatgattctgcggacgagccaactccaaagaaaaagaagaaattccctccacaaccagaaaaagatcttcttctttttattcaggaatacagtacggagcttgaagactggcagcgtgatattttgaccatgatgcgagaagaaatgctttatttctggccacaacttgaaacaaagattatgaatgagggctgggcgagttactggcatcagcgtattctgcgcgaaatggatttaacgacggatgaagcaattgaatttgcttctttaaatgctaatgttgtgcagccttcacgcacgcgtattaatccttactacctagggcttaaaattttcgagcatattgaagaagtttacgataacccaactgaagaaatgaggctgcggggattcgagcctgggaaaggccgagaaaagatgtttgaggtccgtgaagtagaagctgatatttcattcattcgaaattatttaacgaaagacctcgtctacaaagaagatttatatttatttcagaaaaaggggcgggattataaaattgtagataaagaatgggagcatattcgcgatcaacttgtgacaatgagagtaaatggcggctttccttatttaactgtcaatgatggaaactatatgaaagctggcgaaatgtatcttcaccattcttttgaagacacagaacttgatcttcaatatttagagcgcgttcttccttatatttatcagctttggggacgtccggttcacatggaaacaaaagtggaagataaggaagttcttttttcatatgacggaaagaaattgcatcgaaggtatttgtagaccttggacatcctgagtcatttaaacgatcatttctggacttatcttctctttattacggtcgctggcgcagtaggaggagttgggaatattcttatctcaggtgaattccagcgttttcgtaaagtaataaattatgaaaatcaaacagtttactacagtctagggtctattaaagagccttttgtaggagccattggcggtatcttaacaacgcttttgtttatcgaaacagcttcagctcagtatttgttatacttagcactgctcacaggatttggcagcagtgcttttctaaagcgatacgtggatcaaaaaacagatcaaattattgatcaaaatatcagtgcgattcaaaatgaaaacattcaaatgtatgctgcgaaaaatgaagcagatgggtcaaaggtaaaaggaattatgagtccatcacctgtttacttaacagaagaagaaatggaacgtctcacaaaacttcaagcaaaagtgggtgaagcggtaggtccgaaagaagcaaaactgtatcagtgtgaagttaattcgcttctaagtcaaggcaagcagcgatcgttttaggtgtctcttgtcgaagtatgagatctatcgtatgatatatgtgattgcgcacatataaaggggatctcatatgaaaaaagtgataaaacgaatcagtcttattgttttactgttagtagtggtcctggctatcgctttctttttctgggcgcgctctgcatatgaaccaacgaaagaagcgctaacttatatggaaaaatcaaatgaaaatgaattaacttttggatcaatagacgcagataaagggattatcttttatcaaggcggaaaagtagaagaagaagcatatgcttacctagcgcaccagcttgctgagaaaggttattttgttgtcatcccgcgactaacattaaatctcgccattctggatggcgacgaagctacgagtattatcgatcggtatagcacgatagataattttggtacattggtggtcattcactaggtggtgctgtggcttcctcatttgcagtggaccatcctgacctcatacatggtttgttttttcttgctgcttatccgattgaagacatgtctaacttagagatgccaactttaacaatatacggggaggatgatggtgtagcttccctatctgaccaaaaggaaaaagaaagcttgctatcttctcaagctgtcattcaaataattgaaggcggaaatcatgcaaattatggtatgtacggtgagcaaaaaggagataatcctggatcacttacatcggaacaacaaatcaatgaaactgttcaaaccattacaacttggatagaaaaggaacaaaaataagaagctgtcactgacagcttcttatttttatggggttttttagttcggataagggaataaggaatagaaggtaagaagattctcaataatggaggatatagggaagagattgacagaaagcgtatatgggttaagatagggaatgtaattatctaacccttcatatgagttaaactccttactttagataattgaactactgactaggagctctcttaaaagtttgtattatatgaaaaggctgtggatgctttgttaagatctcgatttcgacgaatccgattaacgtccgttcagttaatcgttttgttttatttaatagcggtaacggtttccactttcttaattggtttaccgattgcccataaacctggtgtgcagctctcctttattgatgcgctatttacagccgttagtgcggtaagtgtaacgggtctttctgttgtatctattgcggatacgttcagcgttccaggtattttcatactcgctgcagtcctacaaattggtgggattggaattatgacgctcggtacatttgtgtggcttgttatgggcaagaaaattgggttgaaagaaagacagttgattatgacagatcaaaatcaatcaaccctcgcaggcttagtgcaactgatgaaacaaattcttggcttgattttcattatagaagcaatcggagctcttgttctcggtacttattaccttcgcttttttgaaacctggcaggaagcctatttacaggggttctttgcctctgttagtgcaacgacaaacggtggttttgatataacaggtagctcgcttcagccattcgctcaagactatttcgtgcaatttattcataccttattgattgtgactggagcaattggatttccagtattaattgaagttaaaaactttttgttttctagacaaaatagttatcgctacaaattttctttatttacaaaactaactacgatgacgttctttttgttggttgtatcaggtgctattctgatttgggcttttgaagcgacaaccttctttgcggataaaagctggcatgagtcgtttttctatgccatgtttcagtcggtaacaactcgtagtggaggactctcaacgatggatgttaatcagttccaggagcctacacagctcctattatctgcattaatgtttattggtgcttcccctagcagtgtgggaggtggagttcgtacaacaacctttgcgattgtactacttgctattttcttcttcgcaaaaggcgggacatcgatcaaaatttttggacgagaattgcatcatgaggacattcacaaagcatttgtcgtcttcaccgtagccattatcgtatggagctgcggaattattatgctctcattctcagaaccatttccgattgtcgcaattattttcgaagtctcatcagcatttggtactactggtttatcaatgggtgtaacaccaggattaagtacatttggtaaaattgtaatcatgtgcttgatgtttatcggaagaattgggattctttcgtttctcttccttattcgaggaacggttcttcgtgaaagataccactatccaacagaacgagttattattggataaaagcaaggggcatagtgcctcttgctttttttgtacagtgatgaaattattttacgttacttttaggcgtgttctagttcaagcgttccaatatcttcgtttctaaacgctcgtctccgcttttcttgtctaactgcagcgggcaggatctcgatcgcttcaccttatcaaatgaacacaaagaccgtgttctttttataaggctccagcgcttgtcgatcctaaacgcccacttccgcttttcatgtctagctgcgcgggccaaatcctccggctgtttcgcccattcgaatgagacaaaaagcgtctcagtcgaaagggctccaacatcctgcggatttaaacaggcccgctccgcttttcattgatccagctgcgcctcgcagaaacggagatatttcactctttcaccagaacacaaaaggcgtgttctagttcaagagctccaatatctccgtttctaaacgctcgtcttcgcttttcttggtcttatttaccaaaaaatattggtatataaaaatcgggatttcacaaactagttgtacaaaggaggtgattgacatggctcaacaacaaagcagacaaggaagctctaacaaccttgtagtacctggtgtagctcaagctatcgaccagatgaagtatgaaatcgctactgaattcggagtgcaacttggtccagattcaacttctcgcgctaacggatctgttggtggagaaatcacaaagcgtttggttcaaatggctgaacaacagcttggcggttaccaaaaataattttataccatggctgtaaggggtggattcgtccatcccttcttacgtgatttacccatagaaggaggaggatttatgtcttttgaatgtccgctctgtaatagctttgctgctattgagcttgtttgtcaggtatgtgaagataagttaacggataagggaagagaagcggagtattatgatgaatatagtgcatatgagcctattgaagcaatgaagaaaacagacggatacaaaaccaaagcgcatgaatgcccccatcttctatcttgtccaacttgcgggtggaatgatgtatatttaattgaagagtggaatacatagcaaagagctgccggttagggcagctctttatcttattaagaggatggaatatacaatttcttctcaagaaaactttgtatgagattaagaatcgtcgtaaagaaccaataaatgaaagctgccgttaataagattggtaagactttaaagtttgatgcagcaatctgatctgcattataggttaattctgaaatcgtcagtacggaagcaagagaggaggcttttacgatatcaattaaagaattccacacgggtggaatcgctcttctccaagcttgaggtaaaatgacttctttgtatattaacgattttttcatcccgagtgacatcgcagcttcccactgtccttttgagagggagagaatggctgctcggaatgattcagagatataggctccaaagtgtaagataaggccagtgtatgcggcttgccaggctgttaattggatatcaacagagacaagaccataatacaaaataaataattggattagtagtggagtgcctctaaagaacgagacatataattttgctaacccaatcgctattttactttttgaaagacgcaacaaagcaatcattaatccaacgaataaagcaccaaagatggaaaagaaactaagaagaagtgtattcttcgccccttcaagaagaaagggcaaagaattaattaacacatcagttgtctcactcacttacgttctctccatcaaaatattcttttgaaaggtctgcgagtgttccgtcttctttcatttccttcaatgcatcattgatcttgttaactaaatcttcatttccttttggaagagcaaatgccatttccgttttgttgaatgtttctccaacgccttttactttataatcctgctcaggcagttccgttaaaataaagagacggtcattcatcgcagcttcaatgttacgttcgttactaagatctgtaagaacctggtttgcacctttgtaaatttttgtttcagctcctgcatcttcagcagcttgcgcgtagttacttccctgtgttgttccaactgtttttccttcaaggtcctcaatacctttaatatcttcattattctcgttgacgatcacttgtccaccagaataagtataaggctcagtaaaatcgaactgttccttgcgttcgtcggtaatggtcacttggttcgctaccatgtcgatacgttcggtctcaagtgaagaaagaagacctttccattcaattgctttgaattccgctttcattccaatacgatcggctacttctcttgcaacctccacgtcataaccagtgatttcattattgtcatcacgatagctaaatggtgggtaagttgcttctgttccaattaatagcgtttctttttcatcggaacttccttcttcgctattctctgtattatcattgctaccgcaggcagcaagtacagtaagtgttaaggcaagtaccaaccctagcatccattttttgttcaaaataaagtcctccttttaattcctacaaaattgatgtgaattataaatttattgtagttagcattttacttaaagtcaatcaagaaacattattgacgttaatttcctgcttcatgcaagaagacaaataaaaaagcttcctcgctttaagaggaagcttttcctaccattttattaacgaatgcgaagttctgattcagtatcaaagaaatggcatttattcatatcaaacgcaaggctgatattctgaccgttttgaatatcggtacgagagtcaacacgtgctacgaagtcttgttctgcaactttggaataaaggtaagtttctgcacccattaattcagctacatcgatgacggcatcaacttttgtatcttgagaagattcgataaatactggttcatcatgaatatcttcaggacgaataccaagcatgacttctttgttcaagtatccttgatcacgaagtattttcattttcccttcaggaactttcacttgaacatcacctagtttgaaaaagccatcttgcaatgtaccgcggaagaagttcattgcaggagatccaataaagccaccaacaaagacgttgtcaggtgcatcgtatacatcttttggtgttcctacttgttggataaggccatctttcataataacgatacgcgttgccatcgtcattgcttctgtttggtcatgagttacatagattgtcgttgtctgtagacgctgatgaagcttagaaatctctgcacgcatttgcacacgaagttttgcatctaggttggaaagtggctcatccatcaaaaacacttgtggatcacgtacgattgcacgacctagtgcaacacgctgacgctgaccacctgagagtgctttaggtttacgatcgagcaagctttcaagaccaaggatacgagcagcgtccgttacgcgacgttcaatttcttttttgtcgaacttacgcagtttcaaaccaaatgccatgttatcgtagacgttcatgtgaggataaagggcatagttttggaataccattgcaatatcacgatcttttggtgctacgtcattcacgcgacgatcaccaataacgaggtcaccatctgagatatcttcaaggccggcaatcatacgaagcgttgttgatttaccgcaaccagaaggtcctacaaatacgatgaattccttatctttaatatcaaggttaaagtcttttactgcctcaaatttgttatcatatcttttgtaaatgtgattgagcgcgatctctgccatgttaatgcctcctatgaaatgaactccttttgctagttctaagtctactctatgaaaacgctatcgtaaattgtaagcgtgcacaaacttgttccgaggttttgtgcattttgaccgaaagacgtgagaggaaagggcaacgcaataaaaaaaactgcgtccattaacgcagttccatcgcaagaagagaaagataaaccatcacagctccttgaaagcttttaacatcgattcccgttttttcaataaacttatcaacacgatattggagactatttctatgtacgtatagctgttttgctgcaagggtaatgtttaagtttgattctaaataaatccggatactttttagtagttcagagtcatgttgaattggttccatgagtttaattaagtaatcaatggtttcttcactcgcttcattgaaaagaacagcagggacaatgtccacgtgtgtgaaaaccatttgagaaggcatcagctctcttcctgtagcgaaccattttttttcggctttataaacacgctttaagtgactgctatccgaatgacggatcgtctgaccaacaaacaaagacatcccagtaaaaaagtcagctgttagggctgcagctgtttgttcaagttcatgaacgatttgttcgtctatttcgttagcttgcacgagaacgcctttcctctcattttcaaacaaaagcaccgtttcctcagaaaacaggccagtcatagcctcgatgaaatcagaaagatcggatggtgcttcttttaaataaaaatggatataccggacaggtgaatttaggttaagttccacgcttgaatcctcttcaaaaaggagagaagcccattttgcttgaacctggttcatccgatcatctagtatgcgaatggaagggaagagggcatttagaagatccttctcgcgtccggtaagacgagttttgcgaatcccgaattcttcaccatcagtggttcggtaccaatggaacagatcaggctgttcggaggtgaggacgtaatcatttccatatagatcggcaagttttgcattcataagtggtccccctaatgtacagttatcctctagtataacgcatgagctgcttcaaattaatagagaaggaatcgaaaagaacctcttcgtatgcaagaggttcttggattacattatttctgtttgtctttatcctttttttctacgcttgaatagggaggctcttgttccataacgggaatagcttcttcaatttgtgcctgtctgtaactttgatgaacggcgccgccagccattccttcatttaccatacggtcgatatccatatcaaatttatcgcggccttcgtacatcgagtcttctgttttttttgttggcatccttattcatctccttgtttcgttgaataaggttagtatgcgttccttagaagaggattatgagtcttgttcgtatacatggaaaagcataagttcatgaatttgagactgaagtttgttttgttccgattcgggtggagcgggctggaaccatgcgaattctccagtatgaaggtatagtgtacggtaatacgttccttggtgaaaaaaagatacttcccatttaggttttcttacttttgatccaaccgatttatattgaaagtgcgaaatcatcgtattcccccatgtcacttttttatcatcataacataggaagttaatacgctgaataagttcgaaaagatgtgatgagcgaacgtataaaagcttgatgaatcaatggttcatcaaaacgcattggttttgcattcgcttcaaaaacccaaagctgtccatcacgatcttttccaatatctaaagagcattcgagcatctgttcttttttttcaagaacttcagctgtacgaattgcaagcgaagtcagtcgcgcttcatcctcctgagtggcaaccttatgaaacggtagaatacgcccaccttttggaacatgggtcgttagtccatttggtggagccgcacgaattccaatgccggtgacctgccagcttttgaacggtttttgtaaaaggactcgaaaatcataagcttctccttgatgtgttgccagtttaattttacgttgcatgatataagactctcctatttgagtagcaaggtgttcttttaataaggagaaagttgaaaataaataactcctttcatgatcggtatagtgaaatccagtctctactctatttactttaaaaattcctctccctttactacctgaagttggtttaaaaaatatggagtggtgcgtattgagaaattgttttacgtttgattcggtaacaggtgctgactctggaataaaaggcaataactcttcgtttcccgataagtgagaaagtacatgatctttttggaagaatgaccgattaaaatatgggattcctttcttctttagtaagctgaaaaaagcggtcactttatcggagtgctcttcttcgcgatcagggatccggttgtaaacgatgttaggatacgggaaacgataacctgtccatttttgagaaaagtgatcgtaaaggtaaccagttataaatgatgaatgaatatcgtcaggtgtaaatacgtaagaaagtccgccagaatcagtgagctctttttgaatggctttgaatatcgtaccattgccactgaagtgatgcttgcgggtagatcctgcaagaatgccgacaagaggcctgatggcatcatgggaagactgcaatttaataatagaagaagaaaaagagggaaagggagggagcgtatttggctctttcccccaataaatggattgataactgctctgctgataccagcgtttattctcatgactataaaataattcaatcatactgtagtaaccagttgcttttcgattgtcgattgtgctagaaagatggcatattcgatcggtaacattctcgttcttgcttcttctgcttttaattttggatgggagaaaatacctcttcctggctttgaatttgcttcaaataaataaattttgccttcttttgtaatgccgagatcaaacccaatttcaccaataaagccagagacttttttatctatcgcacgacttaattgaagggaagcctccattaaatcagtttctacctgcttctttacgccatattcagaagtgagctctccaattgttttaacagttccatttgatgccatgtgagtcgttaagcttcctgcgcctgcgatctttgcagcaatcgcactgacttcccagtatccgtctttgtttttgtttgtatgaacgcgataatccattgaacggtgatggatgcgatgtaaatcaattccctgttgagcaatgagaccgtccattccatttggatactgggttttgattagccttgctagtgatgtatatcgtctaaggcggttctctttatctgttctgaagcggcaataataatacttttcgttagctggttttaagatttgctgaatgccaagaccaagacttccgttggcaggtttaatatatagttgctcatactctttcaacatacttgcgatgatcgttgttttaggacttagaaccgtttctggtaaataatcctttactgcttcatctttgcgtaatttctcgaacatcgtccacttatcaaagaatccaggattaaaccagggagtgaagtattgcgattgaagtttcttcattgtcgtactgacttgttcaatgcttgctgaacttctgtttggaaggcggtcgtaaacaacatcagggatcggtacggttactctgtaccagcctcgtttgttatacatcaatcctttaatacttcctgttttccaatcaatgtgatgcgcgccaaaagcaaagccaattgcaccacacttcaaggtagctgacaataatttagcgaaatacatacttcgttccccaatcggcctcatactatcctttgtaaaccctgctgtgaaaatcccaattagcggtccgatatggagtgaatttcccttttcaaaaaggtgaacagatgtttccgaaggcacacccagcactttccataaatcttctgatagaaggtactcttctttgttatcaggatgaggagagactgtgcaaaaggatcgtctggaaccaaaacatagctgattaggaaaagaaatgtgatctacccaacgtttaaacagagtggctggaacatagaaattcccttgagaagtactatcctttcttaatggaagaatggcattcatagcacttaacccctttcttctcgctgataagcgaatggcaatagtaaaatggaatcgcatagtaatcttgatgcgattgaatggccttatgtcccggtttggaatttgcttcaagtaaccagactttacctgatcgatcaattccgaagtctaaaccaagttcaaacaatggagagaatgtttcttctaaaatagaagctacacaatgagaaagtcggctaattattggctcagcttgatgaaagacagacgctggcattaaaagctgttggtcggtttgaatggtgcctccgctatgcaagttagatacaaaagattcagggtttcctatacgagttgcccgaccgatttcttcccaggttgtataagaggttttcttcatgaccactcttcgatcgaagggtcgattgttttgatcaagtaaagaaagccattgttgtgcgatatagtcgcgctgttttaaaattctcctgatcattttaaataaagaactggttttatcataagtatgatgaaagatacgcccattatgattgatttgaacactaatctggtcctggttttgagtgagtagcataataccgttaccctgtgaaccgacaattggtttcaaaataagcttgccgttttcagttagtaaatcggatagtactctagcacacgtatgaggatgaagctttatcgattgtggtatatgacgatttagtaaagggcttttctttaattgtttgtatatctcccactttcctggaagcccatgaccaaggaaagttgcgttagattccgtttttaaccatctaataaaagctgtttcttttttggtggtgcttccattatgaaagcaccgatcatagataaattccggtaccttaaactccgttgccacccaatctttttttagttggtcgtattttagccctcgtaagtgatgagaagaatgctggttaggagaaaatcgatagacatcgaaacctaaagctattccagcttcacttaatttggaaacgtaatccctttcatgtttaagtgaatgttggagaatcccaaatgatttcataacctcccccttctatgaggatgcataccaatgcaccaaacggattagcgcttttacggatgggcggtaggtactagatgttgtcccttctgaagtttttgaaggttttgtgtttacttcaattatccacggatggccgtcttgatccactgacatgtcgatgccaagctccgcaaataaaccttcactctcacgatcaatgatttgtgaaacctcacgagcaagttcagggagaatccgcattagttggcttttcatcgaatcttcaaatggagcgagaccttcattaaatttttttaatagagcaccacgtgcgatatttgagacaaattgttcattggtttgagaaactctcgatacagctgagacgactgaccatttcccaccagtaccttttaaacatagaattcggaagtcaactggacaaccgtcaatatcgatgagaggtatgccttgttggatgagatagggaatatatttagatcgtaagcgaattgttttgtagaggttcggtaaggcagaagatgaaattgtttgactgccatgaaagctagagtaatcaagatgaaagagattatcactttgactgattcgaaaaatatgtttgccttggcttccatttaacggttttaaataaaggataggatgttttgttatcatgatttcaatcgcatcaaacccttctaggagaaccgtctcaggaagatatggaacgatctcatcgtataaaaggagtttctgatgtacgtcccatttatcaagaaaggactcattaaaataggggatcttctgttgttgccaatagactttcaattgtttgataaaatgagaattctcaagttttctagaatggattcgattatagataacggatggtattggtagtgtcgtttccacccatgttcgttgattccaaatgaatcctgatacctttgtttcattccagggctgtaacgtatacacgtagaaaagaatatgatgttcctcgcaatactctgctacttccttacaaaaatctgtataggatccaaacgtattctctgcttttgaagaagaattaagagcaaggcaaaagattggaccaagtgagagtatttgtttctgatgacaaaaggtcatggtaatcggaatggtttgatctggcagtgacagggaacggaggagatcaggtgaacagtatacggtatgacttgatggtgtatgatagacctttattgaaacgctaacttcaaccgcaccacatcgcagtggaatgggagaatccgtcagtttccatttagaagcgattttttctggaatggttaacgtaagtttagattgggaagagcttgaattttctggttgtaaaataattttttcagcatgtttcattcaagaccctcgttcaacattttttgctttattaccttcctttaactggataggcaatagcggatatcgtatactatgaagatgaagtttactatgtgaacgtgaaggatagaaaggttgaggtatcatgtcgtctataattataacaatcctctttatgatcgctattggcgcagtaataggtggattcacgaattctttagcgattaaaatgctgtttagaccatatgaagctcggtacataggtaaatggaaagttccatttacccctggtctaattccgaagcgaagagatgaattagcagtgcaacttgggaaaatggttgttgaacaccttttaactgctgaaggaattcagcaaaaaatgaatgatcctgttttcaagcgtacgatgattgagtatgcacaaaaagaagtgttgaaattagtagactctgatgaaaaaatcgaggatcttttaaagcgaggacttcacctcgagaatcccgaacaagaaataaggttaaaagcaagcacgtatcttactaaaaaaattgaaacaaaactagtgaatttaaaaagcaaggaattagctgagattcttccaggggaaacacaggagagaattgatcaagcgatcgaaccgattgcagatcttattttaacgaaaatcagtgattacatcgcttcttctgaaggaaagaacaaactatctgtcatgattgatcgatatcttgctgaccgtggaacgcttggaagtatgatcaatatgttttttacgaatacaagactagtggataaggtgcaacctgaactgcttcgtcttctgaagcaaaaagatattcaaaatgttatcatcacgatgctggagaaagaatggcattcgcttaaagaaacaaaattagagacgtttgaagacaagtttgactcagaagagcttgtgcaaggaataacgaacgttatcgtgaaggaacttccaattcagcatgtgatgaacttaagcttatcagaagcagtagagccatataaacagcgtattgttgaagactttgtgccgaggatcgtggatgctgctggtcaatatttaagtcggaatttgcagcccctcatggagcaattgcatcttgccgatgttgtgaaaagtcaggttgagacgttctcggtaggtcgtcttgaagaaatggttttatcgatatctaggcgcgaatttaagatgattacgtatctaggtgcggtactcggaggaatgattggattgatccaaggtgtaatcattacccttttgggatgaatttcgtttcagtctttgttatagtggggaagtatagggttatgagagcgaaataatcctcacttactaaggaggtagatacaatggcagagaaaaatctttacgacgtagcatacgaattagaaagcgcaatgcgtgaacacgaggactacacgaagcttaaagaattatacgatcaggtaaatcaggatgaagtatcaaagaaactatttgataacttccgcaacatgcaaatggagcttcaacagaagcaaatgtctggtcaacagatcacagaagaagaagctcaaaaagctcaacaacaagttgaacttgttcagcaacatgaagtgatttcccagttgatgcaacaagaacagcgcatgagccaggttattcaggacattaacaaaatcgtaacgaagcctctagaggacctttacggtagccctgaagaagacattcagcagtaattaaaaaaccgttcatctcaggatgagcggtttttttatatgatttgttttcatactatcgacggcttgattttgggtttatccgagtgaaacatgcgattcattcggataagcacaaaaactaggaaacagttataaaaaaagaataaatgcttaggaagcgttctcaataacaccgataacttcaaactgagtcggctgtgaaatgatcgtttcttctactgaacaatgaggacagtttaattggtgatctgttttcttatcactagcaatgattcctctaaattcatggtcgcattcagaacatttataaatatgtggctcactaaatgctcctgtacagtcaaatctgattctttctttcccttttgtcatacgaataagacccctctccattattgtaatgaatttgtaataatactagtttcatattaaaacttcccatgctgtcacttttttaaacgcttaattctgataacggtttaaatcaggtaaattaatgtgataagacaagagttacgagtcatagagataagtggggaagggagtacttctatataggagggattcgaatggtttatcaacttcttgcattagacattgatgggactttacttagatctaatcataaaattgacaaagaaacgaaggaagccattagttatgtgagagagaaaggagtatacgtaacgctcacaacgagtcgtaattttgcttctgctaagaaaattgcgagggaagtgaagttagatgatgtcatgctcgttacgcatagcggcgcctttattgctgaagaggttgaaaagccaatttatgaagaaaggatttcaaacgaggatgttaataagatcgttaacattctagaagaatatgattgccatattcgcatcattcatgaacgattagctgttggaaatcgagtgaagcataacaactatttatcagcaaagatgacgctaggtataggagatccattattctatccggtaaactttgtggaaacactaagtgagtatttagaaaagaaagagctctctcctccaaaaattgatgcgcatttctttaatgaagaagagagagaggaagcacgtctaatgctagaggagcgcattccttcgatatccgttgttcgttcgacaaagtgtaattttggcattattcctaaaggcgtttcaaaagcaaaaggacttcgtattttaggggagaaattaggcgtacctgttgatgaaatggttgtgatcggtgacgcagattgtgatgctgaaatgattcgacaagcgggtcttggcgtggcgatggggaatgcttcgtatgaattaaagagacttgccgactgggtaacgcgatcaaatgaccaacaaggcgtttcttatatggtgaaagaagtttttcgaaagcaaatgcgtgttcaattaaaaaggtagcccaagtttttgacgccttcatcgaaccctgacgaatagtagggaatgaaggcgttttttatgcgacttttgaatcattttcttaaaatgaaaaggctttcacgaaaaaacagctaatatgtataatgtttgataattttgaattctggagggatagtatgcaaaaattactcgacttgaatccaaaggtgacggaatttctgaaaggcacaaagcaactttatattaacggtcaatggaaggattcggtatcaggtagaacattcgatacgctaaacccctcaacaggtgaagtacttgcaacagttagtgaagcaatgaaagacgatattgatgaagcagttatggcagctcggaaagcttttgacagcggaccatggtctcgcatgtctgcctctgctagaagtcgcttaatttataagctagctgatttgatggaagaaaataaagaagagcttgcgatgattgatacgcttgataatggaaaaccgattcgtgaaacgcaaaatgcggatgttccacttgcgattgagcactttcgctactatgctggctggtcgactaaaatcatgggacaaaccattccagttaacggaccgttttttaactatacgcgccatgaagcattaggtgttgtgggtcaaatcattccgtggaatttccctctacttatggcggcctggaaacttggtgctgctcttgcaactggttgtacggttgtacttaagcctgcggagcaaacgccgctttcagcactttacttagctcaattgatggaagaagctggtttccctgaaggtgttgtgaacgttgtaccaggatacggtgagacggcaggggatgcactcgtcaagcatccaaatgtcgataaaattgcgtttactgggtcgactgaggttggtaaatatattatgaaccaggcttcgaatgatttgaagcgcgttacgcttgaactcggtgggaagtctccaaatattatcttacctgatgcagatatgacaaaagcgatacctggggcattaagcggtattatgtttaatcagggccaggtttgctgtgctggttcaagactgtttgtccaaaagaaggcttatgataatgtaatggctgatttagtaagccatagccagaagattaagcagggagctggacttgatcctgatactgaaatggggccactcgtatcagctgaacagcatgagcgagtcatgaaatatatttctaagggtcaggatgaaggcgcggaattacttactggtggacaggttccgtacgataaaggatattatgttcagcctaccatcttctctgatgttgatgacaaaatgaccattgcaaaagaagagatttttggtccagttgttgctgccatgccgtttgaagatcttgatgaagtgatcgaacgagcaaatgattcaaattatggtcttgcagctggactttggacagagaatctgaagtctgctcactatgttgcaaacaaaataaaggctggaacggtatgggtgaactgctataatgcgtttgatgcagcttctccgtttggtggctataagcaatctggtatcggaagagaaatgggttcttatgcactaaataattacacagaagtgaagagcgtttggattaacttaaaataacagaagagaaccgctcgtcctttatggacgggcggttttttgaggttgcctaaccgtttgtttgggctatctttttaagacgatcaatttacctgcagatgatacgacacgtgccgtatgatttccaaatcctttttgtttcaacagttcctcgcctactttttttgcttccttgtcgtcttgtgcctcgaaactttcatcaagaacggtagcgccacttttttcgaatgccgtgataatgtatttttccatgatatcccctcctactagtagtttaccgattgatcaatttgttgtcacttttttctaaaaaaacgaatcttttagataaatcaaacgttatacttatcgtggagtgttgcgaaggcaattaaaagggggaagttatgctcgaatttcaaaatattacaaagcagtttggagcttttacagcagttgagggtcttaatttatctattccagagaatgagatatttggtttactcggtgggaatggagcgggtaaaaccacaacctttcggatgctactgagacttattgatcaaacaaaaggaaccattagctggaagggagaagggatctcttatgattccagtcatttaattggctacctacccgaagaacgcggtctttatccaaagatgaaagtgaaagaacaactcatttatcttggtaagttacgaggaatgaagaaagcagaagttgaaaaggaaattgcaatatggcttgaacggtttaaagtccctgagtaccttgacaagaaagtggaagaactatcaaaaggaaaccaacaaaaaattcaatttattgcaagcgttattcacaaaccagaattgctcattcttgatgagccatttagtggtcttgacccagtaaatgttgaagtgctaaaagaggctgtggttgatttgaaaaaatcaggaacaaccattttgttttccagtcatcgtatggagcacgtggaagaactctgtgagcatctttgtatcctacataaaggaaaagcagttgtttcaggaaatttaaaagagattaaacgttcatatggaaaaaagaatattcgaattgatgcagattttgacgttgcctttttagaaaacgttgccggagttgttcgattgaaacaggggttaaatcatagcgtcgttcaaatcgagaatgaacaagtctctcaaaccgttttacgggagttggtaagtaaagggtttgttcgacagtttgaattagaagagccgtcattaaatgatattttcatcgaaaaggtgggtgcggcatatgaataagtttttcatcgtcctatcccagacgtatttaaaccgattaaagtccaaagcttttattattacgacggtcattacattattgatgatttttttaattacgaacatctcaaccattattaatacgtttgattcgagtgaggccgatcgtgtaggggtaattgatacaggctcgttttattcatcccttgaaaatcaaatcaagatgatggacgcggaaattgttttagaaaagttcgagggaacagaagatgaagcggaagaggcggtcgaacagggagaccttgacagctacttggttgtagaggaaaacgaagctctggagccgacaggtctttataaagcggagacggtggcagaacaagtaactcctcaagtacttgaaacagctcttcaacaaatgaagagtacactcgcagctgaaaaagctggcgtgactccggagcagcttaatcaaattgatcagcctgtacagtttgagaaagtagctttagaaaaaggggcaaagacggaggaggaattgaatcaagcgcgcgtgtttgtatatgtgctcttgttcgttatctacttttcagtcattttttatgggaatatggtagctgttgaagtagcaactgagaaatcatcacgagtgatggagatcttaatttcaagtgtttctcctgtaaagcaaatgtttgggaaaattcttggaatcgctttgcttggtttaacgcaatacgccattattattgcaagtggttatctgtttatgcaaatgcaggaagaagaactcacagaaacaggtttcctttcatttcttgatttcggcaacttgtcaacttcgcttatcgtctatgcgattgttttctttatttttgggtatttactgtatgcgacgattcttgctatggtcggttcactcgttagtagagccgaagaagtgcagcagatgatcatgccaatacagcttcttattattattgccttttttatagcgatgttcggactaagcaccccatcttctacatttgtcacgatttcatcctatatcccgtttttctcaccggtagtgatgtttttacgtgtagggatgctctcgattccattctgggaagtagctctaagccttacgctgctcgttggagcaattgtcttatttggtattatgggcgcgaaagtctaccgaggtggtgttctcatgtatggaaagtcatcttcattaaaagacattggaaaagcattgaaattatcgaaacgtgaacaatagcatctaaagaaaagaagttagcagacccggggatatggtttctccgggtcttatttttttttaaaatcttcatcgttgatcgaataagtatacgatgcaggtgagcagataatgtgaaagcgtacgaacgtgcgctcgattagatatggtaaaatgaatggtagagagcattcgaaagggagatgagtgatgaaagaagtatcctttctgcactgtgcggatctacatttagatagaccattcactggtgcgaatcaattaccaacttcgattcatgagtttgttcgagaaagtgcttatcgctctttgcgcgctatcgttgatcttgctattcagcaacgggtagattttgtcctttttgttggagatttgtttgatagtagctatcgtagcataaagacacagatggttctcttgcaagagttaaagagattagatgaggcgggaatctatagctatctatcccatgggaatcacgatgcattggacggagagtgggctgctttaacttggccagaatcaagctcctttttcagtaaggaagtggaagctgttccattcaagcaagaggagaagacggttgcctggattcatggatttagttatccaactcgtcatgtgaatgaacggatggcaagtgcttatcaaagggcggatgaaaatagtttccaaatcggaatgcttcacggaaatttagaaggacagacggagcactctgcttatgctccgtttacgttaagtgaattaatggaaaagaacttcgattattgggcgcttggtcatattcatcaacggacagagttactagaaaatccacccatcgtctatcccggaaatatccagggagctcattctaaagaacgtggcgaaaaaggatgttattttgtaaaattaagcgatgctggtccattaacggtttttcatcaaacgtctgatgttacatggcataggccagttgttgatattgggaaatgtaactccatggagcaacttctaaacgtttgtgaagaaattttgaatcaggaaaacttctctacaggcgggcatttaatcaattttaaatttatcgggataagttcattacatacagatctgctgtatgctaaccaattagatgaccttctccaaacgctccaattaaatcgagacatggaagataacggttttgtgtggccgtacaaattatctttgcattcaatgccttcatgggatagaggcagtttaaaagagcagagtggctttttacaggacattctcttcgtttcagaccactatgagcaaaacgatctgaaagaagccatttcccctctctatagccacaggcgagcgagaaaggcgcttcatccattagaagatgaaagtcagttaataaaagaagcggaagaacttttgctcacctacctcattgattcaaaaggagatggcgagtaatgaaacttaatggcatcgaaatctatggtttcggaaaatttgaaaacgatcgaatcgaagatatttcaactgaattgcaacttatatttggagagaacgaagcaggaaaatcaacgcttattgcgtttatcgaatacgtgttatttggctttcaggctcgtcaagaaaataactatagtatgaatcaactcccgcgttttggaggagtgctttttgttgaaaataatggagagacgtttcgaattgaaagaacgaaagatcgcacgtctgaacaggttgtaatctactattcgaacggctcatttggagatagagacgatttaaaggcactattaaagggaatgaatcgaacgagcttcagacaaattttcttttgtaatttgacaacgctaaatgactatcaaaactatgatgaagagggttggaatcaagtattatatgaagccggtatgagcggcggggcttcgttacttgccattgaaaagaactttgaaaagtggcaaggtgaaatttttaagccaggtgggagaaaaccacaacttaatgaaaaactggaaagctatgagtctttaaagaaaaagacgaccgaatgggaaaagaaaaacgagagctataaccatttgatagagaaggtcgagaagttagaaacacaagtgaagggcaatgcagaaaggttgcaattacttcaatctgagcagcgaacgcttgattatgagaaacagattttccctcttctaaaacagaaacagaagcttcttcatttgttggatactctacctgagttcgatccttttccagaggaaggacttgggaggttcgataaatggaaggaacagtcggttcttttatctggggaattagagagtttaaagaaaagaaagcagggtctacaagcagaaatcaatcctaatcatcttcttcctaatgcgaaaacgttcttacaagaagtttcctctttgaatgaaggaatgattctttatcgagaaagaacagaagaacgaagaagacgtaagcaagaacttttatcacttgagaaaacacttgaatcagagttgcaggaattaggagaaactgaagaaaaagtaaaatctgtgaagacgtcgttttctgggcgtgaaagtttaaaacaaatcacggaagcctaccagcaatcaaatcagaaataccaatacgttaatgagggattcctcacagctaaagaagatcttgagaaagaagaaaatgagtataaacgcataaaagaacgcattgcttctgagaaaaagcataaaaagggagagagagaaagcttttcaacccaaaagtggccatttgagatgatggcagtcgccatcatacttctgattgtgataggtttagctgaaaattggctacttggtttcgtggcggcggctattgttatcggtggagcaatccttatgacttacacaaccaaggcctctaaaggcggcttgcaagatgaggcactgatccgtgagagagagtggactcgacaagctgaacaaataaaagatcaagttgatcgccttaaccgcgcatacttgaaggctgcagaaaaagtggatctttgggaagcggagaggtatcaacttgataaagatttggaggagtggcgcgtacgtcattcgtttccaaaaaatttaccgtctacatcattgctagacgcatttgacagggtagtttcaatccagaagctgcagacggaccgccatcaaaagcagaagcagatagaggagcttgactctcatttagccttgctcgaagatagaatgaagcgtttatgtgacaaagtgaatttacactatcaaacgcctgaaaatgcaattcaacgcgtgctccaaaaagcggaagagcaaagagaaagtttgaaaagtgttgacatggcgaaaagtaaattaaaatctcttgaggagcagtacgatgaggtttatgcaaaattaaaaagctgtaatgaggaaataaagggtctaatgctgttagcagagacagaaggcgaagaggcctatcgaacaaaaggaaaagctcatcaagaagcaaaagagctgaaccgccagcttactactctttcatctcagctcggtgagaatgtctctgtaaggtttgcaaccgtggaagaattagaggatcaacgtcaacaagtagagatggaagaagcgtctattctggaaaagcagcagacgctttacaagcagatagctagtgagcaagaaaaaattcgtcttttaacagaagatggcacgtatgatgagctgcttttgcaacgtcagcaaaaggaggacgagattaacgcttttggtcgaagatgggccgtcatgaaagtagcatctgaccttctatctaaagcaaaagcaagatatcaagaagaacgcctgccggcagtgatgaagaaagcggaagaatactttaagaccattacagattatcgttacaccgctatttatccacctctagaaggtgaaccttttcgagttgttcataagagcggacgagcgtacaagccatctgaattaagtaggggaacagctgagcaattatatttatgtataagactcgcacttgcttctatatctacagtagaaatgccgatttttcttgatgacatctttgtgaattttgatgaaaaacggacgaatcttgcgaaagcatttattaagaagttttctaaagaacatcaagtgattttattaacatgccatacagctacaacagttgggataaatgacaagatgcatgtacttaaacgttcatctgataggataaataaaaaagaccatttaatgaggtgatcttatggaagaagtttataaaatacacttagttgaagatgaagagaatctagtccaaatattaaaaacgtatatggaaaaggaaggatttgtagttaaaacttttttgagtggtgaagaagcgctcgaaagcattcacgaatcctgtcatctttggatattggatatcatgcttcctggaattgatggatatgaactgttaaagaaaattaaggcagaggacgatgtgccggttatcttcatctcagcgagggatgaagatcttgatcgcatcgttggtcttgagttaggaagtgatgattatattgcaaagccattcatgccgagagaactaatcattcgcgccaaaaagctattaaagcgagtgtatcagcaatcatcccaaaaacgatttgaaattgtagaatatgaaattgaccctgtttcaagaaaagtacttgatcgaggggagcctgttgaattaacgacgaaagaaatggatttaattctttacttagttgatcatgtgaatcaaacattgtctagagaacaaattcttgttcacgtttggggagacgattatgttgggtcagatcgcgccgttgatgatgtgattagacgtgtacgaaaaaaaatgccccgaatgaatcttgagacgtcttatggacttggttaccggttaatcacatgattcgcctgaacttaacgaagcggatttggctctcgtttatgattctagtactgcttgtgggcgtcgtgattgcggtcatctatcctctttctattaaaggaacgttaacagaagaaacgtaccagattattgagagtgagcagcaacgatatacgtttccagatcaggatggtccacttccacctcaaacagatcaagattttatcgaacggagagacgctgagcggtcagttggacatacattgattacaaggctatatagtggcccattacaaggagacccaattccagatgaagttattattgaaatgcgtaaaaatgctctggatcagaagaaagataaagggcgttatgaactcacgtataataaccaggcatcactgttttatgtaatatccaaagttgatgtgaatggacaagaagcgtactttatttcttatatgtgggatacgtatcgcaatcaaatgattgaccgcctttggtggaggttaattatcattttactctttgctttgtttcttagtctttttcctgcagcgtggattgcgcaatatttgcgaagacctttaaccgtgcttggggaacgttttgagcaaatcgcaaaccgcaattggaaggagccgttcaaatgggaaggtgatgaggagtttcagaaactctccaatcaatttgaatcaatgagacagaacttaatgagatatgataaagcgcagaaaacatttatccaacatgcatctcatgagttgaaaacgccgattatgatcattaaaagctatgcgcagtctattaaagatggcgtcatgcctgattcactcgataatacgatgacggtcattttaaatgagtccgatcgcatggagcagcgtgtaaaagggatgctgacgtatattaagctggattcaatcgatgagcctgaaggaaattgggaaacatttcgctttggggtacttgctgaagaacttcgtgaacgatttatgtatcagagggaagatgtaacgttttcgatatcaggagaacagattgaattgacggcgatacatgaacaaatgttaacggctatggacaaccttgttcaaaacgcgttgcgctatgctaaaagtgagattcacttaaaggctcgtgaggatgaaggacgcattatattagaagtctataatgatggtgaacaactatcatttcaaaaagtagaaaaagatagattgtttgaaccgtttcagaaaggtgataaaggccaatttggtatcggacttgcgatcgtaaaaaaaattgcggaacgtcataaaggaatagcagaagtaaccaatttggatcagggagttgttttttcgattataatgccgaagaaacaaagcgaaaggtctgagtaaggcgctatgctatactagataaatacattttgacccggaggtggaaagatgaaggaattcaagggaatcggacattaccgagtaggtgatcaagttgatcacttcctgctaattaaatcatcagtgaaaggcgtagcaagtaatggaaagccttttcttacattaattttacaggataaatcaggagatattgaggctaagctttgggacgcatcttctgacgatgaagagagttttgatgctcaacaaattattaaggcgaaaggtgatgtgacaagctatcgtggacgtaatcaactaaaaattaaagctattcgccttgcaacagatatggaccaggtgaaagtaagtgattttgttgaatcagctccacttgaagtgaatgaaattatggagaaaatcacgcagtatgtgtttgaaatgcgtaatccaaacattcagcgtattacgcgtcatcttgtgaaaaaacatcaaaatgactttcttacattcccggccgcaacaaaaaaccatcatgagtttgtgtcaggattatcttatcatgtcgtttccatgcttgatattgctaagtccctatctcagttatacccttctcttgatacagatttgctttatggcggaattatcctacatgatttaggaaaagtcgtagagctatcaggatcgattgcagcaagctatacgaatgaagggaagctacttggtcatatatcgatcatggtgaatgaaatcggtcaggcagcaaaggatctagaaattgaaggtgaagaagttatgcttcttcaacatctgatcttgagtcaccatggtaaagcggagtggggtagtccaaagcctccaatgattcgggaagcagagatcttgcatatgattgacaacattgatgcgaaaatgaatatgcttgatcgagctctaaataaagttgagccaggtgaatttacagatcgcgtctttgcgcttgataatcgttcattttataaacctaaggtgatccctattagtgaaaatgtaaaaaaataaagtaaggtaacagaagggaaatgcgttctttgagccatttctcttttttctgagaaaaaggaagaccgggggatggacatgaaaataaaggattgggatcggaatttaaagattagactatttggagagggcatgatgaacattcttttttggatgttcttccccttcatggcaatttatttttcggattcatttgggaaaggaatggcaggtctcttactagttttgtctcaggttgttgcagttatcgctaatttaattggtgggtattgtgcggatcaatatggaagaaagcaaatgatgtttctttctgctctagggcagggagtaacatttattgtgtttgcgtttgctaattctccatggcttagttccccaatgctaacgtttgtaagcttttctgttcttggcatcttcggctcattgtactggccggctagtcatgccatggttgcagatgttgtggaagaaaaagaccggaatacagtctttgctgtcttctatacggcactcaatatttcagttgtcgtcgggccaattctaggcggacttttcttctttcagcatcgatttggtttactattaattgctgctgccgtcagcttctctctggcagtattaatttacatctttattcgtgagacagctccagaaaagagacaaaatagtctcgttacagattcttctacgaaatggacaaagtttctttggactcagcttcaagactatcgagtgattgggaatgacaaagtttttctgttatttattttggctggcgtcctagttgctcagacatttatgcaacttgatttattaatcgcagtttatttaagcgaaaaagtgccagagcaagctgtgtttacgttcttagatactgcgatcagagcagatggtaatcagatatttagttggctcatatcagaaaatggcttacttgttgcgctgttaaccgtttatatgacaactaaaatgaatcaatttaaagagagaaatgtttttattgtttcttgtttgatctatgcgctaagtatgatcatatttggaaacgtcacttctatatggcttcttgctattgctatgtttatttttacaatgggagaacttatggttgttggaattcaagaaggatttgtttcacgtctagctccagagcatatgcgtgggcaatattttgcagctgcaagtcttcgttttacaatcggtagaacggtcgcaccagtagccataccacttacggccctaataggatttcaatggacgttttacttgataagttttcttgcagtgagtgctgctgtcatctattttgtgatgtttaacatgagtgagaaacagggagtcaaccattcataactcttcttactggtataattcattccttttgcacataaagtgtagtaattgaagaagcttgtacgaaagaaaggaagtgctttggatgaggaaaggcgttctcatacttctaggtttcttattcattttaagtttgtttcaacttacagagatatcggccactttatcaggcgtactctctcaatttccatggtggatttattttgtactagccggtattgtctacagtggttataagacaatgcaattaacagctgaagagagaaaagttgatcagattcatattgaagaagaaggtagagtgtacgtggagagaatggaggaagaacgcgaacgtaggaaacagcgaataccggaataggtacgataaaaaagacgaaagggctcagccctttcgtctttttatcattattcttctgattgagccttgtcagactcttcagtttcagtgttttctttcggctcctctgttttgaagagatcttcaaactgatcatcttttactttaatatcagattctttgattagctcatcaatgactgttggaacgtcttttgcattttgtagcatatactgttcttcaacttgatcttttgcatcttcaaatgacatgactgttttcttctttagcttaataatgtgatagccaaattgtgattgaacgatgtcacttacttcgccttcttttaatgcaaaggcagcttcttcaaactctgcaaccatgtcgccttgtttgaatacgccaagatcaccgccattttcagctgatccatcttttgaatattcttttgcaagttcagcaaaatctccgccgtcttctaatttcttttgcacttctttcgctgtttcttcatcgtcaactagaatgtggcttgcttctagttctgtgaagagattcttgttttcttcatagaactctttaagcttctcgtccgtcacctctacaccgtcggtcgccgctttttgagcaagaagttgctttcgtacatcaactttaaactgctcaatgtcctggtatccatttgattgaagggcttgttcaagttgctcatctgtttcaaaattttctttaatcttatcgagttctttctcaacttctttatcagaaacatcgtatttatcttctagaattttcgtttggacaagatcgcttagtaccgattcaccagcttgatcttttaatgcttgataaaattcttcctgtgtaacatttccagcgcttgtttcaacgacggcttctgaattatctcctgaatcattgctgcaagcggatatcgcaagtaaagcgattaaagcagaaagcataatgaacatttttttcatcaagtatacactcctaaagggttagttaaatttaacaatattgtgatacagttaatactatagcatagaaagatatgtgaagttaaattgaattggaaatatgagaaaaattacacaaaacagccaggttctgtgtgaaattggtataattaaattcagggaaacctcttctttttttttgaacggcaatagtcgagcagacgaagcaggcgaaacaaaaaagatgaggctcatcgcctcatcttttttgagtatgcatgcagatacgttcgttgtatcctaagtgaataaaacttctacataggaagaaataagcaaaatcgtgataagaacgttaatggttctaaatacatttggctgtttttcttcaggaatattttttttcaagcatagagcatttgtcatagagttaaatgtaactagaatgaaagtcgcaaataggatgaagaataatccaataatggtcatgtaagaacctcccagagtccatttcgttaattcgaagaaatatataacggttttctttaacttatctttcaatccgtagtatcatggaaaatattcgtcccataaggagctgttcaaatgtttaaaaaccgatggaagacggcctttatcattctcttagctgctgtcgtcctcatttttgcaggagtagtaggattctatcaatactattttcctgaaagtgagattgccaaactctcaaatgagaaaaatacagaagaaccttttgaaacgacattttcgattcagatgaaaaaagatgaattgaatgaaatcattaatcaagaacttgaaaagtacagtgagaaacaaaagaatattggatatagtgtcaatctcgatgagctggcaacttttcaaggatacgtaacgatttttgatcggaaagtggacttttttcttaaattcgagcctcaggtacagccaaatggtgaccttttattaaaagaaaaatcttttcagattggtctgcttgaacttccaagtgataaagttctttcctttataaaaaagcaggcatcattgccgcctgaaataacaattgattctgatgaagggacaatttatatggctgtaagcgaattagaattgaagaatgatatgaagcttagggcgaaatcattcgaccttcctaatgatgaaattgttttcgatgcctactatcctattaattagcatgttgtcctaacattattatgaaggaagtcttatgagaattcaatactgctgactgcaagacaatagtaaaagaacagagcgctaagttttagcgctctgttcttttaggatttcttcttacttttttactgtaagttaagaagctcgtttaataaggatatggaaaccttcactgcggtcttctacatatgcattctttggtgcgcgaagcacttgagaggcatacagaaagtcgctaaagctaaaaccaaggttaatcgcagccagaattgagaaaaacgatacataggctggcaaataaactgatgcaacgatcgcagcagtcgtaatcgtaacggctggtgcaagagctgcaattaagaaaagatttcttgaaattggactgcacgtttcacagcgcatcatcggtagaaggacaaatcctttttctaatttcatcgttgcttttaagccggctaatgttaaaggaagccagtggatcaacttatgaataggaaaaaggacagccagggaaccgagaaacggtagtatcggtacaatcgcatgttttgttgtcggatataacatactgaagacgagataaaatgcaataaagtataatagtgttaacagcatcgagaaaatagttaatcgatgtgttccgaattcacgatttaggtaaatcgatttccaacaattcataagaatcacctgcttccgtaactttcatgtgggttcgtgttatagtgaatactcgtatactgtacagcgattctacgcagaaatcaacacgtttttttgtaaagaaataagtcgaaatctttttgacaaaatcagcgctttttcgcgctggattagtctggaaaatacatttcaatttataccctgttccggtaaactataagtacaattgatcgcaaagtaaggagttaagttaacatggaagccatccacaaaagattagatcgaattgagtttcatatgcgcttacttgctaagatggaagaggaaggagaatgcccattttatcgccttgtgattgacagaggactaaccgaggccgaggtatcagaagtgtttcaattatgtgtagaagtaaatcaaaaaatgcatgaacaaatcgaagaaggtctcctaaaccgttcaacgttgctcacgcattttgtaggtatgttaaatattaagttagatccgctaataacaattaaagcactacttgctcaggaagagacttaccgagaactaatggagacacttcttaaagtatcaccttatcgttaaaacgatttcaatcgttcttcgtcatcctggtttgtgaattcttttgagaattcactctcaagcttggtgaacgacttttgaaaaatttccataaagtcttccccgtaaagttcttttatcacacacatcatttctgtaaattcaggaaacttaccataaagatctcgaataggcatggaagcttttaagacactatcacgatttggagagtaatgtttccatgtttcctgcaacaatttctcacccttttcagtaagctgtacatatgtattgcgcttatcattctctttttttgaaaaagtgagaagagatcgagattctaacttttttgaaaaattaaaagcggttgaaacatgcatcacaccaaatttggcaatatcagaaatagaagaaccgtcaaggtggtaagcaatggaaaggatatgatgttcattaatgttaagatcaaaaggctttagccactcttgccaatcacgttcaacggatttccagagtgctttactcaattggcctattcgatgactgaaaatcatcgcttcttgaatcgaaatttcctgttcttccttcataaaggccctccttttcttctcggtctttcaagctatattagaatattgttgatcgtctgtaaaaaaaccggctatttcgaagccggactgtttacttcatctttaactgtctcaattgttttttgcatttcttctacatcttcttttaacctagttaaattaggttgaatgtcctgttgataagaagaaatagagcgcttcaaatcagcagctacttcttggattacttcttttccttcagaagacaactgtttaacttgagtactaagctcgttcaaatcgcttttaagctttgcaaatccttcttttatgtcatcgctcttaacttttgtttcagcgattagttctttgcctgatttaggtgttgttaaaagtacagaagcggctgaaaccacccctccaaatataaatcctgttagtaatgttttcgctttccccatgatgatcatcctttcctatccaaatccttatatggccacttaaacacattagttcgccgtcctcttcaaaaatcctgcttattttgttcattattctattaggttatgaaaacagcttttattacatatacctttaactatacgctaaggtaatgggaggggacgggtgtggctggatttatcttttttctcatagcagctggtagtttattattaaccgctatggttagtcgattgttacttattagaaaatattcttttcataatgaacaaatgattcgaaaacaaaaaggtgcttacttgtttggaacttgtgctgttgtttttctagttcttggcattttgatggctatgcttgttttctagcacgcttccttattttccccagccgtttcgagtcgcaaacataaaaaaatcacataggtggttagaaacacgctcttttgaggtatcttatagagagaagggtagcaaaggagtgtgaaaagaatgaatagaatggtgaaaagtgtttttaaacgaatgacaaaaaaagcagtctccgtaatgaaaaataaagaccagatgcaagaagtgtcaatcgaatctctaaaaaagggagctctttataagggtcgtaaaggaatggacgatatgtgggttgatgtgaaaacattctcacgactcgttcaagaagttaaaaaaggtcgttatcgcgatatctccaaaaaatctgtcgtcatgattgtaggagcacttctttatttcgttagtccgattgatgcagtgccagatttattagctggtatcggcttactagacgatgtagctgttattggatttgtagcagggcaattaaagagtgaactagaaaagtttcgtgagtgggaaactggggtgagaatataaaaaaatccggccagtttggccggatttttttgcatttaaaaagcaaaactagtgcgtttaagaatcgattgaacaactggaaagattagtaccattgcaatggtgttcactgcagcagttggaagaacgactgttagaaacaatcctgtaaatgcagcgccaccaggtagtcctgtgaaaacaagcgcagctccaaggaaaatagcaccgctaatcattgttccgatcgctgttaggatcccaatagttattagcgactgtccaaaacgctgaacaagaagataaagtccaaagaatgcaaatgctgtaacgggcttatcgatgatgtttgcaagctgtccaccaggaaaggtagttgttgcagcagaaataacgccagttgcaagaccaagtactagaacgcttttacgctcagggaatagcaagattcctaggaacatcattgttagaagcatatcgtttttcattcctgaaattaaccctggaataatagcgtgaagaatcgttccaataccaagcagtaaagccatcagtactaagtttttcgttttcataaaaaatctctcctcttctcaactcattctccatcatttgatggtattctctccaacagtgccctatgtgcctgctgcgaaagaactaattttttatatcataacaaacgaacgtcctattgaaaagtgttaaatattgtgtttgtgatggaacgtatgcataaaatcgctcaaggcttgaacggaattaagcgggacagcgttatagatggatgctcggcatcctccgaccgaacggtggccctttagacctacaaacccttcttcttccgcttctttaagaaacagatcttcaagctctttactaggaagagtaaaggttacgttcatagaggaacgactgtctgcctcggctgttccactataaaaacctttactgccatcaatggtggtatatagtaattttgttttctcggcgttcattttctctatttcttttaaaccaccctttttcttcgtccattctagaacgagagatagcatatagatagcgaaggatggaggggtgttataaagagattttttatcaacatgagtacggtaatctaacatggtagggagattatctggaatttcactcagtagatcctttttcaaaatgacaactgtaacgccagctggtcctagatttttctgggcaccagcataaataagtccgaattggtcaatcggaagagaacggctcaagatatcactcgacatatccgcaataaacgtggactctttacgctgaggaaagctcttccactgcgtcccgtggattgtattatttgatgtcaggtgaacataggcatcattctccccatattttagcgcgtttaaatcgggtatacgtttgaaatcagcctctttactactgcccccaatgtacgtttccccgactttttgggcttctgttaaggccttttgagaccagcttccagtgagcaagtagtttgccatataaccttgatgaagaaaattcattggaatcattgagaactgcaggctcgctccgccttgaagaaaaagaacttcataatcatctggaatctcaagtaattctctaaggagttcattagctccatcatgaattctctgatattctttactacgatgactaaactccataattgacatgccctgctgctgataattaagaagctctgattgagcatgactaagcacatcttgcggtaaagcagacggaccagcattaaaattataacgacgctccacgattcgacactcctttagcaatgtaatgcgatgcttcaattaaacttgtactcatcctatcattaaaagaatcagcgtagctatgtttttttctaatcttttcgaatatttcgttcgattgaagcagaagcatttgctctctgctcttgttttgctattctatatagaagtgaatgttaagaaagtggtgttatgcaatgtatcgagaaaacaaaccaactcatatcggaccatacgatcatccagatatttaccctgggccacgaccagcttcgtcgtttttgtaccataatggaaaagcacatcggattgatgaaagtgagcacgtacccgttgaaaaacaaatcgttcattatgctagaggagaggatgtttcaggatcgttagctttttctagttcagaacaatttacggtagaggagcttctattatcagaaggtttatctccaatagaagagcgaataccgctcctagcgtatggatcaaatgtttgtctcgctcaacttcggtataaatttagtcttaaccctgatttaagtgattttattctatattatcgagcagaattaaaggatactgacgtagtggcggggtcatttcttgcgccttatggcgcgctccctgctgttattgcacctgttcctggagcaaagacagaagtatgggtaacgtttgttgatcgtgaacagctcgagcttttaaacaggactgaagggggatatgtactacgagaacatctccatggaaagttaacgcttaaaacaggcgaacattttgagcgtgtgtatgcctattattatccacatgcttttttgagagaaggctcttatgtccgatttaaagatatcccgggggaatctgaattgccttctatgtggcaagctgatttattaaacgaattgaaagcgatgcttggttacggaggccatcgtgaagagtttatacatgaattaaggtggaatcctgatttacgtacgaaattatctacaatgttgaatggaatggatcatacatttgaacatcctgattggggaataccaaatggtttttatacgttaaatgaaatgactcgttcccaacttaaaaagagaccgtagcggtctctttttaagtggtgagaaggatttactgagatagctgtgaacgaatcccttcagctaggcgctgcaacttctctgcatcgtactcatcttcatgtgtcttccaaacagctccaaatccgtctcccattccgtagcgaggaatcaggtgaagatggtaatggaagacagattgtcctgcaatggcttcattgttattaagaatattcatcccttcaggtgtaaagttggcttttagagcatttgcgatctcaggaactgcttcaaagagcttcgacgccgtttcaggctcaagttcgtagatgttttgtttatgctttttggggataacgagggtgtgtccttctgttacttgggtaaggtcaagaaaagctaacacatcatcattttcgtaaactttggcagaagggatatccccattaataattttgcagaagatacaatctggtgaatgactcatgagtatcatcctttcaatctttttattcatcgtaccataattttcttatttgatgcgattgactctaactaaaaaaggctctgccgggggtgcagagccctgagtgtaacttgattaagggaagacgccacactctttaaaaggatgctcctaaaagaagaattctattcaacgcacttgtttttcggactcttctagcatctctcctatgaaaaaggtaagatgtggatagtgaaaagaaaagaatgacttcggtctatcactccctaaataaaagtttgttaaaataaaagcaaatgatgaaatgagaggaacgctatgaacaattcaattttagaagtcagtcatcttactggtgggtatcaggcaaataagcctgtccttcatgatgtgtctctacgtgtgaattcaaatgaaattgtagggttaatcggacttaacggtgctggaaaaagcaccacaattaaacatattctcggattgcttgatccaatgaatggcgagattaaagtgggagggacgacttttgctgataataaagacgggtatcgcaaacaattttcctacatacccgaaacgcctctgttatatgatgagttaacgctttgggagcatttgcagttaacggctttggcttatgaacttggggaggagtggaaagaaagagctgaagcacttctgcaggaatttcgtatgacgaatatgaagaagtggtttccagggcatttttctaaaggaatgagacagaaggttatgattatgtgcgcctttcttgtgaagccatctctatatatcgtcgacgagccatttgtagggttagaccccatcggtattcaatcatttcttgatatgatgcttgaaatgaaagataaaggggcaggagtactaatgtccacccatattctatcaacggctgaaagatattgcgatcgttttattattttgcatgatggacaaattgttatggcaggaacaatgacagaattacgaaatcaaatcggtaatggcgctgcaacgcttgatgacatttatatcaaagcgaccaggagtggaaaatgatgcagctacagacattatggaaagaaagggcaggagccttctggaacattgcgatgcggtatttcaggctaattggaaacagtagctttttgttcactcttgttctggctctcatttttggagcgtattattacagtgaaattctaaaggtgctacctgaatcttttccaggtgtggcagttattaccgttgttgcggctattgtacttgttcgtacaccacttcgtttctttttatccgaagcagatcttgtctttatgctagctgctgaaaaccgattgcaaggttattttcgtaaatcgcttatgtatagctttgctcttcaagtattcacaacagtagtcgtgatgacgatccttgcgccactctatcagcatgaaatggctgctggaactggttattatgtttttgtgatttgtgttctgattgtattaaaaggtgtgaatgttctcatgaaatggatggagctgcatctgccagctcaccattcgactattgtttatatcctggcaagacttgctgtaacgatcatattcacatatttactgctaatacaggcgcaatggttctatgtcgctctagctgctgtactattcgtcgtcactttctttttgatgtttctccctctgcaacggaaatatgcgatcaaatgggagaagttgcttgcaatggatgaaaagcaaagtatgaaattctatcgtacggctaacttatttacagatgttcctaaattgaagcaatcagttaagcaaagacgattgttaagtagcctgggtgagaagctattaccatctgattctgtatatgctactctttatcaaaaagcttttattcggagtaacgagtattttggcatttattttagattgtggcttctaggtcttgcagtggttgcttttgtgcctggcttaattgggaaagtgattggtgctgctctgattatttatctgacagccactcagttacgcacgctttaccctcattatcaagctcatgtcatggtaaagctttatccagtatcagatcatgaacaaggaaaagcgtttcgccttatgttacttcgtttattgggtgtacaagcagtaacatttgcagctctttcttttcttctatctcttgatgtgatcgtatttctatctgtgcttttagcagggattgcagccgttgctgttgcaacatctcgcgctgcagtagttagaaggtcggtctcttaaaacgttaggaatgaacaagcaaagggtgttagttgcatggaatatcgaagcgaaatatcggaagaacttgaggcgtgggagcgaaaaattacgaggaaatcttctatggtttcacgatcagccaaaagaatacaaaatcgaatcaatggtgttataccagagcgtcttcattcaattgtgacaaatagtataaagacgatggtgcaaggggtactcgttggaagtacgtatacggtacatccaccaaaaaaaaatctatcacttcaaatgagagatcaacaggcgaaagaattgatacgtaaatacaaacgaattgctgctactgaaggtgctggtacaggagcgggaggaattctattaggattagctgatttcccgttgcttttatcgattaaaatgaaactcctttttgacctcgctagcacttatggatatgatgctaaaaaaatagaagaaagggtttttattctaactatttttcagcttgctttttcatctgatgatactagaagaaaaagttatcggaagatttctagttgggatgagagccttagccaaatagaagttcggaaaaagtacgaggagcatgattggaaaacttttcagcttgagtatcgagattatattgatctccctaaattacttcaaatggtacccggcgtaggggcaattgtgggagcttacgtgaactatcactttcttgattggctaggtgaaaatgcaattaatgcttatcggacacggatgatcaaagaagaaaatcaaacaacataaagaaaagagccagctggagttatccatgctggctctttttctgtctgtaaccttattgatgataggtaaggattttgtttattcgaaccgtgcgtcgctaagaatgcgatccatttcttccatgtgatgtgtttcgtccgcaatcatatcgtctagttttacaacaagttcagtaaaaccaagttcttcagcttgttttttacgcttttcataacgatcaatggtatccttctcagctgtacgagcttcaataagcatctcttttacatcggtaagctgttttacttcagctggcgcagtagtaggggtaccgcctaatactttaatcttttctgcaaggtaaagagcgtggccctgttcatctgcgatttcactttcaaagaatggtttcaatgtttggcgatataagccagatactactgccgcattataagtatacataatacttgcagcgtattcgttagcaaggtctacatttagtccatcgattagttcttgttttttgtctgccattttgaacatcctttctaaatcttttctgttttggttccatattaattttacccttacattggcacgataaaacataaactcaagaatatttagggagaatagaattgatgtttgatggatgttaggaggggtaatagttattgtatcaatgacactatttcatttatctaggagggtttatcttgagtaagattgccgtattaatgacagatatgtttgaggatgtagaatatacaaaacccgcagagcagtttaacaatgccggtcattcattaactgttattagctcgaaagcaggtcaagaattaactggaaaacaaggggaagcaaaagttacagcggataagggaattgatgatgtaaaacctgaagagtttgatgttctgtttattcctggaggcgtttctccagatgaactacgggcagacgatcgatttgtggtgtttacgaagaaaatgatgtttttaaataaaaaaacgctcgttatttgtcacggaccacagctgctcatttcagcagaagttttaaacggaagaaacattactgggttcaagtccattcaaacggatttaaaatatgctggagcgaacgtatttgatgaagaagttgtcgtctgtggaggcaatctcgtgagcagtagaaaccctgacgatattccagcgtttatcgaaaaatcgttatcagtgatggatcgctgattggaggagtggaaaaaatgactgagaaaaatcatttagttaataaagaaagtgagcttaacgtaaataaagttgatgatacgttagatcgaatgagtgacgagcggatggacgatatcctctctaatttcgaacagtttaaatcttatcttgctacaagagtggagcttggagaaaaactaggacttagtgaagagagattggctcaggcagcagaaaaggtagcgggttacttagccgcgaaggaagagcccaaaaatagagaagagaaacttcttcaggaactttggctcgtcggcaataaagaacagcgtcacgaattagctcatcttctcgttcgaatggtattgaataaagaaaactaagaaaaagccgctgctggttcagcggcttttttaaaagtctaaataagaaaggcgtaaaaatatgaacaaaaatgagttttttagtatgttttctggagcattaaaacaaaaaaagatttggttacctcttctcttaaatgcatttggcctattagttgctatattagcaattatgttattttcagagttagcggaagaaatacttgaaaaagaaacgcttcaatttgatcaatcgatcatatcggcaatcgaccctatcaggtctgatggattgttgaacgtgattgaaatcattacggagttaggatcagtctggtggatcaccgtcgtttcaatcctaacagtagccattctgtggtttaagaaacgtgatggttggagtattgtcttttttatcattgcccaggcagctggcggtctcttaacgaaagtgttaaaacatttctttgcacgatcaagaccttctgtggatgctgcttatgatgcggttgggtatagttttccgagcggtcacgcaatgggatcttttttactatatggatttatcggatatttaattgtaagaagccagagaggaaggacaacaaaatggataagtggcttgcttgtactgctatttattctaatgatcggatttagtcgaatctatttaggggttcattatccaagtgatgtactagcaggctatgcagccggtaccctctggctatctgtttgtatcttctcattggagtgggttctttggatgaaacgttcttctttcagtttaggatcagttcggaaagttttttccagtaagaacagttaagtattttggtagaacttcgagtgtcgacggagtcgtataataacgttctccgtcgcagtcgattgtctgttctggactggctgtgatacttaagttctttgtttgaaaatgaagaatatcttcgttaaaccgagattgtttgaacactttggattgaaaaattgaccagaaagttgggagtgacgtctctttaatgattaatacatcgaattctccatctttcaggttgttttcagggaagaaagcttgaatgccccctgtaaaaggaccattccccacaatcatcatcaccgcttctccttcaaaattcgtttcatcagcttctactttaaggtgaaaaggttctggattattaatggtttgtgctgtactaatgtaataggaaagccttccaaaaacctcttttgtatcaggattaatgttctctgatgtttgcgtgattaatccaatcccccagaaattcaagaaatattcgtcattagaacgcccaacatcaataagggaacggttatcttctaaaagttgatcgacagcttgcatcggattttgattgatcccgatcgctcgagagaagtcattacaagttccaccaggaatcacaccgaaaataggacggttctcccgcttacaaattgcatttgctagttcatagatggtaccatctccaccagcaccgataagaatgtcgacatcatccgccaattcctctactaattcagcaccgtgcccttcatgttctgtcttgtgaagagaaacgtgttcatatttttcttgaagtcgttcttgtatcagttcaatttgattgaccattttaacatttcctgctttaggatttaagataatggctacacgtgtcaatgttatggctcctttcgcataatctctctttcttattcccttatcaatcatgatctacactcgtacaggaagattaatcttttgaattcaaacgatgttgatagctaagaaaacacttattttcattcgtttaattgagatttaaaaagcagcatgtcaatttgacatgctgctttttattactctgcttcttctcgaggtagtcgttcttcatttatttcttctttaaaagcgtaagtaaacgttaatgctacgagtacgccgccaccgattaaattccctatactcgctggaacgaggttaaagaaaaggaattcaatccaggagtattccgatccatggataaatgaggtactgaaataacccatattcgctacactgtgctggaaatttccagcgacgaaaataatgataggaagtgtggttgcgagtactttaccagttaaatcacgagcggcagtagcgagaaatgcagccattccaattaaccagtttgcgatgatccctgagagcaagatttggaaccagcctaacgttccttcagataagaatttcattttatgttcggtatacgttgttaattctgaataaaattcaggtgttaatgatccggaagccacaacaagagtcccgactagtaaagcacctatcaagttaccgaagtagcaaacgacccagaactttaatatatttttcggaatccaaaacttcctttgaagaatgtaggtgggaaggaggacgtttacttctgtaaacagaatagctcctgagataaaaacgatggcataacctgttacgaaaccgatgccagatagaagtttgctaactccttctgtttctactcccatcgcaataagaacagagaaaatagcgccaaatgttacgaatgccccagctaaaatagagagtataaactgtctattaagagggcgatcactatgagattctcccttagcaataaacgtttcgacgatttgtgcagggaaataaaactgtctttcaggatatttaacttctttgtgttttttacttggatttgccacaaaaacgctcctatcttttctcttttacaacaagtaccctttttatgagggaatataaaccaacagatttgtgacaggcgaatttgttgaaaacttttattgtttgtccgttattcagatttcctgggaaatgatctcggattatgtcaaaataagcgagatggaataccacctcgccttgattaaaaattccagtatccagtttttccataatgggtatgaagatcttcttcaaatcgacgtgtaatcggttcgtttaatcgatattctggagcttgatgaatctcttcttttgtaacatctacaataaccgtgcggtcctgccaattgatatcatggatccatttggttgagagtagaacttctttacctgaaaaccagttttttgtatcaacgataaaataacgaagctgccatgtttcttcatcaaagataaaatctttgacatgaccaatctcaccatccgtagcctggatgtgatagccggctacttctttcgtgctacgtaggtggttttcttcgtcttcattggaattgcgtaatgatgaatttgcatcaggtaaatcatctgccataaatggtcttgggtacatgccgtttccccatgcaccagtacctacccaataataaggccagctaaaatggcggtttacgtccatttcatgttttcgtgaaatgggttggtttgtatcgatatcaggactttcgcttacttcttgagaggtaagtgaaacggagaatgattcagtctcatggttcgtatgttcgatagaaatcggagaaataagtaccttacgacctggtaaccatttatgagtgtcaatgacgagatagcggatcgtccaatgttcatcatcgaaataaagttcctttaagatacctttttctccatcttttgtattgattgcatatttatagacttcattttcgcttactagcatatggctcactcctttaccataaatccattttaattaagcgttaccctgatccatttgcgatcaaactgattctggtttttctatttgataggttttcagataaggtttccccgagaaaatcgtcttaggaagacctttacttgtatgacggtttttatgagctgtttcataagcttcagatgtttgccagttcttgaacgatgcctcactatcccagaatgttgctactatataagtgtcattagccactggacgtaagatccggattccctcacagcccggttcattctcaaccttaccagctcggtttttaaaacgatcttcaaatacagcgcgttcactctcttcgacagggatatgatttaataccacaaatccagggttttgtacaactcctttactgtcgataacttcatatttttttgcgttcttgaaaaaagtggtgccatttgtttcgtgatacaatgcagcactatctggattagtgaagaggaaaacattctcatcctcgtgttcttcttttattttcaatagataatcgtaagttccatatgtaacataactattcatcatacccatcctttcaattaagtgatcagggagatttgcctgatactttacccttatttggcaaaaactaaacagaatcgtcattgtctgtagtacaaaattcgcactatttcatgtaagcttagctgtaattaattgattaaagggagtgccatatagaatgaaaaaactcggcataggcttaatcgcaactctcgccgtgttcctaattggattattaggatacttagggatattattagcaggaaactatgttatagacgaaaaaaagcttgtaatgaattctgcaaccgaactcgtcgatgaagatggtgaacttattacaaaactttatttcgaaaaccgtgaacctatttcaatagataacatccctgatcatgttcaagaagcatttgttgcgacagaagatagtcgtttctatgatcatcatggtctggatgtgaaagcaataggaagagcactttatcgcgatattttagcggggggaaaagtggaaggaggtagtacaatcacacagcagctcgctaaaaatgtttttctaacgaatgataagtcatggcttaggaaaacaaaagaagccgttattgcgattaatcttgaacggagttatagcaaagaaaaaattttagaaatgtacttgaatcaaatatatttcggacatggcgcctatggtattcaatctgcttctacaatgttttttaataaacccgcttcagaattaagtgtagaggagggggctatgcttgcgggccttccgaaagcaccatccaactattcgcctattaatcatccagaggaaagtaaagatcgacgtgatcttgttttaactttgatggaaaagcatgattatttaacaccagaagaagcggttcgtcttcagggaaaaacgcttgctcttgatattgctgaggttacgaaagagccggcatatcttacgtatatcgatatgacacttcaagaagctaagacacgatataatttatcgaacgaagaggtgctgaggggtggttatcaaatcgttgtaccattaaatcctgcattgcagaaagccgcatatgaacagtttcaaaataaggctctttttccagggagcgaagcagataacccgccgcagggagggttttccatgatggatgcagcaagtggaggtgtagtggctgttcagggaggtcgtgaatacgttcagaaaggatttaatcacgttacagcaaaaagacaacctggctctgcactaaaaccattagcggtctatgctccagcgcttgagaaaaaagagtatagtccttacacgttacttaaagatgaaaagattgattacgatggttactcaccatccaactataataatcaatacgagggtcaactttcactttatgatgctgtaagggtgtcggcgaatgcccctgctgtttggcttctaaatgaaattggtattccatattccaaatcttatcttgagaaaagtgggctttcggtagaagatcgtgacctaaaaattgctctcggcgggattgataagggcgtatcaccatttgaaatgatggcagcttatcgaccgtttattgaagaggggaagcagattcagcctttttttattagtaaactatacaataatgatggcaagcttgtgggagaagccaatcagactgaagaaaaagtttattcaaagcaaacggcatggtatatgactaggattcttgagggcgttgtaaaaaatggtactgctactagtggaaagtcggaggtagccgttgctggtaaaacaggaacaacttcttatgaaggggtatcaggaggctctcgtgatgcttggtttgttggattcactcctgaatacgttggtgctgtttggatggggtacgatagaaccacagattcacactatttatctggtggaagtgaatatcctgttcaactgtttaaaaaagttgttaatgcctcttcgaatgaaaatagtcagaaggagtttaagaaaccttcaggtgtgaaagatatggagaaaccaatctcccttcctaatattaatgatgttaaagctgagtttgattttctatatggattaccagcagtcaaactaaagtggaccgcttcatcagataagcgtgttgtttatcacatttatgaaataaaagatggagagcgagagcaaatcgctgaagtagatggaagcggagagtatactagaaattcgatttctttctttggatctgtatcatatgaagttgtaccatttaacccgttaacagatcaagaaggtgaagtatctaatgaggcttcagttagtttatttgataggtttaaaaatagtgaataagagaaacagaaaacgagcgcaataaagaaaaacataaatgagtgaggaaattcacttttttgataaaggaattgtgttaaagtatacgatgtaaacggcttcaaagttggacgattttatgacttttttcatcaatatctgtacactgaagctaacgatcgctatagtatgtaaggatgtataaatgaacgttgtggaattagaaaggtggacaagcatgaataaagcaacatttaatgatcaatttcttcgggcatgccggggggaggaaacggaccatacacctgtatggtatatgagacaagccgggcgataccaagcagagtatagaaagatcagagagaaatattcgtttcatgagatgaatttgaatccagaagtagcagcggaagtaacgcgatttgctgttgaacagcttggggttgactcagccattctatttgcggatattatgacgcctcttccttctattggaatagatgttgaaattaaatcaggaattggtcctgttattgataatccgattaaaacaagatctgatattgatcgacttggcgaacttgatccattgaaagatattccgtatgtgatggagaccattaaaatgcttcgagagcagttatctgttccattaattggatttagtggggcgccgtttactgtagcgagctatatgattgaaggtgggccttctaagaattatcataaaacgaaggcatttatgtattcagatcctgagggatggtatcaactaatgaataagcttggagatatgacaattgcttatcttacagctcaagtacaagcaggagctcaggctgttcagctttttgattcatgggtaggtgcgctaaacgaagcagattatcgaacttatattgcgccagtgatgaatagaattttctcacgtcttaaagaattgaatgtgccgcttttaatgtttggggttggagctagtcaccttattcaggagtggaataagcttcctgtcgatgtgattggaattgattggagaatatcaattaagaaggcgagagaagtggaaggtattacaaagcctctaatgggaaatctagagccggctcttcttcttgctccatgggaagttattgaggaaagaacgaaagaaatccttgatcaaggtatggaaacacctggatttatttttaatcttggacacggtgtgtttccacaagttaaagtcgaaaccttgcaacgtcttactcactttgtacacgagtacacacgtaagaaatagttaaagaaacgggggaggtatgggatgaagcgaaccatcggcctactagttatggcctacggtacaccgcgaagtgaaacagaaattgaaccatactatacacatatacgtcgggggaaaagacctacagaggaaatgctgcaggatttaatcgaacgctatgaggccataggcggtatatctcccctatcagatatttctaaagaacaggctgagaaattagaagatcacatgaataaacagtttggcgatcaggtcacttttaaaagctatcttggtttaaaacatattgaaccttttgtagaagatgcggttcgcaatatgcaaaaagatggaatagaggaagcggttagtattgtactagctccccactattcgactgttagtgtgaaaacgtataatgaacgagctagaacagaagcaaacaagctaggttaccccgatatagtagcgattgatcaatggtacaacgaaccgaagttcattcaatactgggtcaaccagcttcaatcctatttaagtcaaataagtgagcaagagaaacagaaaacgattgttattttttctgctcatagcttaccagagagaatactaaaagaaggcgatccttacccagctcagcttgaggaaacagcaaaacatattgcaaagagagctggtattgatcactatgcggtaggctggcaaagcgaaggaaatacgccggacccctggattggaccggatattcaggatttaacacgggatttatttgaacaggaaggcttcacaggttttatctattgtcctgttggttttgtcgcagaccatcttgaagtattatatgataacgactatgagtgtcgacagatgactgatgaacttggggcggcttaccatcgtccagaaatgccaaacgcgacaaatgagtttattgagatcttagcaacagttgttacgaacgaattaattaaaaagaagatgataagtcatgaataaacaaacgaaaaaaattgtcattatcggaggcggaatcacgggtttaacagccgcctactatcttcaaaaagaaatgagaaatgctcaactcccttatgagataacgttacttgaaggcacggatcgtctcggtggaaagattcagacagatacaacaaatggctttgttattgaacgcggtcctgactcttttcttgcgagaaaagagagtgcggcacgtttggtaaaagaagttggcatgggcgatcagcttgtccccaattcgactgggcaagcttttgtattaaataacgatcagctctatccaataccgggtggagctgtgatgggaatcccaactgaactttcaccatttatatcgactaaattatttagcttaaaaggcaaatcgagagcagcaggagatttaattcttccaagagcggataatggagatgcagatcaatcgctaggattattcttcagaagacgacttggaaatgaagttgtagagaatttaattgaaccgttattgtcaggcatctatgcaggcgatatcgataaattaagcttgatgtctaccttcccgcaattctcagaagtggaaaagaagtaccgtagcttgatattaggtatgaaaaagacaacgccaccttctagaagaagtactggtaagaaaaagccggcatttttaacggttaaatcagggttacagtcctttgtaagaaccctcgaagaacagttaacagatgttcacattcgaaaaagtgttaaggtggatcaaatacagagaaaccaggactcatatacgcttctgacaacgagcggagaagaattaatggctgattcaatcatcattacaacgccgcatcagcaagtttttcacatgttgagagaacacgaagaagtcgctccattgcaagaaatgccttctacaacagtggctacagttgcaatggcctttccagaagaagcgatcaaaaaggcgatggacggtacagggttcgtcgtatctcgaaatgctgattacaccattacagcttgtacttggactcatcggaagtgggaacacgctgcaccaaaaggaaaagttcttcttcgttgttatgtgggaagagctgggaaagaagaaatcgtcgacaagagtgatgaagaaattgtacagacggttttaaacgacctaaatcaaattatggagattgaagggcatcctgagttttatcgtatcacaaggtggagacagtcgatgccgcaatatgaagtcggtcaccgtgaaagaatcgatcaggtaataaaaggcatccaacagaaaatgccgggtgtatttctggctggtgcatcttataatggagttggccttcctgactgtattgaccaaggcgaggaagctgttacttctgtacaaaactatttgaaataagattaagggcacatccattagatgtgtccttaaatgtgtcgtattctaaattcttcgccgtctcaacctggaatgattatctaattttgttagtgtagaaagaggtctagtggtagaatgtaaatggcaacaattagtatcaaaggagaaataatcatgttagagatggcaagacctttacttgttaatattgcaatgctcttctcagtgttatttatctggaatatggtcatgccatttacgagagcaagctcaattaatttaaaagaaaaattaatatacggagcaatcagttcagtgatggcgttgctttgtatgcttttcccactggagaaattcggagatactgtatttgatttacgagttgttcctctcattctcgtcactctctatggaggtaagcttccggggataatttgtacgcttacgatttctactggccgattatggatgggcggcgagaatgcatgggtgggtgtattaatcgcggttattgggtttatcattgctagtggttttggcccttatttccgtaagtctattcgaaagtggaaggggattctatttacaggtggagtttttatcctttcttatatcgtgattctgattctattcttagacccgttacaaccttatttctatcccatttattttgctgcatttatgattgcttattttattatcttttacttaacagagcggttagttatgattaaccttcagcttcaagaaacagtttatttagaaaagttgtctgtggcagggaaaatggcagcggcgattgcgcatgaaattcgaaatcctttaacaacgattaaaggacttctgcagtttatttcaagtgacactgaggatgttaaagtgaaaaattatgctccactcatgcttgaagaagttgaacgaaccaataaaattattacagactacttgatgctaattaaaccaactaaagataattatgaacaggttgatttgaacaaggttgtgaaagatacaacggctctaactgaagtacttgcctcttattataatgtgaaaattcattacgaagaaaaagatgaatttttaatatgggggaattctcaagaattaaaacaatgcttaatcaatttaattaaaaatgcgattgaatccatagaaggcgaaggccttattcttgttgttttgcaatatgggacaaaaaaaggtacggtagatatcgtgattcgtgacaatggggcagggatgagtgaacaagaacttgagaagatcggtttgccattttatacaacaaaatcgaaaggaactggactcggtacgatgattacaaatcgattaattcgtaatgttgggggtaaagttcactatacaagtgcccaggacgtgggaacaaccgtaaccgtcacattgccaattataaaacaataggaggagtaagatgacgttcgatcgaaggaaaagcataatggaggcagccgaaaaatcattctcaatgttcggttacaaagcgacaacgatggatcaagttgctaaaattgcgaatgtagggaagggaacaatctataatttctttaaaaataaagaggagctgttcaatgaaattgtacggggaatggtcattgaactgaaagaacttgctcaagattcaattcatagagaggatacgttttttgaaaatcttcatcgtgcgctttatagtgtattggaacaccggcgggagcataagttggcgataaagctctctcaagaagtacgcgagattggaacccctgcagctatggatgctttgaaccttgtagaaaaggcgatccttcattttcttgaacaagagattgaacgtggcatttcagatggcgaagtgaaaaaatgtgacccatctcttgcagcctttcttatgtttaaaatgtacatcgcgcttatttttgattgggaaaaaacgcatcattcctttagtaaagaagaaattgcaaatcaccttgaattttatatgatgagtggaattaagacggatgagcagtagtgaaactaaagtaagctactgctattgctattctaaataaagggtgatatattatctcttgtagcaaaaaatgactgaattgaaaaattggtcacatcaattgtactcaataataagtacagaacagtctttttttttgggatgaaatgaccatatgagataaatagtcaattaggcagggggataaaaatgaagaagtcatcaaaacaatttcgctctgaatgggcgtcattgcttaggaataaaaaaatcttaattccagtaattgctgtgttgtttataccggtattatatagtggcatgtttttatgggcgttctgggatccatacgaaaatttagatcagattccagtcgctgttgttaatagcgacagtggggcggattttgaaggagagcatcttgaaatagggaatgagcttgtcgataagttgaaagatgagcctgaattcaagtgggattttgttgatgaagaagaagcgaataaaggtcttgaagatcaaacctactatatgaaaatccatatcccagaagatttttctgagaaatcgacgaccgtgcttgatgaacatcctgataaattaaacttagaatatgtgccaaatgagagttttaactttttggctgggcaaataggcggaacggccgttagtgaaatcaaatcgcaaattgctgagaacatcactgagaattatagtgagcttgtttttgataagtttagcgaaatagctgatggcttatcggaagcatcagatggcgctggtgaactagctgatggatcatctgagctaaaagttggtacaaagcagttgaaagataacttagcatctctcaatgaagggtcaattgagttaacgaatggtattagtagtgcagaaaacggatccattgatctggcaaacggcattagcaaggtaaatcaaggtacaaccgatttattaaatggtttaaaagaaaaacaaccagaagttagtgagctagctgatggagcttcaagagtaagtaatgggcttggagaacttagtaataaaatgggtgaatttaaagttggacaagaagaacttctttctggtgttaaagaaagtcgcgctggaacgaagcagttaatggctggcttaaatcaatctgtttcagaattagaaaatagttcattaccagaagttgatacagaaggtttaaaacagtcactgacgagtggggtgacgaatgcaacggcagtttctcaagaactgcaaggtgtgatggagtcgattcaagcgagtgatcaatatacggatgagcaaaagcaggcgttaattggtcaacttcagccgattgctgaaaaatctggttcagctgcgaagtcagttggtgaagtagcaacgacatttgctaacgtttcagataaactttcaggtgtatcttctaaaatgaatgctttactagaaggacagagacaacttgctcaaggtgcgagtggtctttatcaaggacaaggaaaactagaagatggactcagtgatcttggtgatggcattaatcaagcagagtctggaattgctcagcttcaagatggcgcaacgcgggttgcagatggtaacaatactgtagcgactggctggaacaccatgattgataatgttggtacaattaactctggcatgaatggactatctagtggttcacaagagcttgtgagtgggctatcagaattagaaggtggttcgtctgatttatcatccggtgcaggtcaattggctgatggatctaaagaccttgacagcggagcgcaaaaattaacagatggtacaacagagcttcgtgataaactaggcgaagcggcagaggaaacttctaatactaatgctgatgatgagacttataatatgtttgctgatccagttaatgtagagacagaagctgtttcaggcgtaccaaactacggaaccggatttgcaccttactttctttcccttggtctgtttgtaggagcacttctaatgtccattgtgttcccgcttcgtgatccagcaggaacgccacgaactgcaatcggatggtttatgagtaaatacggtattttattagtggttggagtgattcaagcgcttgtctctgatgctgttctcttatatgcattgcagattgaagtacagagtgtaccattattcttactattctctatcgtatcaagtctagcttatatgacgttgattcagttctttgttacgacattaggagatccaggacgatttgtggcaatcattatcttgatcttacaattaactacgagtgccggaacgttcccacttgagttaattcctgaaggattacaagtgtttaatacgtggttgccaatgacgtatactgtttcagggttaaaagcagttatttctagcggtgattttgcttatatgtggcaaaatgtctatgtgctattagggtttattgcgatctttgctattggtacaatacttttcttctttgtagaattgaagaaacgcaagaaacaaggattggaaccagctttgaacgaataatgaatctaagaggctaacttgatcaattgattgagttagcctcttttcttttgataattgattggaataacgatacagtattagtaagaaagttgtgttattgtgcgataactagtttacgtttaggaaaggaacgggtaaacattataaagttatggatttattagggaggcaggagaagcgatagaatgattactttcgaacatgttaacaaaaaatttgctgatggtactgaagcattgaaagatattaatttacatattgaacaaggcgaattgttaacgcttataggcccgagcggttgtggtaaaacgacaacgatgaaaatgattaaccgattaatcgaaccgagcggaggtcagatttatattgatggaaaaccaatttcagatcaagaccccgttgaattaagaagaagcataggctatgtcattcagcaaattggtcttttgccacatatgacaattgcagaaaatattgcacttattcctaaattaaaaaagtgggataaaagcaaaatagataaacgagttgatgaaatgctgaaccttgtaggtcttgagccatcagtatttcggtcacgctatcctctagagttaagcggaggtcagcagcagcgggtcggtgtcattcgtgctcttgcagcagaaccccccattattttaatggatgagcctttcagtgcactggatccaattagtcgtgaacagctccaagatgagcttgtgaaattgcaaaaagaaatccaaaaaacgattgtttttgtaacgcatgatatggatgaagcgatgaagattgcagatcggattgcgatcatgaaagatggtgaaatccttcaacttgatacacctgatcggttgttacgtcacccgaaaaatgacttcgttcgtaattttataggggatgaacggatggcaaaaggacaagctccttcagctgttgatttaatgattcaaaaagtggccactgttaaagagagcagaggtctagcagaggcgtttcgactgatgaaatcagaacgtgtggatagtcttgtcgtaactggacctgaacaggaatataaaggcgtcgtaacgctagagcatgttcaaaagcattatgaaagtgatacaaaacgaattgtagatgtcattgaaaggattgagcctattcagagaaacacgctttatcctgaaatcgcaaaacgatttgctgaaaagcagccaattagtattccggtagtagaaggggaaaagctgacaggattagtgacgagaagtagcatgatgcgcggactagctggtcttgagcaactcggttttaaggaggaggaacctctgaatgaatgatgaaaacttttttactttatttatagaaacgatgcaaaaccgttgggatgatatttttgtagcgcttcaggaacaccttttcctatcatttatatcgattgtaatcgccatcttaatctctgttccacttggtatttttatttccagacgaaagaaattggctgagccgtttattgctgtcgcggctatttttcaaacggtgccaagtcttgcattgtttggttttctcattccgtttctaggaatcggaaatatcacagccatcatcgctctaacggtatatgccctccttccgattttaaggaatacatacacagggatcacgtccgtggatcaatcttccattgaagctggaagagggatggggatgacaaatatgcagattttaatgaaaattgaagtgcctctttcgctccctgtcattatggctggcgttcgaacggctacggtattaacgatcggggtagcgaccttagcgacatttgtcggtgcaggaggattaggtgatattatttatcgaggacttacgtcaaataaagatgagcttgttctagctggtgcactaccagcaaccattcttgctcttggatttgatttaattctgaagttattagaaaatgcagcaactcctaaaggagttaaagcaaaaaaataaagggagagatttgattgaagagattgactgtgctattgctaggcgttgtgatggttcttgctgcatgtgggggagacagcggaagtgaagaaagtgatccaatcgttatttccggtaagccgtggacagagcaatacattttaccgcatcttcttgcagagtacataaaggcgaatagtgattatgaagtagaagttgatgcaggtgttggagaagtgaatattcttcaacaggcgctagttgatggtgacattgatatgtatgttgaatatacgggtactggtcttgaagcggtattaaaagaaagtgctgaatcggatgaatccgctgatgaaatttttgaacgagtgaaaaaaggctataaagatgaatataaccttgtttggcttgagccacttggttttgaaaatggttatacccttgcaatgactcaggaaacgaacaaagaggtgaatgcagaaacattttcagacattattccggcgtctgacgatttagtatttggtggaccacatactttctatgaacgagcagatggttacgatgcgttagtagaagcttatggttttaattataaagatgaagtaagtcttgatcctaacattatgtatgatgcgctcaatgagggagaagtcgatgttatccctgcctttacaacagatggacgaattgctcggtttgatcttgcgacaacaaaagatgataagcaattcttcccaccatattatgctgcaccaattgttcgccaggaagttcttgattcccacccagaccttgagaaggttgtgaatgaatttgctggaagtatttcagaagaagaaatgtctgaaatgaatgcaaaagttgatatggacggagaagaacctgaagatgtagcggtagaattcttgaaagacaaaggattgatcgaataaaaaaagcgagatgaggaattcctcatctcgctttttcattgatgttattcagctggttttaaatcttcaatagaatcagcttcaacataagatggcacaacaagtcctgttttcgcaccttcaaggtttggtccaagacggtccatgttgtcaccatattcatctagaaggtcagcgtgtgtaattggaagccatccagctaccattgcatcagcatcaccttctgaaacagcgatgaacatagaagcagcatcaagttgagttaatttaacttcataacctacgctctcaagaactttcgctactacgtttgtactagcgatttcagaatcccatgcaacatatgcaagagaaatttcttcaccgtctacttcgtcagcacctttagtccattcttctaccatgtcagaatgttcgtctacccagttttgtgctgcttcttcaggcttagcaccttcttgaatttctaccattacgtcgcccatatcttctggcgcccagttgaactgatcaagaattttatgtgcagaaggttgatcttcttttaatcctttacgtgcaaatgtttcgatgttttcttcttcaccataaagtccttttggatcttcaaggtatttaaggtcatatttcgcgaacatccagtgtggtgtccagccagttacgataattggctcttcatcttcaatagctttcccaagttctgcggccatcgctgcagaagaagactcgattaattcccaacctttcaggctatcgtactcttcaagtgcagaagttgtagctttcataattccagcaccaggctcaattccaacaatttcataatctacttcttcgccaacgttagaaccgctttcgctagaaccttcgctgctgtctccgctattgtttccgccgcaagcagcaagaatcaatgtaagtgacaaaaatagtgctagtcctgttaacccttttttaaagttaaacatgtaattcccccttagttttttgatttacctatattttgagaaatccggtcgagcataatcgctagaataacgatggcaagaccagcttcaaaaccaataccaactttaatttgcgttactgcgcgataaacatctgccccaagtcctggtgcacctactagagatgcaataacaaccatagaaagggaaagcataatgctttggttaattcccgccataatggtaggtgttgcgagtggtagttgtactttaattaatttttgtttcgttgtggaaccaaacgcatttgacgcttcgattaaatcttcaggaacttgtcgaatacctagattcgttaaacgaatggtaggtggcattgcgaatataactgacgcgataatgccgggaaccatcccaattccgaagaataaaatggcaggtataagataaacgaatgcaggcattgtctgcatgaaatccaaaattggtgtgataatgcctcttacacggtcactttgtgaagcccatattccaagtggaacaccaagaatgatggatataataaccgaagttaacacgagagcgagtgtctcaattgttggctcccaataacctaaattatcgattagtagtagaccaagtaacgtaaagatggcaactggccatcgacttgaccaccaggctaggatcgtaaagatggcaattagcacaagcgctggcgggaagcctagaattgaaacaattccttcaacaaaccaatcgataccagatgtaatgccatcaaaaacgggttcaagattatctgtaagcatatcaacaaaactgtctacccaatcagctagcgggattttagggaatagttgcatttagctcacctcgcctttcgctgattccgtctcattgccggctagtgctccgatgaccgcgccgcgtacaatgatgcctttaaacttatcgttttcatcaataaccggaagtgggagagaagagcttgccattttcacaaacatatccgttaataatgtatcaggtgcgacagttggaaggtctgtaatgagaatatcagcaatttcttttttggcttcaatggcttttgcagcatcatccgccgtaattgcaccaattaatttctgcttcttatccacgatatataagctagaaagtttttgttcacgcataagttgaagggctacacgtggacctctatctgctcttagtgtttcagctcgcttcataacatgagaagctgttaatacttttgaaaggtcgacgtcttccacaaatcgttcaacgtagtcattggcaggattcgtcataatttcttctggtgtcccgatttgaacaatagaaccatctttcattaatgcaatacgatcaccaatccgtaaggcttcatcaaggtcatgtgtaataaaaacaattgttttctccatagactcttgaagttcaagaagttcatcctgcatatctttacgaatgagtggatcaagcgcactaaatgcttcgtccatcaaaagaacatcgggatcatttgcaagagcgcgtgcaagtccgactcgctgttgcatgccaccacttagttctgacggatagcttttttcatacccttttaatccaacaagttcgagtgactcctgcgctttggcggaacgtttctctttactaatgttttgtacctctagtccgtactctgtgttttctagtactgtcttatgagggaaaagtgcgaaacgttggaataccatactaagctttttgcgtctaacatcacgaagctgttcaggtttcatcctgacgatatcttcatcatcaatgagaacctgtcctgaagtaggttcaattaatcgattgagaagccgaacaagtgtagatttaccactacctgatagccccatgatgacaaagatttcaccgggatatacatcgaaactagcgcggttaacgccaaccgtatttccggtctcttttaaaatttcactttttgatttgccctgatcgagtagttttgtagcttgtttgggcgatttgccaaatattttggttacgtcttttactgtaattttggctttctccatagtttcacctctgcctttatttcaaatagttagcggataaaattacaaaaataactgaaatatgtcgaaatttacgataatcagtcatttactagtctttttttaccgacctattaagtatagggtttaggtacttcatactacaaatggcgtgagagctcaaaatcaggtaattcagtacatacagaaaaaactgtacaaactaaacgggtaaatccttaagtatcgtctaagatgctagtatatgctacaaggttcactagtaaactttacaattaacggggttaacactaaactatgaaatgacaaacgattggaaaagtaggtgcatagtttggaagataaacgagtagagaatgcaagagaacgagtgattgaatcaatctctaaaaatatggatatttatagcgtaaccccttctgtgggacgtttatatggcgcgatgttttttgaaaaagagccgatgacgcttgatgagatgaaagataagcttcaaatgagtaagacaagtatgtcgaccggagtaaggacattaatcgacttaaatatggtggataaggtgtggagaaagggggagcgtaaagatctttacgaagtgaagtcagattggtatcaaacctttacggatttcttttgtatccattggcgaaaaggaattgaaatgaatcgggatgcttgcaaagagtcaattgccgagctaatggaagtgttggatggcgatattacgaatgaagataagataacggctgaagcagacttagataagatgtcttacgctctaggatactacgagtggttgaacaaagtagtagatttatttgaatcacggaagatatttgacgtgatagataaggaagaatagctgagataattggaagcgtgttcttctgacagcgttcattaagacttgcgtaaaggtactgtgaacgattgtgatgttcacttcatccaaacaaaaacgtgcaggaatttcctgcacgtttttattataggattttacttaagaaagcctgagttcgctcgttttgaggattagaaaacaattcgttaggaacgttctcttccacgatatagccgccatccataaagataacgcggtcgcctacttctcgtgcaaaccccatttcatgagtaacaacgaccattgtcattccttcttttgcaagatctttcattacttctaacacttcgccgatcatttcaggatcaagggcggaagttggttcatcaaacagcatgacgctaggttccatcgcaagagctcttgcaatcgctacacgctgtttttgtcctcctgaaagttcgccagggtaattattggccttatcttcaagaccgaccttagcaagaagttcctttgctttctttgccgagttttgtttgttttccccttttactttaatgggggcaagtgttacattctcaagaactgttttatgtggaaagagattaaaatgttgaaaaaccattccgacgtcctgacgaactttattgatattcgttttaggatcagcaatattatgaccattaacgatgacgctaccgcccgttatttcctctaatttatttaaacagcgaagaaaagtgcttttacctgaaccagaaggaccaactacgcaaacaacctctttttctttcacatctgtattaatgttctttaatacttctaactctccgaacgatttcttaagatctttcacctggatgatgctcattgttgcaactgtctcctctcgttctactttcttccttcatgtagaaggagctttcgataaaaaccattatatcaatcctttgctcaattagaaaagaacttacccttaatgaatgagaaaacgtttcatttctagcagttgtactgtggctgatattcttctataatatttagtgaaaacgtttgcgcagaagtttgacggtacaaaggaggaaactgcatggctcaacagtggtggaaggaaagcgttgtttatcaaatttatcctaggagttttaatgacagcaacggggatggaatttgtgatattcgaggaattacagaaaaactcgattatttgaacgaattaggcattgatgtggtgtggttatcaccagtttataagtcgccgaatgatgacaatggttacgacattagtgactatcgaaatattatggatgagttcggaacgatggaagactgggaagagatgttagaaggaatgcatcagcgaggaatccgtctcgtgatggacctagtcgttaaccattcttctgatgaacatgcgtggtttactgaagcgagaaaatcaaaagataatccgtttcgtgattattatatttggcgagaaggtagggaagaccagcctccaaacaactgggggtcttttttcggaggttctgcgtgggagtatgatgaagagagtgaagaatattttctgcatctcttttcgaaaaaacaacctgaccttaattgggaaaacgaaaagctaagagatgaagtgtatgatctgatgaaattctggctcgataaaggggtcgatggattcagaatggatgttattaatttgatttccaaaacgcctggattaccaggtgccgaagtaacggatgatgctccttatcagtggggaggagattacttcgtaaatgggccgaaattcgtggaatacatgaacgaaatgaacgaaaaggttttatcaaaatacaatgcgatgacggttggcgaaatgccaatggccacgcctgaagatggtaaaaactacacgaatgaagatagtggtattgtgaatatgctgttccagtttgaacacatggatgtaacaagtggacctggaggtaaatgggaccaacagccctggaaactaacagatttaaaacggattatttcaaaatggcaaactgagcttcacggtactggatggaatagtttatatatggagaatcatgatcagcctcgttcagtttctgtatttggagatgatcaggaatatcgtgtagaatcagccaagatgctggctgcatggcttcattttctccaaggaacgccatatatttatcaaggacaagagctcgggatgacgaatgtctactttgatgatattaaggattacgaggacattgaaacgcttaatatgtataccgaagaagttgttgaaaaaggagcaaatccagaagaagtacttgacgctatccataaaaaaggccgtgataatgcacggacgcctatgcagtggactgatgaaagtaacgcgggatttacaggcactccatggttaaaagtgaatggaaattatcacgaaattaatgcgagaaaggcgttaagtgacgaagattctattttttacttttataaaaacttaattcgccttcgaaaagagcttcctgcacttatacatggaaattatcagctgcttttagaagaggatgagaatttatatgtgtacacaagaagttatcaggggacaacgttgtttattgctgctaacttctcgaaagaaacgtgtaaactgaatcttccagaaacgttaaaaggtggaaaactactcgtccataactatcacgatgtggcgaatcagttgctaattgagtcgaacatgcgcccttatgaagtgaaagtgtatatgctataagtttaagcgcgggcacagcctgcgctttctttcatttgggttttactttatctttttttaaaggattgaattctttatttcgagggaagataattttgagaaaaagaattttcttgaaaagtattcggtttcctttttctttttgtttcactcatgtataataacagatgtacatttgttcattagggattttactaaatttcaatataaaaaaggagtgtatacatatgacaacgactcaaatggattcacttgctgtaaatacgattcgtacactagcaatcgatgcagttgaaaaagcaaactcaggtcacccaggaatgccgatgggggctgcaccaatggcttacacgctgtggagtcagttcatgaatcacaatccatctaacccggattggtttaaccgcgaccgttttgttctttcagcaggacatggttcagctctactatatagcatgcttcacttgtttggatatgacgtaacaatggaagatttaaaatcattccgccagtggggaagcaatactccaggacacccagaatttggtgagactccaggagtagacgcaacaactggaccactaggccagggacttgcgatggcaactggtatggcaatggctgaacgtcatttagctgcaacgtataaccgagataactttaatgtcattgatcattatacgtacagcatttgtggtgatggtgacttgatggagggtgtttcttcagaatctgcctctctagctgcccacttaaagcttggccgtcttattgtgatgtatgattcaaatgacatttctcttgacggtgatcttgatcagtccttctcagaaaacgttcaacaacgttatgaagcctacggctggcaagtgattcgtgttgaagatggaaatgacatggatgctattgcggacgctcttaaacaagcgaaaagcaatacagagcaaccaacactaattgaagtgaaaacaacaattgggtatggttcaccaaacaaaggtggcaaaaatacttctcatggtgctccgcttggtaaagatgaaattcagctagtgaaagaaaactataagtggactttcgaagaagatttctatattcctgaagaagtgaaaggccaatttgcagatgttaaagaagctggaagcaagaaagaacaggaatggaatgaacttttcaaaaaatatgaagcggaatatcctgagcttgcgaagcaactaactgcagctctaaataacgaacttcctgaaggatgggatagcgaagttcctacttatgaaagaggaacaagcacagcatctcgtgctgcatctggagaagttcttaatgctcttgctaaaaataacccgcaaattttcggtggatcagcggaccttgcgtcttctaacaaaacaatgttaaaagatgagcaggacttctcaccagcagattatagcggccgtaatatttggttcggcgtacgtgaatttggaatggctgcagcaatgaacggaattgcccttcataaaggtcttcgtatctttggagcgacgttcttcgtattctctgactaccttcgtcctgcacttcgtctatcagcattgatgggtgtacctgtaacatacgtattcactcatgatagcgtagcagtaggagaagatggtccgactcacgaacctgttgagcaactcgcttcacttcgagcgatgccaggtctttcagttatccgcccagcggatggaaatgaaactgctgcagcatggaagttgtctgttgaagcaacggatcacccaacagctctagtgctttctcgtcaaaaccttccagttgtgacagattcacaggaacaagcttacgaaggcgttaaacgcggtgcgtatgtagttgctggtggcgagaatgcggaagccattcttcttgcgtctggatctgaagttggtttagcagtagaagcgcaagaacttctttctaaagaaggcatttcagcttctgttgtcagcatgccaagctgggatcgttttgaaaagcaatcagctgattataagcaaagcgttcttccagacaacgtaacggctcgtcttggtattgaaatgggcgtatcatttggctgggataagtatgttggccaaaagggtgatattcttgcgattgaccgctttggagcatctgcgcctggcgacactgttattaaggaatttggctttactgcagaaaatgttgtcaataaagttaaagcaatgctctccaaataagataatcgtatcttaagatgaagagcggaaggctttcagaaggcgaaaatggtctttctggaagcctttttcttaactaaagaccattaaatatttgaatacacaggtgttgctatggataaagataaactgacaaaggtagtcgaagctgcccgcttatactatcaattagactatagtcaacaggagatcgcaaaaaaattagcggtttcaagaccgactgtttctcgtttattaaagcaagcgaaagcagaaggcgttgttgaaattaaaattcatgatccatcacaagatgttcatatgctttcatcagaacttgctgattcgtttggactattagaaacgagagttgccattgttccccaatttgaggatgatcttgtcaaaaaacatatcggtaaaattgcagctgattatttaaatacagctatacaagacaatgatttgattggtgtttcatggggaaccactctgaatgagatcggtaagaatcttcgtcacaagttactgaaaaacgtttcagttgttcaattaaatggcggcattagttattcagaaacaaatacttatgcttatgaagtgattcaaatgcttgggcgtgcatttcacgctacgagccattttttgcctgttcctgccattgttgatcatcttcttgtaaagcaaacgatggaagaagataggcatattcgtcgtgttcttgacatgggtcggaatgcgaatattgccttatttagtgttggaattccaacaaatgactcggttattgtacaggcagattatgtatcaaaagaagagcttgaagtaattcatacgaaatctgttggtgaaatttgttcgagattttttgacgagaaagggaagctcattcataaggaattaaatgaacggacaattggaattgacctacaagagctttctgcaaaagaaaagtcgatattggcggctggtggtcctaagaaagttgaagcgatatatggggcgttagaaggtggctatgccaatgttcttataacggatcactttacggctcgcgctttattagagaagaaaaagcaggggagggataaacgatgaaaatgactgtattaggtccgtggggcggttaccctaaagctggagaagcgagtgcaggatatcttttcgagagtgaaagctataatttgttgattgattgtggaagtggtgtattggcacaacttcaatatcacctttctgtcgaagaactagatagtgtcatcattagtcactaccatccagatcatattgcggatgtaggggttctttatcacggtcgcttgattcaatccaaaacaaaatctgaattacctgtgctaccgatctatggtcattcacatgatgaagcaggctttagcagtttggatcataagccttataccgaagcgaggtcttacaccgaagaagatcgtttggagctcggcccgttttctattacttttcaaaaaacaaagcatccggttgtatgttttgctatgcgcataactgatgggaagcataccgcagtgtttacagcagattcaagctatataaaagagttcgaagtattttctgctggagctgacttactcatctcagaatgcaacctatatgcggatatggatggctctaaaatggggcacatgaatagtacggatgcagcaagaattgcaagcgcggcgaatgtttccactcttatgttaacgcatcttccgcattttggagagttatctgatcttgaaaaagatgcaaaacaacactttgatgggaaagttgtacttgcttctacaggattagtttgggattcagaagaagagttatagtaaaaagccagaagaaggagtccttcttctggctttttgaatgggatttcaagattgtcgaggttaaaaggcgcttccgcttttcgtagatttggctgtgactcgcagaaactgcgatatttcgctctttcaccagaacacaaaggacgtgttctagttcaagagctccaatatctccgtttctaaacgctcgtctccgcttttcgtagatccagctgcagtgggcaggtcctcgagtcgcttcagacgtacatccgaacacaaagaacgtgttcaaatgtacgtcttccagcgcttgtcgaggctaaacgggcacttccgcttttcgtgtctagctgcagcctccagaccctcggtcacttcaccttttcatccgaacacaaagtgcgtgttcaaatgaaaaggctccagtgcctgccgggtctaaatggaggcttccgcttttcgttattcccccagcgtcgcgtctagttttccgttcatgtccattaggaagccgatttctcggcctagtaggcgggctagttctttggattttttttcgccttcggatttgatttgttcgatggttaggctagagtttaggttggaagcccctacgatgacggggatttcacctttttcgtaatagacgattttcatattgctcctcctcaaagtgcgtttgcttacaatattcgtacggggacagctaggaaagggtagaggtgatgtgctttttcatactttggtcggggggacataagtatcaggttttgattcctttacaacaattcattagaatagagatagagaacatacaggaggtacaaggatgctttatatagataatgaaaacattatggatgctgggattaatctagcgattgaggaatacattttgaagaagcttgaccctgaggaaacgtatttgttgttctactcgatgaatccgacagtgattgtaggaaaaaaccagaatacgattgagcaaattgatacgagctacatacgtgagaatgatgtggacgtgattcgtcgtctttcgggtggaggcgcagtttataatgatccgggtaatctaagctttagcattattacgaaggatgacggcaatagttttcacaactataagaagttcaccgatccggtagtaaaggctcttagcaaacttggtgtcgatgcggagctcagcggacgaaacgatttgttagtgaatggaaagaaaatatcaggtaatgcccagttctcaacaaaggggagaatgtatagtcacggaacgctaatgtttaacgtgaacttagaaaatgtagtgaaagctctaaaagtaaataaagagaagattgaatcaaagggcattaaatcgattcgcagtcgcgttaccaatattagtgaacatatggatcaagagatgacgcgtgagcaatttaaacaaacgttacttcagtatattttcgaaggagaaaaggaaatcccctcttatgacttaaccgaaaaagattggaaagccatccatgaaattgcggaggaacgatataagaactgggattggaattacggtcgctctccaaaatttaacgttcagcattcaaagcgttttccgattgggtcaatagatgttcgtcttgaagtaaagaaggggtacatcgagcaggctacgatttttggagatttctttggcgttggggacgtgaaagagatagaaaaccaactaattggtgttcgctatgaacgtggatcgcttgaagaagctcttcaagaagtggacgtatctcattatttcgggaaaataacaaaaaaagaattcattgatcttctatactaaaagaaaggagctgggaatccagctccttcttcatttgatgcccatttctagttgctctaaataattcagaacgtgaccttttgagaaagtgaacgtttttgttgagaattaatttatgaacttttctttgttccccttgctagtaaaattttcttccaatataatatatttagaaaattaaaaatgaatgactactcattcatataggaggagagcgaatgaatctatctcagcaattaaaagagacagcggcgacttatcctgagaaacaagcctacatttaccaggatgaagctgtcttgtacaaagaacttgatcagaaggtttctgcttttgctacaaatttattagcagaaggaattaaaaaagacgatcatgtggctttaatattagggaactcaccagagtttttaattgcttactacggtgtcttaagagctggcgcagtcgttattccgattaatcctatttatactccagatgaaattggctaccttcttcataacggagatgtgaaggcaattgttacattggagcaagcactccctctagttgaaaaaatggccgatcagttaaccgatatcgttctcgttgcttatacaggtgaggggaaagaagagagaattattgtaaagacaaaattgaaaccgtttacaaaaatggtcgaggatcaaaacgaggtttttccaaatgttacgataaaccaagatgacttggctgttatcctgtatacatcgggaacaacaggaaaaccaaaaggtgcgatgctttcacataagaatttatttagtaatgcatcagatactggctcttacctccaaatctcttctaatgacgttgtggtcactgcccttcctatgtttcacgtgttttgcatgaccgtttcaatgaatgctcctcttatatctggagggacgttgttaatccttcctaagttcagtcctcaagaagttttccgcgttgctgagaaattcaaagctactatttttgcaggagtaccaaccatgtataatttcttataccaatacccagaaggtcgagctgaatattttcagaatatgcgactttgtatttcaggaggctcttctttacctgtggcccttctacaccgttttgaagaaaagtttcaagttcggatttcagagggttatggattatcagaagcatcacctgttacgtgcttcaatccactggatcgtccccgtaaagcaggctcgattggtatgaacatcacgaatgttgaaaataaagtcgttgatgaactaggacaggaagttccggtaggggaggttggagagctagcagttaaaggtccaaatgtgatgaaaggttattataaaatgcctgaggataccgcagtaacgctgaaagaaggctggctatttaccggtgatttagcgaagatggatgaagagggctacttctatattgtggatcgcaaaaaggatatggtcatcgtaggcggatataatgtctatccaagagaagttgaagaagttctttatcagcatcctgatatcgttgaaacagccgtagtgggcgtcccagatccaaacttcggtgaggcagttcaagcctttgtggtcacgaagcagcagatgacggaagaagatgtaatgaactattgtaaagagcatctggcaaaatataagtgcccgacgattgtagaatttattagtgaattgccgaagaatacaactggaaaaatattaagaaaagctcttcgtaaacaagtgaacgcttaagacaaaggccgatccattttggatcggcttttgttatgaataatcagaaaacaattgatatttatataacaataaaatataatgacgttaaataaacgttatataggaggtgcgcacaatggtggtttcttcaaacgaaagaatggatcattttatgaatcgaatcaataatggcgaaaaaattgaagcggatgattggatgccagatgactatcgagaagcgttaattcgtttgatatccatgcatgggattagtgagattatgggagctttacctgaaaaagagtgggttccgaaggctccatctgtctaccgaaagcttgcgattatggcgaaagtacaggatgaaatgggtcatggtcagctattacttcgagtagcagaagatttaatggaaccactagggagaaaccgtgatgatattatgaaagatcttttttcaggaaaattgaaattccataatgtctttcatatgaaagccccaacatggggggatgctggagtgattgcatggttagtagacggtgcggcaattatatcgcagacgatgatgcttggaacgtcttatggcccttatggccgcgctttgaaacgcatttgcgcagaagaggtgtttcatgctcagcatggtgaaagcattattatggcgctagctgaaggaacgaaggagcaacgtgccttattacaagattccattaacaggtggtggagctcattattaatgttttttggaccaaaaacaaacgcggaaactgggcacagccatcaggataaaaatatgcgctataagcttcgtaccaaaacgaatgaacagctcaggcaggaatttctaacaaagtatgttcctcgagtatgggcgctaggtctaacgattccagattctacactgagatatgatgaagaaacttctgaatggcagtatcaacagccagattggaaagaattcaagaaaattgtgactgggcatggtccaaaatcgaaggagcgattagcccttcggatgcgatcgtatgaaatgaacagctgggttagggaagcacttggaacaagtgagatatcaaaagttgcgaggtgatatgtcgtgagtgaagaatgtagtggtaatcttttttatgaagtctatgaggtgtttagtaagaaaaccgatacatcggcgcttcagcatcaatttagtcttcttgcgccaaatgaggaacttgcatttgttatggcaaaagaaaatttctttagacgcgagcaggcagctgatatctgggtcgtgaagcgagaccatattaaacgaatgagccaggaagaaaaagaggcagtgaagcacttagagaaaagttaccgagaaacgaaggggtatgggtatttaaagaaaaaatggcgtcagtatgaacaagagcagcttactgaaaaagacatcatgggaggtggagaaggctaatggagtcttcggaatacagagagtgcttaattgaactgatctatcaattagctgacgatgattttttgctagcataccgtggatcagaatggctcggccttgcgcctcatattgaagaggatgtagcgtttgcttcaattagtcaggatttgatggggcatgccgcactttattatggattactagaagagcttggagaaggaaaaatagatcacttaacgcataatcgctctcctgaatattttcgaaatgccattcttgtagagttgccgaatggaacggggacttatttagaaaacccatcatatgattgggcatttactgttgttcgaaattacttctatacgctggccaaaaaggttcgacttgattcaatcaagaaggcatcttatgagccattgcagcacgttgttcaaaaaatctccattgagatgagctaccatatgatgcattgggaagtttggtttaaacagctcatcaatagtacatctgaagcgaaaagtagaatggaagaagcgatgaacactgtatttgcagagttaggtggtgttttttcatacggtcgttttggtgatcgcatggtgaggctttcgcttattgaaagtgaagaggtccttaaggaacgatggatggtttacttaaacaaagaaaaaatacagtattctatgaaaatgaaacagggggatggtcgaaatggcgttcatacatcccatttagtggaagctcttgatacgctatcagaagtatatcaatctgtccctacagcggagtggtgaggagggggagaaaatgatacttaaagagaaagtgatgaaggtgctcgatacggtaaaagatccggagattcctgttgtaagcgtagtggaacttgggatgatccacaacgtttctattcagaatgatcgagtcacaattgaagtgatgccaacattctcagggtgtcctgcattagaaatcatcaaaaggaatatcgagcttgctgtagaaagtattcctgaagtgaattctttatctgtttcatttattcggcatcccatatggacaaccgaccttgtttcggagaaggcgaagcaggagttgaaaaagttcggtattgcgtcacctgaagaccgtgtggaaggggaatggcatgtaccgtgtccgtattgtggatcagtttatacaacaattgataatatttttggaccagccgcttgtcgaagtattttgtattgtaagtcatgtaaaaacccatttgaagcgatgaagcctgtatcaatttaattaaaataagaaaggttgatgaatgatggttaaagttatcgcattgtataaacagccggagaatgcccagaaattcgatgagcattattttaatacgcacgccccaattacagctaaaatccctggactgaagaaaatggaagtgacaaagattgttggctcacctatgggaaaaagcgactattatttgatgtgtgaaatgtactatgaagatcatgaatcgatgaaagcgggaatgaagtctcaagaaggtaaggcttcaggtaaagatctaatgagttttgctggcgatcttgtaacactaatgattggtgaagaagttggagaaacagcagatacaaaataaagtgaggtggaatgaatgttcgaaacgattgaatatgaagtaaaggatcgcgtaagttggattcggttaaatcgaccgaataaattgaatgcgtttacatttaaaatgaatcaagaaataacggaagcgatgaagctagcgaataacgataatgatgctcgttgtgtggtgatcacagggaatggaagagctttttgctcaggtcaggatttaggtggcgttgaagaaggtgtggatcatggtgaaatgctgagggctacttataatccgatggtaaaagaaattacctcttcatctaaaccggttattgctgcagttaacggtgtagcggcaggtgcaggcatgagtcttgctcttgcgtgtgattttcgattagctcatgaaaacgcaagctttattgaagcatttgttcatgttggccttgtgcctgattctgggagtacctattttcttccgcgcctgattggtcatgcgaaagcgctagaacttgcgctacttggagacaaagtaagtgctccagatgctaagcagcttggacttgtgacgcaaattttctctaatgaacagtgggagaaaggtattaatcagtttgcaaaccgactagctagccttccgccaaaagcggtaactctcattaaacagagtttactccgcagctgggatagtacccttgatgaggtgcttgaaatggaagctgttgctcaggctgaagctggtcaaacgaaagatcataaggaagggctcctagcatttactgagaaacgtaaaccagttttccaggggagttaagagagcgagagaaaaaaagcaggaaaccgggggtaaatcttgaatagatgctatagagcgaaagcagccgaggaggttgatgaaccaacttcccggctctttcctatgcttactaccatagaaggaggtcttcaaatgtcagttgttacatatgaagtgaaaaaccatgtgggatacgtaaccttaaatcgaccagaagttctaaactgttttaattacgaaaccctttcggtactgcagggaattgttgacgatatatattcagatcgccaggttcgtgccgttatttttttaggagctggtgaaaaggctttcagcgcaggagctgatttgaaagaaagaagaacgctctctgaaagtgaagtccgtcgcaacgttaaaaaaatccgagaagtgttttcctcagttgaatcacttcctcagccaaccatcgcagcattgaatgggtttgcttttggtggaggctttgagcttgctcttgcatgtgattttcgctatgccgtcgaaggaacaaaaatgggcttaaccgaaacgagtctaggtatcatacctggggctggaggaactcagcggttaccacgtctaattggaacagcgaaagcgatggaattggtgttaacagcacgaaaattaacatcagaagaagcttaccaaaatggcattctaaacggtgtcgtaccacgtgaagacttgctgaaaaaatgtgaagagttagcacaagaaatctgccaaaatgctccgattgctgtgcaacaggcgaagtttgctgtccgagaaggaatgaatgtggatcgttatacaggaatggcaattgaatcgaaagcttatgaagtaacaatcccaaccaatgaccgtcttgaagcattagatgcctttgcagaaaaaagaaaaccaatctttaaaggggagtagctgttgcagaagaggtaaggctctggtagtataacatcatatttgaaccgcgtttttattacggaatgctttaagcaagcggaggtatgatgatgagcgaatctttgaatacacgctccatgatttttacattgtatggagagtatgttagacactatggaaatgatatttggattggtagtttgattcgtcttctaaaagagtttgggcataatgaccaatctgttcgagcagcgatttcaagaatgagtaagcagggctgggtggaggcaaggaaagaaggtaataaaagtttctactatttaacagaacgcgggattaggagaatggatgaggcggcagagagaatatttaagctccggccagcggaatgggatggaagatggcgtatgtttctttatacaatccctgaagagaagcgacatattcgagatgagttacgtaaagagcttgtttggagcgggttcggcagttcatccgctagcttatggctttcacctaatcacctggaagaacaggtgaaatggctgattgataagtatgaaattagtaactatgttcatttctttgttgctgattataaaggtccacatgaaaaccatgcccttgtcaatgaatgctgggatttgaatgaaataagcactcgataccgtgagtttattaaaatgtatagcgagcgttatgttatcgatcgtagtaaaatcgaaaaagggaaaatgagtgatggcgactgttttgtagaacgcgctaagctcgttcatgagtaccgaaagtttctatttattgatccgggccttccatcacaattattacctgacgaatggcctggtgagcacgcagccatgttatttagcgattactataaaacgcttgcgaaaccagcttcacgtttttttgaagaagtctttcgagaaggaaatgaactgaaaaataaagataatgagtatgatgcactccagcatcctttgttatctgacaggccatagaagtagaaagaaggaacgggtatcccgctccttcttttttgttatctgagaacttcatgtacctgatctttaaattcttttccctttgttttatacgtttcaatcgttaaggtgatgagttccttgtctttctctgttaattccctgattacttttcctggagagccgagaaccatagaattaggtggaatctttttaccagaagggatcagcgtatttgctcctattagcgaaccttcaccaatctcagcgccgtcaagtacgattgctcccataccgatcaatgtccctttacgaatcgtgcagccatgtagaatcgcattatggccaacagatacttcgtcttctaacacaagtgggaatccttcaaacaaatggcacgtgcaattgtcctggatattgcacccttttccaattgtgattggtgcttcatcccctcttaaaacggcattaaaccatacggtcgattcttctccaattgtcacatccccaataattttggcgcctggagctacgtacacatctcccgcaagctctggtgttaaaccattatacgaaaataacataaaactgcgttctcctttctgaaataacaggctaattacggacgagaaataaatcgtgtttcataagaagcaggaattttttgtttcactttgaatgttataaataagtataacacgtttttttaaaagcgtattaatatcgtcatgtatttaggaggagatataaaatgagacgtctttgtgagttgctgtccgttcactacccatttatacaaggaggaatggggaatatttcaagttctgttctcgcatcagctgtatctgaggcaggcggacttggaacaatcggaacgggtacgctaacagtagatgaagtagaatcactgcttcttgatatgaagaaacggactaagaaagtatttgcgctcaacataccaatttccgttacagcaaacttaacaggaatgtgtgaattagctgtgaaacacgctgtacctgtcgtctctctttcagccggtaacccagccccttatattaattattttaaacaaaataacattaaggtgatttgtgttaccgcaagcgtgaagcatgcgcaaaaagctgaaaatgctggtgcagatcttatcgtaggggaaggctttgaagcagctgggatcaattctccacttgagcttacgacgatgacccttattcctcagcttgtcgctaaagtacaaatacctgtcattgctgccggaggggtaggtgattcaaaaggctttgccgcagcattagctttaggtgcagaggggattcaattgggaacaagattaattgcaacgaaggaatctccttatcataaacggtatgttgaaaggttactagaagcagatgatacagaaacggtaatcgttggacggagcgtaggaaaagtacgtaggattttaaaaactgcttatgccgaacagttaattcaggcggaaggagcaggtattcatccagatgattttgaagcaatgacagatgaggaaaaacatcgaattggtgcagtagaagggcgattggaagagggatttattaatggcggacaaataagcggattagttaagtccattccgacagttcaggagctatttaaagaaatgatggaaggcgctgagcaaatttacgagaatcagatgaaggcatttaaaggtttttatttaaagcactagatctatatcaaaatattatttttgaaaatataaaatagtaataattgtttgaatactcgttgacaagctagatttgccagtgtaccataacgatacaatatcccggacaggcgatagggttaaaatatgacgacaataagttgagagaacttatttgggggaggacaggcatttgaaatcctggaaaaagtgggttggaatttcggttgtaagcgtgatggcacttgcagggtgtggatcgaataattcctcatcaaacgtagaggatgacggggaagcaagtaaagatacttatacgattggcgtcacgcaaatcgtggagcacccttcattggatgctgcttatgaaggttttaaaatggcactcgaagagaacggatttaaagaaggagataacattacttacgatgttcaaaatgctcagaatgacatgaacaacagtaacacgattgcgcaaaacctcgcaggtgatgaagtagatttaatttttgcaaattcaactccaagcgcacaatccgcgttaaatgccacttccgatattccgattgtttttacttcggtaacggatccagtcggggcaaaacttgtcgaggattttgataagccaggtgagaatataactggtacaacggatactcatcctgaagcgattccaaaaacaattgagtttattgccagtgaatttgatgctaaaaatgttgggctgatctacaatgctggggaacaaaattctgtggcccaggttgatattgttaaagaagcaatggaaggaacggatatgaaagctgttgagaagagtgtttccacatcagctgaagtaaaacaagctgctgaagcgcttgttggaaaggtggatgtgatttacatcgtgacggataacacggtcgtatcagcgctcgaatcggtcattagcgtagcgaatgataaggatattccgatgtttgccggagaatttgattccgttaaccgcggtgcctttgcggcttatggttttgattatcaagatattggttatgaagcaggacagatggctgcaaagattttaaagggtgaagaaacgacggcagatcttccggtacaataccctcagaatttaaaacttaaaatgaatcaaacagcagcagaagaaatgggcatcgaagtgaagtcagaatgggaagagatgggggaatacacagagtagaaaaatgggttcgaaaaagaaggagttttctttttcgaaccttttttacgaataccgttttcgaatggacaaatacactgtgaaaagaataggagggagttcggtatgggttcagcaatgtttggagcagtagaatctggcattatttatgcaattatggcacttggtgtttatttatcgtttcgtattctagattttcccgatttaaccgttgatgggagcttcgtcactggtgcagctattgctgcaattctaattgtaaatggaacgaatcctttttttgcaacgctgatagcgatcggagtggggtttttagcaggttgcgtaacaggtctcctacatacaaaagggaaaatcaatcctcttcttgcggggattcttatgatgattgcactctattccataaacttaagaataatgggaaggtccaatgttccgttgctaaatgaggaatctgtctttaccaagttagagggtttttttgaagcatctggacttgatcgtctactaagtaacttagcttcctcaattggacttggcaacctaacatcaacatggtccgttttaataagtatgttacttgttacgacacttataaaaattttgacggatttatttttacgcacgcaaattggtcttgcacttcgagcaaccggtgataataaacgaatgattcgtagtttctcagcgaacacggatcaatttacgattcttggacttggcctttcgaacgctctcgtagcacttgcaggtgcattaattgcacaatatagctcatttgcagatgttggtatgggcattggaatgattattattggacttgcttcagtgattattggagaggcgatttttggaacccggacaatagcagtgacaacattcgctgtagttggaggagcgatcgtctatcgaattgttgttagtttagcgctgcgagtggatttcctagagacaggcgatatgaaattgattacggctgtgatcgtaattgctgcccttgtacttccacaattaatagatggtcaaaaagaacgaaatcgaaagaagcgaaaacgtcttcagcaagagttgaagttaaaagaaatgaaggatggaggcgaagagtatgcttcaactaaatcaaattcacaaagtatttaacgaaggtacgcttgatgagaagattgcacttgaagatattaatttaacacttgatccaggtgattttgttacagtgatcggaagcaacggggcagggaaatcaactttaatgaatatgatttccggggtattaacacctgacgttggagatgtctttattgatgataagaagattacaagcttaccagaatataagaggtcaaagttaatcggacgcgttttccaggatcctatggcaggaacagctccatccatgacgatacaggaaaacctggccctcgcctataatcgaaatcgaagaagaacgctaatgaaaggtgtgactaaaaagctgaaaacaactttccaggaagcgcttgaaacgcttcatcttggtcttgaggatcgcttgtctgcgaaagttggcatgctatcagggggagaaaggcaagcactgtccctgttaatggctacgttcacagagcctaaaatgctcttattagatgaacatactgcagctctcgaccctgccagagctgctttaattacaaaattgacgggtgaaattgtagaaagaacgaacttaacaacacttatggtcactcataatatgcaacaggcgctggacttaggcaaccgactaattatgatggatagcggtaaagttatattagaagttgagggagaagataagcagaatttaactattgaggctctgcttcaagaattccagcgaatcaaaggtacaaagatgaacaatgatcgagcccttttaggatagaggtttaaaccaatcggatttccggttggtttttcttaagagtggcggatggaggagtctttagcatgcttattacctttagctttttttaccaatattttgttcctaattttttgacaattaattgacggttattagacgtgatgttattatatcgttaaataaacgtcatatattatggtgtgaggtgtagctgatgaaacagggaatatcggttggacaaagtgctgtcattcatgtagaggtcacgtcagatatgtatgctcagtttgaaggcaaaatcattcataaggcttattcgactgtatcaatggtctatcatatggagtgggccgcaagacagttaattcttccttaccttgaagatgatgaagagggaattggcggaggtgttgaggtaaagcatatgggcacagcgtgtgaaggccagtcccttacaatacacgccgtcattatttcacttacgcacaaatcggttattagcagaatagatgtcaaaaatggaagagagctaattgggacaggaaaagtgattcagtttatcctccccaaaaatgtgatcgacgagaaattagaaaacgctaaaatgtaagcgatttcataaaggggtgaaaatcgtgtttgatcgtatagaagagcatgagcaattattattttgtaatgatgctgatacaggtcttaaagccataatcgctatacataacacaacgcttggacctgcgcttggaggttgtagaatgcgtccctatgaaacgatagatgatgccattgaagatgtcttaagactttccaaaggcatgacgtataaatgtgcagctgctgatgtggattttggaggtgggaaggcagttattatcggtgatcctttgaaagatcggacgcctgagctttttcgtgcctttggtcaatttgttgaatctttgaatgggcgattttacacaggaacagatatgggtacgactcctgataattttgttcattcactaagagaaagcagctgtattgttggggttccagaagaatatggtggaagtggagactcctccattccaacagctaacggggttctttacggcatacaagctacgaataaaactgtttttggttcagaagaattaggtgggagaacatatgcgattcaaggtcttgggaaagtaggttttaaagtagcagaaatgctattagaaaatggagcagatttgattgtttcagatattaatcaatcagctattgatcgcttaattcaacgagcgattgagctcaagcagggggtaaaggtcgtttctggggataacatttatgaagcggacgccgatgtttttgtcccctgtgcacttggagggatcattaatgatcaaaccatctataaacttaaagtgcaagcgattgtcggttctgctaataatcagcttttaacaaatgaacacggcgatcagcttaatgaacgcggtattctttatgcgcctgactatattgtaaatagtggcggcttaatccaggtatctgatgagttgtattcaccaaaccccaaacgagtgcttcaaaaaacaaaggcgatttatgatacgttattgtccatttttgagcaggcggagacacattcattttcaacgataaaagcagcgaatcttttttgtgaacagcgaattgaaagccgaaaacggagaaatagcttctttgcgcataagaaaccagggaaatggtctgttcgctcttaaattaatgtgagaggaggagtttaatggacgtaactgagcaattcccattcattcaattagtcaatggagaaggcaagcagctggaagaaaatccaaccattacggtagcgaatgcaaaacgcttttatgaacaaatgatgttttctcgtatgtttgatcgaaaagctgtcaatctccagcgtcagggtcgaatcggtacctacgctccgtttgaaggtcaagaaggcgcgcaaattggaagtgctctagctttagaagatggtgactggatgtttcctacttatcgtgatcatgccgcaactgcagcttttgggcattcactcgtaaatatctttctttactggaaaggatgtattgaaggatgtgttcctccagaaggtaaacacatttttccaccatccgttccgattgcttcccaaattcttcatgcgactggtacagcatgggctgagaagaaaaaaggaagcgacagagtatcgcttgtatattttggagacggtgcaacatcggaaggggattttcatgagggattaaattttgcgagtgtgttccaaattccagttgttttttttaatcaaaataatggatacgccattagcgttccgattgagcgacagatgaatacaaaaaccattgctcaaaaatctcttgcttatgacatgccgggtgtaagagtggatggaaatgatgtttttgctgtttatagtgaaacgctaaaagcagtcgaacgtgcgagaaaagggaaaggtccaacgttgattgaggcggttacatggcgctatggggctcacacgacgaccgatgagccatcaaaatatcgtgaccagggagaaagtgaactgagaaggcagacggatgatccaattagtcgagttgaaaagtatctgaaagctaaaggtaattgggatgctgattgggatgaagagattaagagaaagtctgagaaacgattacaacttgctgtcgaggaaatggaaaaaacaaaaaaatcggatgaaggacttatatttgatcacgtgtttggcacggatgtttggcccgttcaagaacaaaaggagcgcttttttcataaggagagtggaaaatgagcatagcggtcaatatgaaaaagctaacgatggtgcaggcgattacagaagcactaaaggtagttcttgaagaagatgagtctgtccttgttctcggagaggatgtaggaagaaacggcggagtttttagagcaactgacggcttgtttgaactgtttggtgatcatcgagtgatggatacacctcttgcggaatcaggtttaattggtacctcaattggacttgcaatgaatggatatactcctgttgtggagatccagtttcttggctttatttatccaggctttaatcaattaattactcatgcaacgcgcattcgaacgcgaacacaaagtcgatataccgtgccacttacgattcgagtaccttatggagcaggtgtacgggcgcctgaaattcatagtgatagtacagaagcgctttttgctcacatacctgggttgaaggtagtcgttccttcaacgccacatgatgcaaaggggctattaattagtagtattaaagatcctgacccggtgctgtttcttgagccgatgaaaatgtatcggaccggtaaaggtgacgttcctacaggaagttatacaattccacttggtaaaggttataggcggcgtaatggagaggatttatccctttttgcatggggagcaatggtgaaagttgcggaagaagcagcggagaaagccgctgctaaaggaatagaatgtgatgttatcgatctgcgttctctctatcctttagataaagaactgatcgcagaatcggtgcagaaaacaggtagagcggttattatccatgaagccccttcctctggcggcgtcggtagtgaagtgatttcaatcattaatgatacttcgtttctttatatgaagtctcctattaaaaaaataacgggttatgatgcgcctgttcctttgtttacgctagaagatgattatttaccggatgctaacaaagttttgcgagagattgaagagacagttcgcttctaaagggaggttgaatgatggatgtgaaattgcatgacattggagaaggaatgtcagaaggcgaaatcgtgcagcttctagttaagcctggcgatcatgtgctagttgatcagccattagtcgaagtacagaccgataaagtgacggcggagctcccgtctccttttgcaggaaaaatagaaacgatttatgtagaagcaggtgaagttattgaagtaggagggacgctgttaacgatttctccaattccacagcacgccgagcaaacactgcttccaaaccgaaagaaaagaattttagcatccccttttacgagaaaaattgcgcgcgaaaataatgtcgatattgaggaagttaaggggacagggccagcagggcgaattactgatgaagatgtttttaggcatcttgcaacaactcaaaagcccgaagagaaagaaacagagaaagcaatagagaaagaagcaaaaaaacgaaccattccgttttcaacaagacggaaacaaatttcagcgaaaatgaaaaaatccacttttaccattccacatgtgactcattttgacgaagttgatgtaacgaacatcttggaaatgaaaaaggcaatgaaagaagataatggtaattctatttcggttgctgctttttatattaaagcggtatgcgtggcgctaaaagagttccctatttttaattcggagttgagagaagaagaaggtctgatttacttgaagcctgatcttcatattggtttagctactgatacggaagaaggactaatcgttccggttatccgtcattgtgataaactctcaatcaacgaaattcataaaaaaatgaaaatccttcataaagcagcaatgaacaatgaactcactagtaaagacctttcatctggtacgtttactattagtaacgcaggtccacttggcagtacaggagctacgccgataattaattatccagaagcagcgcttcttgctttccataagacgaagaaaatgccggttgtgacagagaatgatgaaattatcatccgttcgattatgtcgatttctatgacatttgatcaccggattgcagatggaggtacctctatgcgttttacgaatcgttttattgaattgattgaacaaccttccctactattaacggagcttgtctaatggtggtaggtgaaattatacatgaaaaagacgttgtcataattggagcaggtccagccggatatgaagcggcatttcgtgctgctaagaatgggagagacgttacgctaattgatcgatttcgtccgggtggggaatgcctccatagcggatgcattccctcaaaactgcttgcaaccgctgctaggaaaatgcatgaaaagacaccaggaattacggtgacacccgcattttgcatggacaaatggcaggaagaaaagaattctctaattgctacgatggaaaagggactacaagcccgctttcagtcaagtaacatcgaatgtgtaaaaggacaggcatcttttctctcagaaaacagaattggagctgaacagggggagaaatttgaagtgtggtcatttaaccatgccatccttgcgacgggtagcagaccaattacgcctacctttctttcatcttctcaccctaacatttttcctttagaacatctttataccttatcgtctcttccaaatcagcttatcctcttcggatctgattatctcacaatcgaggctgctagcacgtttcgtgcgctaggaattgaagtaacgatcgtgacggatgaagagaccattcttcctgaatgggatgaaagcattcaacgagaatctatgaggcagtttaagaagcaaaaagtgttcttgtacacaggagtatccggttgtcttgtgaaggaacgtgaaatgaccctggttttttgtaatgctaaaggagagaacgtagaagttgaaacagagatgatcgtctattcagttggacgagtcggaaatagcgattcgttaagggtggacaaagcaggaattgatatacaggatgacggcaccattcctatttccgaggaatgtaaaacaacaagagcaaacatttatgcttgtggtgatctaacaggaggaccttctctcgcagtgaaaggaatcaagcaaggaaagacagctgcagatcattgctgtggagtaaagtctgccttctcgcttgaatgccttccaaaggtcatacacacccaaactccgatatcgtctgtagggttaaccgaaacagaagcgaaagaagcaggctacgaagtggtgacagcaagctcctcaatgaaagcaaacggttatgcgatggtcactggaaatacagcaggaaaggttgtgatccatcgtgatctacaaagtcatgtgttgttagggtttcatgccataggtgcaggtgcagtagaactcattgaaaaagcaacgcttgctattgaaatgggtgcgagggatgaagattttatttatccttactcaccccatccggggtatggagaggcatggacggatgcagttgaaagtacaatagagaacaaggtgggaacaaaggtaagtcaataaataaaacgctccgattggagcgttttttgatttgcttttaataaatctgctgatcagcggaaaggagagggataatgaatgatcatcgttgctttacatggttgatcagaagtatttcgataatagtgggcgtaatttgctgtgaatcttaaactttctccatgtgaaatgataaatatttgtgtatcaacttcaaggctcatactcccttcttcaataaacacatattcttctacgccctcagggtgaggatttgaatgatagttacagcccggggcaagttcaatataaaaagtttcaaatgattttccaggttccatagggaagagggggacgactttcatttttccgccttcttctattaggggctctatttcaaatctgtttacttttttgattacgggttgttcttcatcaatgaatgctgtgaaagatacgcccagtccgttagcaattttccataacgtgttaacggtaggattcgaagcccctcgctcaatctgtgcaagcattggcttactaacagaacatcgctctgataattgatcgagacttaatctattttcaagacgaagtttttttaatttctgaccgatttgttgcgttaacgattggttttccattacatactcctcttttagctgtttgatggagatcacttattgaaaaaatgtttaatataacatacaataagtttaatatattatactaattagagcaacaggagggatatgatggaggcaagcgtagcaaacgactcagagtttggagtgggattaaaggcaggaataagcattgctgtcgggtatatgccagttgcccttacttttggtttactagcaagaacgacaggacttacactttatgaagcggttcttatgagcgtcctcgtctttgctggggctgctcagtacattacgttaagcttaattgcgattggcacaggtgcatttgaaattatttttacaatctttatcgttaatattcgacatcttttaatgagtgcctctattaatgagaaagtggaagaagatataccatggaaaaaagcagtctatgcctttggtattacagatgaaacgtttacggtttcagcaacgaaagcaggtagactcacgactggatatatgtttggtttatgtttgatctcttattccagctgggttctttttacagggggaggttacatagctggtgctaccctcccaggtgtggttcagcaaggaatgagcgttgcgctttatgcaatgtttatcgggctgcttattccctctgctaaaaaaagtcggaaagtgctttttctcgcggctcttgctgctttatttaatagtttccttacgttcgctcaattttcaactggctgggcgattgtgcttgcgactttgttgtcttccataattgttgagtggatgatgggggaggagaaaagtgagtaacacgatgatctggctaattataggtctcgctattgtgacgtatattccaagaatgattccgctcgttttttttaactcagataaaataccatctgttgttcaaaacgtactaaagaacgttcccttcgctattctaggggcgctcatctttcctggcatcctttcaatccatgatgattttctatttggtgttattggagcggcggcggcaatctttgctgcatatcttggggcaaacttaatcattgtcgttatgtttgcagtagccgttttaagtacgtatgcctattttatttaatataatcaaaaattaaatgatttatattttctgatttttgtgatataaacaaagtaaaattaaatattgtcttctaaagaggaggaatgaaacatgcatttgtttcgtattttgatggttggttttttctccatgaccgctgtgtcactcgtttggttccaatctgtcgaagtgatctcctcatttattgacttattctttcacaataaaagataatgtgttgaaaagagctttcgaaagctctttttttctttgctttttatgtgcactaaaattttgctatactattcaagaacttagcaacaaagataggaccaaatagaaaaggatgttgcccttatgagatgtatttcaattgatatggatgggacgcttttaacgaacgaacaaacggttagttttgagaatgtaaatgctattcgagaggcacagagtcaaggtattacagtagttcttaatactggaagagcttatgatggtgcccaaaagccacttgaaggtaccggtttagagctgccgatcatttgctataacggtgctgagattcgttcaattgaaggagacattttacacgccatttaccttgatgatgagcaagttcagtcgataaaaggaattcttgatgctgaaggtatttattatcagctatttacaaacaagggtgtattcactcacgactatgagggcacgattgacttaatcatcgatatgatgaaaagttcaaatcctaatttaactgaagaagaattgcatgttggcgctaagcgtcagtttgagagtttgtcactcaaggccgttgataactttgatgaattgatggcagataaaagcctccatgtctataaattccttagtttctcttttgatgaagaacgattggaacgagcggcgtcttcagcggaaagcgttcagaagacagttgtgacctcatcaggtaaagaaaacctagaaatcaatcacaatgatgcacaaaaaggacttgcccttgagacttttgttgcccaaactggcctagatatgaagcaaacggctgcaattggagataattataatgacatttctatgtttaaaaaagcatcctattccatcgcgatggggaatgccgatgagaaaataaaacaacaagtttcgtttgtcacgaaaagcaacgaacatgacggcgttgcacatgctatttataaattaatggacgaagatcttctttctagttaagagaagtttgggagatgtttaacttttttgacaacgggaattgctttttataggaagggattcccagtttgaaggaggttttccggacccttgttcgcgcagtctttgaaatactctgctaaaggagctggaaaagacaatgatgaaaccaacagaaattgaagaaaaagcaacgtgtcggatgtgtgaaacagagtatacgtggtttattccgattgctaaggaagacgttcatgcaaatgatcgggttgaagcaacgggaatcacgacaaaaagcagtcaggcaccaattgttgaacttcatgtccttgcagaatgcccggtatgtggtatcctcaatcgatttgatcacagctacgatcgtacaaatatttatgtggaaagttcataaaacgtggtaggaagtcggcagagcatctgtcggcttttttttgagggaagattgattggctttcacatgctaatttattgaaaggtttgaggtgattttgtagaacataataggagagaccgtgattgggctgttctaaaaaaatgttttgctcgtactattgatatagaggtcgtatcgggaggagaatgaagatgaagaaacgtataacatggatcattctaggattctccatttatgccctgattctggggctctatttatttaattgggcggattttggggtgcctgagacgtatcggggtacagcggcagatccagcaaccttcatgacagacaggcagttagaactatcagaggagtattcacgttacagaagttttttatctttcatcgcaattccctatgaatggttaatatatttagccgttcttggatttggcttatcaaggctttttaagcaattcagtgaaggggtttctagaaaaactgtcgttgtggttcctctttatttgcttctacttacgacgtttacttggttgctcacatttcctctgcattattgggcgagatcactttcagttaaatacggcattaacactcaatcgttctctgggtggatgaaagatgaaatgatttcattttggatcgacattctgctaacttccatcgttatcggtgttttgtatgcattaatgaggcgttataagaaaaagtggtggctgatggcgtgggggttaatggttccgtaccttgcatttatgatgtacattcagccagttgtcatagatcctttatataatgattttacttccctaacagataaagcgttagaagaagaaattcttacaatggcggatagtgctgacattccagctaatcgagtatttgaagtgaacatgtcagagaaaacgaacgcaatgaacgcttacgtatctggtattggttcaaatttaagaattgttctttgggataccactctgaataagctagatgatgatgaagtgctgtttattatggctcatgaaatgggtcattacgtgatgaatcatttatatggaaatttagtcggtgcactcgttacgagctttattggattgtatcttgcatacaggcttcttggagcgatgattcgaaaatggggtgatgcatggggagttacttcagtatcagatcttgcatccttaccagcattattcctgcttttttcgcttatgtctttcgtggctagtcctgtagaacttgcgatttctcgtaacgctgaaatgaaagcagatgcgtatgccatcgaaatgactcatgatgttgatgcagcaattggttcttttcaaacgttgactgtaaacagcttgaatgaagtgaatccgccattcatcgtaaaatactttaaatatggtcatcctacgatgatggaacgactaattatgttaaatgaatacgaaaaggacgctcccaatgactaagggggcgtctttgttgtatggataatcaacaacttgtagggtatcctgttttgaggtgctcttaccgtaacagaaccttcactttaagaaaaaggaaagatagtataggatgaatagtgagtattaaactagagtatgagatcatactttattcatattgttagattaatgataatgaggtgaccaacgtgaacgaagagattaaaagagtactcgatgctggtatatatggaacaccagaattaaagccagccgaaaaagccttgttcttatcaacatttagagagcgagtttacattgcccttacgaagagacaagttgcgcaaaataatgtttataaagaagtgaaagaagaaatgagaagagttcgtaatggaattctttatttaaacggggacttatcctattcgatgctttcaaaatatattaaggaagcaagcaagctttctttatcatttacgatcgtgaatgacaaagaaacagatacaccgcttggtctagttctagcctcaaaacaggaagcggttgagcgagaagaaatctttgttcgtgatgatcgcttttcattggagtagcttatgaataaaaaagctcgaatgaaaatgattaagaagtttgtgttgcttgttcttgcggttgcacttggatggggtatctataatactgtgattgctgatcgaagtgttggtacagaggttggcgatcaggcggcagattttacgcttgaaacgatggaaggtaaagaagtccacctttcggattatgaaggacaacctgttttcttgaacttctgggcaacctggtgtccaccatgtgaagaagaaatgcctgatatccaacaattttcagatgaatatggggaagaagtagcggtattatccgtgaatttcactaagtttgaacccaataaggaagccattcctaaatttgtggaatcacataacctaacattcccggttcttatggatcgagaaggcaaagttggggagaatctttatcaagttattacaatgccaacgtcattcatgattgatcgtgaaggagtcattcgacagaaacgagtaggtccgttgactttaaaagacatggaaggatggcttgatcaagtgcaatgaaaaaacggtctcaaaaactgagaccgtttttcttattgagaaaatggaagctatttgtgtgatatcggctgaaaagcatcttgaaaaccagtcgccttcgctagtctttcaagtttttcattaatgtagcgatgatcaaatttatcgagaactttaggatcaaatcctctaataacgaattgcccaaactcccagatggtttcgtgcgtatcgtgtttgtttccatcagcagctaacactaacgagtgtagaatcgaccctagaacggaaacatcttccttcgcataatgtctgatctgatagaagcttttataaaggtacgtatcatatgtgattggccttgtaatcacccttaagttctttttggcatcatggtagagaggatgaggaatgtgtttttgcccaaggcgtgataatactcttcctaatcggttaatgcagttaatagctgtatttgggtcattaattccaggtgaaatcgctcttaaggctatttcaacaagtttttgaatgccatactcaatgtcttgatcggtcgttcgttctgttccgagtgagagtgtgtcgagaagaaccttttgattcggattatgatttgaagaagaccagtatgaaaaaatgactgttccttcatcgacatactctccaatatcacgctcaagtcgaatgataaaatcaagttttgtagcagtggaaatcaaatctggcaaatcgatattttgtaaatatcctgattttgttgatcggattgaaatcggttttttcatcttaatctcatctaattcccaggagtcccacgaagcaaggttacctcgattagcttcttcaaagtctaggaaagtacgatcaattgtggtcaatgtgttcattgtaatgtggtgaattaaattaccgacaagtatccaatttgaaacgtgatggatgaaaaatacaaaatatgctacacagacaatggcatagataacggcgaaaacgggtgagagatagaccacatcatcttgactgctttgttcaattaaaagaagaagtataataaaataaataatgcctccaacgaaaataccaagtactctttttgtaatgcgatctgtaatgaaattctgtagggttcttggtgagaagttagataggtacgttgtaagaacaaccattatggttgaaaacgtaatggtagtcattgttaacatagaggaaacgagcgtgcttaagattgtgacacttgtgtcataggtggcaaagaaaaaatagggaagaaaaacaggctgcccttgaataactgtacgatcaataaccagagttaaaatggcagcaagaaacgcccctacaccatagaatgttgggataaaccaaaagcttgattggattcgcttaaacttattatgctccatatcccctttgcctccaaatagaaagattaaggatagtatgtgaagatgtggcgatgtttcatacatgtaatgaaagtggaaaagagcgaaagagagaattaagtacactgcttttagggtatagaggaaggaaagtaaattaaaggaggatcaatagatgaaggtagaccggacgggcatcattgagaatttctccgagaaaagatatgaatattggattgtcgagaatcaagatgtgaaaattatggtttcgtggattagttgggatgtaccacaagagctaattaataaatggttggaagaggtggcgttgtctgcttgactgtcttctagttagaagacagtcaagcagacaatagcagagcatatcctgatagactgactgacatgaaatgtttgatcgctattttttatagagtatcatcaggtgaaatgttttctttttccattctctttttgacaatctcttttggttcccagcaattaaactgataagtaggcttcgtttcaaaccccagtcttacacagcggtaagttgttcttgctccttttacgacttcgaaatgaatacatgtagcacagcaatgaaagcgagaataacgtccagccattagggtgcaccctctattaatgctacattttcaatagagtctatttcaccattttgaaaagttagacagtaaatttcaggatttctgagtgctttccaagtcttgaaatcgtatgttggatcgaagtgatgtagcattaaggttaataggtttccgtgagtcatcaggacggcatattcttttgtatgatgaatagcctcacttatcgcagcgatgcctcttgacgtagcttcctgacttgattcgccaccaggaacggtataagaaaggtctctgaaagttttctctaattcttctaaccaattgtcaattgggtctccagacaacgttctttcctctagtcgatcatccaacgtaatcggtttatctaattgaagtgcaagtggctctatcgactggacggcacgtctaaaaggagaactatacaatttatcaaacgggatagatccaagagtttgagctatcttcgtagcctggttacgtccttctcttgttaatgaagcacttggttcctggccagtcgcctggcagtgtctgacgagatatatttttttcattattgtcgccactcctcgtaatttgggtaaggaatactatgattgattttaacattcaaaaggtttgttggaaatcatttgtagaatattgaaacttttatggcgacttagtcgttataagagagacccctttttaacaagatgttttaccccctgtttgcttaaagaatggtgatccattctttaagcatttttttcataaggaggagcgtttgaaaagtttgaaaatgagattcaataggagtgagcgaagtggaaaaattcccagagttatcaactaagcgattacgattaagagaattaagagaatcagatgctcctgttctcctatctatattttcaaatccgtacacaatgaggtactatggtagcgaaaaaatgacggggattgaagaaatagaaggaatgttaatgagtttcaaacaaggatatgaaaaaaagcaggctatccgttttggaattgagttaaaagagagtggagaactaattgggacctgtggctttcataactgggcaaaacgagtgaatcgtatagagatgggatatgaattaaataaagaaaaagaaggcaaaggatacatgtctgaagcactttcagccatgattccgttcgcctttcaacaactgaatattcaccgaattggagcattgattcacccaaataacgcttcttccagaaagcttgtgaagaatctaggatttcgtgaagaaggtgttttaagggattatgtgtatgcaggaggagtgtatatggatttgatcatgtactcaatcctaaaaaaagaatggtagacagcttagatgaatttaaggatgagagaacgtctcatccttaagttcaaattacaacactggagagaacagtcttgcgaaggattcttttgtgcgatgtttaagtccgcgtttactgtatgaatcttttgttacgcttactgattcggttaggtcattttggtaggcttcgatcaagtcatcaattgtacttgattgaaataagaacatgtttacttcaaaatttaagtttagagagcgcatatccatattagctgtaccgattgtagcaagatcatcatcgacaatcattattttttgatgcaaaaatcctttttgatacatataaatttcgaccccataattaagaagttctgaaaagtaagaccttgttccatattgcgtgagaaaaccgtcacttatttctggaacgatgagtcttacttctattcctctcatagaagccattgctagtgcagtttgaatcgctttattcggaacaaagtaaggagttgcaatccagacccgcttttttgctgaagtgatcaagctgaaatacaaatctgacatagcgcctcttttcgtatcgggtccgcttgcaacgagctgtgctcctccatctccttcaacatcataagtatcaaggtactttcttgatagcaattcttctccacacatatacgaccagtccattaggaaaacgccatgaagagcagaaagaacctctcccttaacaagaagatgagtatcgcgccagaaacgcattgaattcatatcacccgcgtattcatcaccgatattcagccctcctacaaaaccgactttcccatcgatcacaatgattttacgatggtttcgaaaattaatggtttgattcacgaacccgtatttaattggtagaaattgttgaacacttgccccagcgtcccttaatgctattttcgaagctcgggaaaggttatgacttccgattgaatcatataggacacgcacttcaacgccttgcttcgcttttttgacgagtaaatcaatgattgaaaggcctagctcatctgatcggaaagtgtaatattccatgtgtatatacgtttcagccttttcaatttcgtctttaatggcggtaaacgtttctctaccattcagtaaaagttttgtggaagagcgcatactgatgggacttgcgaccattgtagcaattagatttgaaaagttttgatttcgctcacttagatcgtgccacttttcagaagcaggaaaattaacgtacttctgaaaaaactccagtccattggtccgcttttctttaaataaatgtccttttacttcgagttggccagaaaataaaaagaaaacatagccgacaataggaaagaagatcaatacgtatatccataatagcgatttatagggagatctttgttcaagtaatagaacgtataaaatagatagtaaaataaccgcataaagaaagccagctccccatttccatactggctctaaagaagtgaacagaataatcgatatggaggttgtcataagaagaaagaatagtatttgtcttgcttgtttcataatgtagcccacctcacttgaatttgaacaaaaaaagtaagggcatagcccttactcagcgtgtttggatttacgcttcacgcggtatctaccccataaatcaataagctgatcacctacttcaactaattgtgaatctcttgtttcacgctgcggattgggcgtgtttttaatggatgatacaagctttttaaagggttctggtgaggatttagctgtttgaataacgccttgaacggtttctttcttagtttgaatgccttcagaaattgatgctgtcgttgtcgttaacttacttgtttcatcattaattcgatcaaccttatcttgaaacctcgctgcagtttctgatagagccgttaatgactttttcgtttctttcatattcttaactgctatgtatcctaaataaataattgaaagaacaacaattgcgatactaatgtagacaataaccatttcataacctcccatttacgactcttatttaatattctcttaccctcaacatgatatacgcaaacaaattgttatgaaatttatttgcagaaaattgaaacgtttgtatactatgaaacgtaatcaataactggaaggagagatggaaatgaatcgctattcaattgaggaatttgtaaagtcaacagaacaaaaggataagggagaaggcttttttgaactagagacacaacgtatgctagaagtgaacttatcaggaagagtttgggcaaaagcgggcgcaatgattacttacaatggtcaaataaagttcgaaagagaaggaattcttgaacacggtctagggaaaatgttcaaaaaagcactcacaggtgaaggcgcttctttgatgaaagcagaaggaaatgggaagctctatcttgccgatgcagggaagaagatatccattcttcatttgcaaagtggagaatcaatcagtgtaaatgggaatgatcttcttgcatttgaagatgggatccagtgggatatcaaaatgatgaaacggataacaggaatgatggcaggtggattatttaatgttacctgtaagggccccggaatggtcgcaattacaagccactatgaacctcttacaattcgagtttcaccagggaaaccagtcattaccgatccaaatgcaactgtagcttggtctggccaattgcagccggattttcaaacagatatttccttaaagtctttctttggtagagggagcggtgagtctgttcaaatgagatttgaaggagacggttttgtggtcgtccagccttatgaagaagtatatatgcaaaacaatcagggctaaaaatgtcgttttctttgaaagaaagtgaacttacagcaggtgtgaaattacttgatggccgaccattctatctttcattagagggaattgaaaaattgaaagaagacgaggtcattgaatcattgttggatcgattggatattgctttaaaatccaatgaagtaaaacaagtttcaattacgctggatcggttttttacaaaaggaagtcagctgctaaaaaaaatttttattttttacagtctacaacgattgaatactataaaaaatttcaattggaaaaagtggctgctaattataatcgtagtattacgtatgaacaggtcggagagtcgagaatcgattcttttctttcgatatgggaattatgttcgaaggggtcgctcaattcaccctctaagcattctactcgagttcaatatgaggcgatgaagcaggagattggaaagcagtacaacacaagctgttatagtgtctattgggatgaaaagccgttaggcatggtgattcctattattgaacctggtacaaatgaagaaggaaggcttttttatatgggcattttaccagaacggcgtggaaaaggacttggaacgcctttacatcaatttggattagctttattgcaagaaaaaggggctacttattatatcggcagtacaggcattgagaataaaccaatgcagcaaatatttcgcaataataattgcaacccaactttccaggcagttacctatgtgaaagagagttcaaaaacgcgaaacttatcataatatgctgaaggaagtaaaatattcctattgaaattaatagaattttcattataatcatacaaaagggttctcaaaaaaggagagtgcatgtatgattcgtttagaaaaaggcaatcttcttaaaagtgactgtactgtgattgcgcatcaatgtgactgttttaatgcgatggacgttggaatagcaaaatcagtaaaggaaacttatcctgaagcagtgaaagcagatgaggactttccattttcaccaaaaaagaagttggggaaatgttcatttgctttaagtcgagataataaacgtatcattgcaaatctctatggtcagtataaacctgctggtctgcaaacaaattaccctgcatggttaaaatcgtttgaacatatgattaaagaattaaagccatttgaagaaaagggattcaaaataaaaatcggatgtggaattgacaaagatgatttgattaacgtaaaaaaatctcttgaaaagctttccaagaaatatgaaaaaccaatacatgtttactattcttaaagacaacgtccccagtacgggggcgttttttaatgaaaagcaatttccctatttttagtaagaaggaatcaaaaatgtaaaaggaatccattttgtcgtttatctattgaatagcgtggaatacaactagtgtagcgcaggatatcaaaattcaaaattactagaggaggtttcaaaaatggctaacaatagtaataacggtaatgacaaaatgagtagagaagaagcagggcgtaaaggcggaaacaaaacatctagagaacataacaaagatttttatcaagatatcggacaaaaaggtggagaaaagacagccaaggaacatgatcaggagttctatcaagaaataggcgaaaaaggtggaaacaaaacggctcgtgaacatgacaaagagttctttgaagaaataggtgaaaaaggcggtaagaaaacagctagagagcacgataaagagttttatcaggaaataggccaaaaaggcggagaacaaacatccaaaaatcaagataaggaattttacgaagaaataggtaaaaagggcggtaagaagagcggtaacaattgagagattgacaagaaggaagaacgaaggggtttcccttcgttcttttatttttttagacctaaaattttaatacataaaacatcccttcgcagatgcgaagggatgttttatgtattaaaatgtgcgttcttcttcaacttcgtgctggtcattaagaattaataggcgacttggggaatcacctttcgcaagttcttctgccttttcaatggcagttgaacgcatatcgtaaagatccgttggagcaacgtcctcaattttaacgtaccaacctgtaacatctttatttggtgctactgtatattccttcatggttatatcctcctttaagctgtgtataattaacacttcccacgataaaggagaataaaacctgctttctaggagaattaaaaaaatcagcgcattttacgctgattttcctcaacctacctaggaatgaggttagtcgagttgaaaaatcgctgttcattaaggatcgttcggttcaccttattggggttgagagattatgtagaaaccgattacaaatgcgataggcactatccaaaccataaaggctaatgcccatacagtaaaacggttccattctttttccttagtagccaagagcagaccctccacatcataagtttagtttcattataacatggacatagctaaattatgtgtgaacgattgaaattgttagaaattcaagatacgaatcgaatggtgatgggatatctgtaaaactcaccttgattcgccttcacggaggcgattacgattaaagtaaggtgaaggataaaaagcaatgggagaagaaataatccaatgatcacaaaggtgagaatagcaaggataacggcatacagcgtcatgctaatttggaagtttagagactctttaccctgggcatcgatgaacgaattgccttccttcttaattgaccaaataatgatgggagcgatgatatgtccgagggggattaaataaccagacaatgcagaaaggtgaacgtacatagcccactgacgtgtgatttgatcaggtgtaatgtctttcttttccatcacaatccctcctgtagcctctacctatgttcagcatattagacaattgtttaggatatgccgttaagaaattcttcaataaaaaaaggaaccaattctggtcccttaatttgcgttatagctgatgtgataggaggcacggttggtgaaaaagactaattcagtcgcctccttttttacattgtctagctcttcaagtggtatttcgaaaatagagtgaggaagtggtacagcagcttcatccgaaatcacctttccttcacctttaagctgaagaagggttgaagcagtgtagtcgtcaacggattcgccacgatgttgaaaggtaaagtcttcaagtttcataattgtcttatcaagatcatcttgctcttttttttcgatgatgatatgaccaccaacccaatcagctagcgtattgcgaacttctgataactttgtagtatccattttattcacctcgctcctaattttccccatctgaaggcaacataaaccgtctaactaaatttacatcagtgatgatgatatacttgtactatgaaatgagacgaaggatgattgtcatgaagaaaatatcgatagatgaagttctaaataaaaagatacctttattagatgttagaaccccggctgaatttgagaagtttcatattcctggagcagttaacttgccgattttttcgaatgaggaacgggaagtggtggggactacttataagcaagaagggacagaggcagctaaagatttggggatttcgattgtctcgccattactccctgagttttataaacgtgcaaaagaattaacaaatcatcaagaatttgctgtttactgctggagaggcggaatgcgaagtaaaagtcttgctacgatttttgagatgatgggattaccgagtcttcaggtcgaaggtggcattcgagcataccgacagaaagtaacaactggcttagagaatttttcgactcaattaactccttatctggttctagaaggattaactggaacttcgaagaccgaaattctgactgctttagaaaagaagggatatccagtgattgatctcgaaggtctagctgcccacagaggatccgtgtttggtagagtagatttacctgaaagaagtcagaaggaatttgaagcgaagctttaccatcgattgaaggagattggagaaacaccttattacattatagaatctgaaagcaagcgccttggaaatatcattattcctgactttattctagagggcaaacaaaaagggacgcgtatacaagtccacgccccgctttcttatcgaattcatacgatcttaaatacgtatcatcctgaacaacatcacgaagaaattactgatgccattgcgaaaattgaaaaacgattctcttgtgaagataaagaagtgattgatcaggcgcttgaagcgaaaaactatgcgatgattattgaacgattgttgctttattattatgatccaagatacgaacataaagcttatgaaaatgaaggcaacatcatcaatctttcatacgagtcactcgaagaaggtactcaacttgtccagaatgaaatcgatcgtttagatattaagcttcgatcagaaggcgagaaagtttcgctttaatggatcttttttcttcaggcaactgttccttgttgtatcgttcaatcagatcatcaatgcgcttaaagtacaaatgacttacccacgctacgtagcttcggtaaacaggcgattttagaaagtgtataagcatattatcatcaggtccaaagtagtatgtcttatcgtcaaaaaaagtagaaaaccgtctaaaggataatttggtaaatgagttgtccaattcaaatcgaaatttattaagggcatctggaatcaagcggatagtgaaaacatcgtcattatcaaacatttcctttggcgtgggtaagattaaatatggatattcctgatcatcaagggcaataaagaaatctgcaggggactcgtgacagctaggcactcgtttgacggtggtttcaacaatcaactgatagactgaatcattcatatcgttcgtatcctccctttgtaatctatcatcattgttaccgtactagtaaacttgtatacccctttgtcgaaaagtagttattacaatctattatccaacctttgaaaaaattcctttatttcaaatattacaaatattttcttcgaagtgctttatcctctaagctgaagtcaaattgattagaacacaccttcttttgaataagatttttttcaaccgtcaatcttaaaaatgtttgagcaaaagacttgaaagtcagagatagtcaaattataatatggttacaaggtcaaagatagtcaaagtcaaagaagacatctttcaccttttaactattttaattaatgacaagatagataaataataaggaggccatcatatgctttgtgatcaatgccaacaaaatcaggcttcggttcaactgaatgtccaaatgaatcaacataagaaaagagttaacctttgtagcacgtgttacgcaaatgtgatgaatggtcaaacagcttcatcaccaaaaggtcaaatggatgatttctttcaatcctttatggcttcagcaggacaaaatggttttacgggtcaagaagatggaccacaaacagaatcagggaatggtaaaggcggtttacttgataacctcggacgaaatttatctgacgcagcaaaagctggtttgattgacccagtcattgggcgcgaaaatgaggtagcgagagtgattgaaacattaaaccgtcgtaataaaaataatccagttttaatcggtgaagcaggtgtcggaaaaacggcgattgcagaaggtcttgctttgagaatttcagaaggtcaagtaccttctaaactaaagaataaagaaatttatttattagatgttgcatctcttgtttcaaatacgggtgtaagaggtcagtttgaagaaagaatgaagcaactgatttctgaacttcaaagtcgaaaaaatgtaatcttatttatagatgaactgcatcaaattgtaggggctggatctgcagaaggatctatggatgcaggaaacattttaaaaccagctcttgcaagaggcgagcttcaattaattggggcaacaactcttaaagaatatcgtcaaatcgaaaaggatgcagcattagaacgacgttttcaaccagtaatggtgaatgagcctactgtagaagaagccattcagattctaaaaggtttgcaacctaagtatgaagagtaccatgaagtgaactatacggaagaagcgattcgtgcgtgtgtctcattatcgaaccggttcattcaagatcgtttcttaccggataaagcaatcgacttaatggatgaagcaggcgccaaaatgaacctaacgtttgctgtgtcgaaccacgatgaaattcagcagcgtttacaccagattgctactgaaaaaaacaaggcagcagaggcagaagattatgagctagctgcaaaactaagaacagaagaattacagcttgagaaacagctcgaagaaacgttgaaaagcaactcaaatatgaatcattcagtggatcttgaagagattcagcagattgtagagggaaaaacaggtattccagtccgtaagcttcgggaagatgagcaaacgaaaatgaaaaaccttgcagagcgactgaatgctaaagtaattggtcaggaagatgctgttaacaaagtagcaaaagcaattcgccgaagtcgtgcaggattaaaacgccagaatcgtccaataggttctttcctattcgtcggtccaactggtgtcggaaaaacagaactttcccgttctcttgcagaagaaatgttcggtgatcgagatgcgatgattcgacttgatatgagtgaatatatggaaaaacactctgtctctaaactgatcggttcccctccgggctatgtcggtcatgaggaagcaggccaattaacagaaagagtacgtcgtaaaccatatagcatcatcttaattgatgaagtggagaaagctcatcctgatgtacaaaatatgttccttcaaatccttgatgatgggcgtcttacagatagtcaaggtaggacggtaagctttaaagatacggttattatcatgacaagtaatgccggaacttctgagcgaagaattactgttggttttgaatcagcagaaagctatacaggcgtgatggagagtcttggtggttactttagacctgaattcttaaatcgatttgatggaattattccatttaagtcacttgaacaatcaagtctcgttaccattgtagaccttatgattaatgatttagatgaaagccttgaagaacaagatattacacttacaattagtgaagcagcaaaagagaagttggctaaacttggatataatccacagtttggtgcacgccctcttcgcagagtgattgaagaacatgtggaagatggtattgctgatttgcttgtcgatgaaggcagtatcaaatccgtgacggttgaaattgtagaagataagattgttgtttcacaaaagaaataattttataagtaaggaagtcgctctataaagatggagcgacttttttgatgttagtttttacaataatagggaagttattaatatgaaatcctgatttctttccttaaataatgttgtcgaatcttatgtgattttgacttcttttgcggttataagtcgaaaagtcagaatattagttaaaataagttgtgagatctgctacgttagataaggaaggtcaggaaagacttctctactattttataaaggagcgagaacaaatggaactggatcagttagagttgaaccagacgttacaagaaagtcagccagaaggaaagacaattccttatttaacagcattaattggatggagtcttcccgcaattgaggcctgtgacaagttgaatcggccttttgtagtggtaggtcctcctgattttaaggattatgctgaaaagcacgacattactttcgtagggtgggagtttgatagattgaatgagggatcagacaagctctataagcagctcaaagccctcggagctgaggtagcggtacctctctatgaagagtgtgtagaatgggcaggtgctctcaattcacgctttagagaagaaccaagactatttaaccgatctcttcttttaagagataaagggatgatgaaacgaaaagcacagatggccggtattaaagtaggcgtctttgaagaagcaagagataaagaggatgtaaagcgttttcttaaaagagtaaatgatgctcttttgaaagttgatggggataaatatgagccgattcactgtaagcctttagataaggctggatcagtaggacaccgcgcaatcgatgacccagcggatattgaagcattgacagataatgattttccgcttctgatggaaagtcacttagatggccaagaattttcatgtgaagtatttgttaacaatggaaaaattcaatttctgaacatcacggaatacgtaaagcttggttattcgaattttgttccaccttctccttctcttgaagagaaacgtcctgttatcagaaaagcgattgaacagcttattgaagcatttgagatagaaaatggtgttattcatcctgagtactttattatgcctgatggtacactacattttggcgaagtagcggcgcgagttccgggcggacatatttttgatctcattgagagggcttacggatttagcgcatatgaagcgcagattctttgtagtgatccaaatacaacagaagaagaattaaggaagttcttcccggcagaagatgaggctttaggctatgctggatgtctgatggtgcaccctcatgtgaattacattgagaagttaaccattcctgaagagcttgaagaacattccttctttgagaagcatgatatgtttacgcctccacaggggaaagtggctgaacgcgttggattcggaaatcattatggaaccattttctttttcggagatgacagtgcagagatgactcgtttacttgtagactatgaaaagtatgatttctatttgtaacataatatttttacaataaaggagaattaagcatgccatctgaagttacagaaggaaagattgcaaggttttccaggtcattaacgcgtttagaggaagcgccttcttatgcgaaatcacgctatcagacagatgtttttcaagaggcaaatcgccttttggaaacggaagaaggtctagagtttctttaccaatatgcccatcgatttgacgctgcaggagtttttcaagatggcccttgggaagatccatcaaaacttcagccaccgcttgtcgctggctctcttcaagcgaagggtctcccgtatgtcattgagatgctgagcgatcttcgtatgcttgcattagcggaaggaaagggcgagcatcctaaggtttctaaagaaatggctatggatttcttaaacgaagtcatggcactaaaccttgacttacttttcccaaacacatcagaagcttcacgaattgaagaaaaagaaaatacggttgaaacacagcgattattccagtttatctcgcaatacctttcttccagtgctttatcagaaacacttatttatgagattgaacgcttaaccgcacaacgaccaatcacagtaaaaagaaccgtgtcgatgatcaaaatggcgaaagaaatgcttcgctctgaaacaagtgacgatcaacgcgttatgctagaatcgtacgtatcttccattgaaggaccttcagagttaagtcgctcctatcagcagccaaatgaatatcgaaaaaaactgatggcgctctccacagaagagctccgaaaagagagtgaacagctggggctctccatgagaaaaacagggctttgttccccacatcatagtgtacttgcccgtttcctaagcagaaaatcgccgcacttacttccagtattgttacaattaactgggaaaggaaaggccaatcttgaagagcatgcggagctcgttcaccagcttattaaagtttcgctatttccatccacttgtcaatcggtttatggattagcccttttgttagaaagaggtgttctttctgcttcgccagtgattcctggtttaaggcggatgattgagcttgatatacgaccagaagtgcgaagtgccctatttaatacggttggtgaaggagaaggtctaactgctaacagtatcttgttagcaggtgtgattagcgttctcggtcagccactcggtgttggacaaggcctaaatccaacttgtcaggctgcaagaggaattagcctctgggctcaacatgcgcctggatatttactagagattatcccaagagctgcaagagatggagatatcgatatggtgtttgaaggcgttcaaattcattcgaaagaccttcaaggtggactcgcacccgatctccatccggaacttgatcctctatcgcttgtcctcgttcctcatcttgatcgcatttatagtgagatgatgagcagagttgcattaagaggggaagatggccatcgctgggtaaatccagcattttatggtaattgggttcaaaaagggtttagcacggtaattgagccgattaccggtagcgtgacggactatccaggttttgtcaggttattttatgccacccaccatccggagtacaatgatgattatgaattgatctatccgaatccggtagggatatttatcacaaacgttcatgggaaaatgctcggctttcatgcggtgtccattcaaagaattgctaaaagtccagatggagaatatcgcgtctacttttacaatccgaataacgatggctctcaaaattggggtcagggaatcgaatgtacggttatgggaaaaggggagctctcaggtgaaagctcgctacctttcgaagagttcacttcacgtttatatgcttttcactataacccatatgaacaaggagatgcttatgcggttgaagcagagaacatctccattgtaaaatcccttgccaaggaaagctggggacaagagtacacgtggataagtaagtaggtatctatttttaagtagttccatatcctatctattcttatagcgaagcgtcaggtaaatgatttgtttcctggcgctttttttgattaacttaacttatattaaaaggaggggatcttaacatgatcgagcatgtagtcctatttaaattcagtgaagaaacaacggtagaacagaaagaagaaggtatgagaaggttaataaaagtaaaagacaaaatcccaggtattgttgatattcaagctggaaataacttttctgatcgaagccagggatttgaaagtgggctaacggtgcgctttgaatcgaaagaagcactagagtcgtatggaccacatccagcccatcaggaagtagtggcctaccttaaagaaataggaatgagtgatgtacttgcactcgattttgagtgcctgtaagaacggagaggaggatctacatatgaagggatttattcacggaggatacgcaggtcaacgggggttatcactgaaagatcaacttgctgaacaagaacctcagcatggggaagtgaaaatcaagctgaaagcatctggattgaatcatcgcgatttgtttatccctgatcgccatgatccagaggaggcagatgttgtccttggatcagatggagccggggtcgtcatcgcagttggcgaaggtgtgaaagagattcaggaaggtgatgaggtgatcattaaccctggtcttggttgggaaagaaatgctcccatcccgccagcaggatttcaaattgtaggctttcctgggcatggtacttttgcagaaacaatcgttgttccagcggtcaatgcagtgagaaagccagaaaaccttacgtttgaagaagcctctgtcattggtttggcaggattaacagcttatcgctcattgtttacgagagggcagcttcaaagtggacaaaccgtctttattcctggaattggaggaggtgttgcaacattcttgctgaaatttgccaaggcagcaggagcaagagtgattgtaagttcaagaagtgaggagaagcgccaattagccctttcgcttggtgcggatcgtgcacttgctgatgatgcagactgggaagaagaaaccactaatgaaaaagtggacttagtgattgaaagtgtcggagcagcaacatttaatcgatcttttgaagtattggagaaaggcggtacgctcgttatttttggttcttcaacgggagataaaattgaatttgatttgcgtacattcttttacggtcaatataacctgcttggctcgacgatgggaagttctgaagaatttaatgatatggttgcttttataagtgaacattcaattaagcctgtcatggacagggtatatgattttaaagatattaaagaagcttttactcatttgaacagtagtcatcaattcggaaaagtagcggttcgaatagctgaaaagtaacggaagatcgcttctagagaaaatgtgcatttatacgtatagaaaaggaagccgatcggcttccttttctatgttaatagtaataaggtggatacccatagtatggatatgggcgataataaggaatcaaactaagtgcagcgatgccagctaatggaaagaaaaaacgtccgaatctgcggtagcgaccgtattgtctttccatttcctgtccttcactttcttccacttcttgtggaatcatcaagcacatatgctcgtcatctgagtccataatgattccttcatattctactccatcctgcattcttactttagcgtggtagctatgataacgttgacaaagctgtttcatatccccttgaagctgtttttctttaccaggcatcattgcaccttgaacggcctggttaggcatgttcccttgcattgcgccttgaacggcctggttaggcatgttcccttgcattgcgccttgaacggcctggttaggcatgttcccttgcattgcgccttgaacggcctggttaggcatgttcccttgcattgcgccttgaacggcctggttaggcatgttcccttgcattgcaccttgaacggcctggttaggcatgttcccttgcattgcaccttgaacggcctgattaggcatatatccttgcattgcaccctgaactccttgattcatatgattaccgtacatgttcataagcagttcctcctttacacaacacaggatattcacccagatagaaaacagttactacccaaatcaaaaattgggcgtcaccatagtgaaaatgcgttcccttcttgaaatttccatagagaaactatacgataagttcaaatgaccttaaatacagaggtgtcagatgagaggattttatttaactagaacagaaatgggaacaattctccaaactattcgtagtaaagaaatacctgataagattttaatgaaggcaatgaaaaggtccggttgtgaaaaagaagagttaccagcgatcttttctaaattatcaaaagctacagaaggaagttttggattctcaataaatgaaattgcgacacttggcaatcagcttgagtatgctagctttcgttctacagctgtacagaattgggttaaaagagatattaaagagtggatcggtgcaccgcaattaggaaaaaaatacgccatcgaacaagcggctattttatttattgtagaggatttaaagaatacacatgatttcgaaagcattcgtcttcttttaaagtttgcctttaataacccggcagatcgaaacgatgatctaattgatccactcgctttttatacggcttattcgcaactttttgaggcaatccatacgaaagtaaaaccttcaaaagagggttttagaaagaaagcaagtgagttatcgtctattttttcggatttaaacgaaaagcaaaaagaagatattgaaaagttgcttatctctgccgccctttcagttcaggcttcttattaccaatcgttatcaaaacgatatcttgaagatgtatggaaatgaagagtatttctaaggggaaaaaacgagctgctaccctcattttggccgcagttcatttactcaattgaaaagttaacggtttgtttaaattgctcttcagtagctaaccacatgtctaacgtgtaggaccctggtttaagatcttctatcatgatcgtatattcaagaacttcagcttgttttaattcaacgttttcttcttcttttacaaaacttttattagctgaatatgttttaagagcttcaccctcgtcattaaaaagggtatagtcgtatgtttgactacttggaaagtggatcgtttgaacttgttccgtttgattttgaatgcggtacaagaaggtggccgtatcattttcggtcgctgttagggtaagcgtaggttcaagtgagccggcgacaataccagaagagcctgatacttgttcactactttcgttattcgtgttcattaatgagttctcctctccacatccagataaagttaggaggaccatcgttccgatcatagcatatttaaacatcccatcactcctttctttattagacgaggtggaaccccagaaagttacaattctttataacaagcagtagaaataggatatatggtcacataagccatataatagagagacaagttaaattaaaggagttcgatagaatgaagccatcattagtagatattcatgctaggataaatggcagaagtgcaggtgtacttggaaatgaacggttttataaatttgcggtcttcctgcctttaatcgaacgtcagggtgaacttcatgttttatttgaggtaagggctcatacacttagaaggcagccgggagaagtttgctttccgggtggaaaagtggatcgtcatgatcaaaatccgaaaaatgcagcgatcagggagacatgcgaggagcttgggattctagaaagagaagtttctgtaatgggagaactcgattttcttgtaacctccttccaatcaattgtttatccctttgcaggtattattaacgttgctacagaactatcacctaatcctgatgaggtagaagaggtttttacagtacccctctcgcattttatcgacaacccaccagagcgccacgatattcgtgttcatgttaaacctgatgatagttttccttttcatttaattccaaatggtgaagagtacaactggtcttcctcaagcatgcctgagtttttttattactatcaggattatgtgatttggggcatgacggcaagaattttgtatcattttattcaattattagatgaaaaataaatcatctagctcattttctgaaaaggtagtattgtgaattgaatcaaatataggtaaactagaaaaggtcgatttatgtcggttttttctagttttttttatgtgcagggtatttagtcccttctattacaaagggtgttctaaattaatagaatatacgacaaaaatcaacagaaagattcgaaagaattagtgggataaaagcgcagtatatagagagaatgccaaacaattcttaggggggaaaacaatgttaactattatttttgttttacttgccacgtcacttgggttctttatttactcatatttcgtaaaggactatgcgaaagaagtgaaagggcaggttgatgatgtttatatcaacttaatgaaagaactgaaaacggttaagaaacgtactgaaatgttagaaagcaaaacaaagtcagtgagcggtggttcacatgagtaaacaagaagcaaagggaattgcagctggtctcctttttgccgcgattcttttaactgcttactattttatgttttcacaagctaaagctgaagaaagcaataaagtaacagatgcggcggtaaaacagcatttagaggaaaaaggtatggtgatggttgcgaaggaagaatatgattctttaaaagcaacagaacaactcgatcgtagcgaaacagaggttaagaaagaggaagcagctgatgaacctgatggacctgaagagattgaattcactattaaagaaggtttgacgagtcaggaagtggctcaaagtcttcaggatcaaaagttagtaaagaaatcggatgattttattaaagctctccgtgacatgggcaaagaaatggctgtgcaaccgggggattatacccttaaaacagatatgtcttctgctgagattgtagaggaaattactcgatagagaaacacccggcgaattttaatgccgggtgtttttgctttctttattttgttagtttataacgcaacaattaatttagatcgacagcatttggagacgttggaatggttaatggcttgtctagtgaatatctcccaatcttgtcgaatcccgtattttcaaagcgaattgtttgatagtcgtattgtgaagcaacaagcattaaagcttcaattgtttgcatggcgtcttcttcagacggaaaatggctttcttccgtaaaggcaatggttgcttctgatccgtttccatcgaaagagtagattgctactgtagctggtatagatggtaggtaataaggagtactttgatcgccatctttcattagagaaagagcaacatccatttcagcgccttcttcaccttgaagtgcaggtccgtttacgagaaaatgtgctcctgtactcgatttataaagataatagggggaaggctttttgtttactgaaggatcagcattcccgaaattccccaaagtgtacccgtcttctccgttggtttgccaattaatttggtctgcaccaaggctttttgctagctgttgaacactatcgcttatcatgatggattctgtagatgagagaccatcaccaggttcagaaaagctgactacaagggtttccttttcattcatattaatcaattcaaaagtagcatcggttagcggtgagcgttcaagtccataatcggaagcgcgaaagttcgttaaaatgaactcgatattttcttgtgtgctcttactttcatctagcggaaaagacagcggtacgagtagcgtgctttctgggtcaggataagaaataacgacgttttttccatcagattgttgaaatgctggaatgtagctatcgaacatagtcggttcttccgcaagcgttggcacctcttcttctatagtatcgcttgttttttcttcagcaggagctaatgttgtggtttccgttttcgaatcacttcctgagtttgtagaattggtgcttgtttcgtttgagtcggattgtgtaatcgctatattagaatcattgttattttggttgaagagccctggagtaattagaacagctagcaataaaacaataacagcagctattccagggataatccatggcgttttctttttcgttgatcgcgacatctgctcattcctttttttttcgatattttcataaatggttgctttacttctttcatcttttacaacaggtagctgagaaagaagggattttgttcgatcgttcatcataagaccccctttagttgatgattggatggatcatcgacaagttcccttagcgctttaatcgctctgtgctgcgttgtttttactttactaacactccaatttaggatttcagccgtttcgttgatggagagctcttggatgtagcgaagaataagaacttgctgctgatcaagtgtacattctcttaaacacttataaatagcttgaacttcttccttttgaagcagaatttcttcaggtagaggagcctcgtcttttggatgctgtttgttaaagtcaaacttactgagccaccttgaagttcttcgattgtgtgtacgtaaataatcaatcgctatatttctcgcaatggcaaagagccacgtcttttcattgcttcgttcctcgtaattgtgataagaacgaagcacgttaatatagacttcttgaacgagttcttctgcaatcgctctattttttaccatataaaataaaaattgaaataagttcgtgtggtagcgatcgtacaaacgctcaaatgtcttatccattcttcagccctccttcttctataaaacaaaacgagttatctagttaaaaggttacaggaagattacaaaaatgggtaggttttgatgaagaggtaaagaaaaaaagaaagcgcttttgtatttgtctcttcttagatagaatgggttttagttacagtttttagagaggagaattaaatgcagtcatctgtaacgtcacgaaactcatctattttctatggatggtacattgtcttagccgcagctattggcgtctttttttctggaccaggccagacatacgctgtatctgttttcattgattactatattctagagttcggatggagtcgatcactcgtttctggaatttattcttccgccacattagctgcaggtttattgctttttatcgttgggagattagtagataaacatggtcagcgcagaatgatgttaacgataggatcgctactagcggtcgcatgcttttggaatagttttgtgattggtcctgtcatgttatttattggttttttcatgcttcgtttatttggtcagggatccatgacgctcatcccaaacacgcttgtcccgcagtggtttgtgctaaagcgcggacgtgccctaagtttcatggcaattggaggatttttaagttctgctgtttttccaccgctcaacagctggttaatttcttcctttggttgggaaagcgcatggagaattctaggtctagctcttattattgtactgttaccagttgtcttcttcattgtgaaaaacaaacccgaagacattggtcttcttccggacaatgctgtttcgaaaaaaagactggcagagcgccgcgaagcgaaatttgaagaggaagaaaaagaagaggtttttgagacaaattggaccgtgaaagaagctatgagaacgagagcgttctggctaatccttttttgtgtcagcattccagctcttgtaaatacaggtttaacgtttcacttgttttcgattttaggtgagcagggagtacctggaagcacagctgcaatcatcttaagtatcatggctattgtcggtttccccgtaacaatggtatcggggtttattctagagcgtgtccacgtacatattgttcttggcatatcttttatcggacaaatcgtttttattctgctgctaacccaagttcaaagctatttgctttcgattatatttgccgttctctggggaatcattggtggaattgaacgaatcaccctaaatattatctggccaaactacttcggtagagaacacctcgggagtattaaaggcattgcgacaactacaatggttattggttctgcatttgggccacttccgttcgggattgccttcgatctttttggaggctacactgagatacttataatcatccttatctttccgatgctcggaatgattgcagcttttctttcatcacctccacgaaaacaagcatagcaaagcgcttcttctcgcaggcggaaggagcgcttacttgtgtatgagagaataaacaaccacgtcataataacggtttcgcatataaacatgatctttaaaatggccttctttttcaaaatctagttgttcgagccgcttaactgctgaatggttgtcttcgattgtttgagcataaattttatgaagctttatgtgatgaaacccataatgaataatcgctttggctgcttcaagtccgtatccaccactccagtattttctggataatatagcaccaatttctgcttttgatgacgtgcggtcccaattttgaaaaccggctgtaccgattaattcccctgaactttttaagcgaattccaaaacgaattgcatgggtcgataagatagaagaggggtctttatacgcccgaatgtaatgaagagcctgagtttgtgttttcatgacgttaccgccatcataatacgtaacttgtggatctgaaaaaatggaaaaaagagatgtctgatcttcttcttttagagcggtaaggttaagacgtttcgtttctatttcaggaaaaactctcaatcacttcaccatcctttacccttaacatatgttcttaaaagaaagggtagagggcggatgacacgatgaaaagcccgaattcatttagtacgtgtttccaaatcgaaccgtaataaaattcttaagaagttcactacggttctcttcatattcttcaagcgataatgatgaacgctcgagcccattatcgaaaagtaaaatcgaattatctgacattgtgcgattgaacgagtactgatacaaataagaaaaaccgggcctggtggccggaagcattaagtatggcattcgtgttgctcctggtcttcttcgcatcgccagtgcctcaatcattcctcctacggttcgaaagcccaatccatgaccaaaaaaagtcccatcacctaaatcgactatgttttctccctgccattcaggtgtaagaggattcacgtcagggttcttcacataacgaatatctccaggaagataatcaggtggtatattgtgcacaatttgcaaatcctgatcgtatttccatccccacaaccgcatattcgcgaataattgattaaacttgttaactggtaacatttttacagccgcatgatagagaataatgatcatcgccgtggcgcattcaaatgcatacatcggtccattccgataaatatccaaaatcgcttctgaagccggtacccccgccttaagttgaaacgcgccgtccggtaggaggtgccaaaacatagggttacaacgtgaacgataaaagtcagcaaattgaaccccgctataatataggtcacgggaactactcgtaatggaaactcgaaaccgaatttcaaacaacaaagcatcgagcgacctgtacgcataggtatgcggactcattaacatgacgtcgacaattgttagttcaagaggggtctgtatacctgcatttacaatgacattcttatttgcactgctacctgctatcgtgatcatgctgaacctcctccatgaacatcaactgggcactcagggggcgattcatccactctatccattcactacgtgatctcatacggattttgtaagatagatttgctaactgttctttttcctgttcagaaagagaatgaaatccatcttctcttaggttaggtgatgctatatgagagaagcattcccgatatttggtgtcgtgatcgacaacatatggtgcgagctcagcagttaattcatagctattttcgttatgaagaagatacggaagattttcttcataccagcttctaaagtaagcgtaagggtcatcactttcatctaaaccagtaataaagtgcagaagctctcttgcaaatgcaacttcttcttcttcggctgatagtaatttttcaccgattggcagtaaacttgcaatattatttgaggaaaaataagcccaagtcacatagtgagtagaaaggccggcgcgtttcctgttgaataataactttgaaacaagtaataaatcgtcaggatgttgatagatcgttgtcaataatccagctgctcgatcaatcacaagacgatagcgggtgtttaatttctcttcagaaccagtttcaaccatccatctgagtacagagtggatatattgtgggaggtcgcagatcgagtagggaaatggagcagcgggtgcacgctcttttgcaagaatatctttttgaatcgataaagcgattctgtttcgatctgacaagtgtttcgatagattgtgctctcttatggtggaagataggacatagagagtagggtaggatagtgtatcttcatttaaaagagaaattactgattttttatcgtgatccatcagattccttacatagtgctccagccgtttaaccccttctgtttttcggatcatttcaagtgagacagagcgtttcaacgtgttgcctcctttcaaaaatgcactattaccagcttattcgagagggagctatttcatcacagctaatcaaattggtaatcttaatgaaaccttcgagtgttcgacccgtcttaaatgtatagcttcataaagaaaggagtatagacatggggaataaggtacgcattggttttcagtttatcgctgcttttctaggcgtgttgttacttggcgccataccagggctgtttaatggaatgaaattagatcctggaggttatattagaaggcttcaacgcacgatagaggaattgattcattttcaacaattaacatttcgttcaggtaatgagagttatcagctttttcctctcatttttgaatacctcttctattcaatcatcatcttatttagtgctttgattcttgctttttttgttgcatttctatttacctatctaacttacatctctccttcgtttattcaaaaatggttcaagagagtagcatttttgacagaatcttttccagacgtttttatactcgcgattgttcaaattggggtaatttgggtttataaaaaaacagagatcctgttaatggacgttgcggcatatgagcgcatttacacgatgccaattctcatcctttctatattacctgccttgttattgtatcgaattatgatgcacattctagctgaggaagtggagaaaccgtatgttgaacttgcaaaaacaaaagggttagagcccacaaaaatatttcttgttcatatttttcgaaatacaatattatcgacttattttcactccagatcgattatttggtttacattgtctaatctttttattatggagtatgtttttaaccttaatggattaattcgctttatgtatgagcacccaacatcagaaatattcactgttagtgcactgttgctttttatacctattttcttgtttctaaccgtttatcagcttgtggcggaacgggctgctcaggaagaagctatgatgtagcagaaaaaggagggaatacaaactttgaaaaatgctttaaagaatccaatgttcgtgacaggattgtttatcattgttcttctacttggtagcagtatatactattccattgcttatgatgatgttgtgccgcaaacgtccatgctctatgatcaagacggaaatttaatcgaccgttcaccttttacaccgttacaggtagctccatttgggacagataagtatgggtatcatctgtttgatcaaatcataattggggcgaaatatacgattggtattgcatttctcgttgcctcgatgagaatagcgctctctttcgttggtggtgtaatcggggggacctattttcggcgaacgttgcgaagcacatctggattcattgatgccatgcaatacataccgatttcactgctttgttattttattcttaacagcgttttaatggaaaatgggatggaagggacatttcaattttcattctttgagcgtatgatatttgaaattgttgttttaacagcaattgcgattccaaccaccacaacgttaatatcaaatgaaacgaatgccatttggggaagaggatttattgaaggagctaaaacactaggcggatctaaaggccatatcttaataaaacatattctacctcaccttggaccgcggatggtaattatatttctccaacaaatgatcaacgtgctgattctcttacttcatcttggtttattgaagttgttttttggaggcacattctttaatccagatccaattttaggagatgaatatcggtctgtgtcatctgaatggtcaggtttaatcggttctacatttcgatttcttccatatgatacgtggattccacttgttccgattttattttttgtactcgttattttcagtgtaaatctattgttagaaggttttaagcaattaactgaaaagagaatcatgccacgttcccgtcaggttattcggagtgagagttacaataagaggatcgatgcggacgcattttatttcttggaaagaactgataggggagaagaacgaaaaacagccagtaggtagtttttggtggcagtttttcgcattacttacccatctttgctatgaggataattgatatcgaacaaaaaggaaaagcacaattagcgttgtgcttttcctttattattaatttttttatttattgggaagtagagtaccactgaatcgctgtatctttttttctctttgagccttttaaataataagactcatctgcttcatcaaaataagcgattgaaggataatcactatcccctttaatggtcacttccacatgataatagttccaaatatcattgatgtcttcgttttccgtttgatacaaatgagatagcacgcctaaatactctgttgcgagatccttcatcttctgttcggacagcgtgtcagataccatgaggtcgagataaacagtggaatcgattgaaaaataagtagcatcgataatatctaaatcacgatgagcaatttcggaagcccttttcagataggcagcacttacatatggagcctcaatctggtcgagtgaaccttcttgtatttcaggtgcgtctaaagaaataccggtaacagatagggtagcgataacgaataatgaaatgcaggctacgatgcccatccactctagcatgagatttcgttttttcttattgttaccgtaatgcgcaagaaggatattttcgagcattcgttctttttttctgtttgtaaagtgttgtttttgaaataaggattcttttactttttctcttaactgtttttcctccatcttgttattcactctctttcttcgtttagtcttaattcgagaaggcgacgagcacgatgcaaccttgatttaatcgtggcctcttttgtgtcaaggagtgaactaatttctctaatggataaatcttcatggtaatagagaatgaatgtttcacgatattttaatggaagttgaaaaatggaggttcgtaaattatgtgattcttcattttttactgcaataagttcgggtgaggtagtatgatttttgatgaacttcatcatcacgtttgtcggtataatatttcgaaaagaccagcttcgcacatggtcatgacaacgattaatcgcaatgcgatagagccagttttttaacgatgcttctcctcgaaacgtatgaagttttaagaagcaggcaagaaatgcttcctgtacaatgtcttccgcttttccccagtccttcgtatatgtataagcgagtcttactaatgcttccccatacgtttccattaaatgctcaattaattctgttttttgaacagtagtatagctagtgaaatctaatttgaaatcaccttgtgagttttcgttcatacgatcatcctttaaatgacatttattataaagacgagtccgtagctgaaaagttgcgttaactgataaataatttgataacgctgtccctttttccttttttctttcgatatataggataagaaggagccgaagttatttaagaagtaatcagaactttattcagaacaagggaggaaaaaaatgattattattgatgcgggtcatggtgggaaggatccaggggctattgccgatggagtaaaagaaaaggattggaatctagaggtatccttacatcaatatgaatttttgaaaaagcttggtattccttgtaaactgactcgaaaaacggatattgatttgtctcctgataagcgctctgagttcgtacgatcttctggtgcaacggtttgtttaagcaatcattttaatgcaggcggtggaagtggagcagaagtgattcattcaaaatatgcaaccaccgcttttgctaaaagcactgctgatgcattgaaaaagataatgccagtgcggagggtattctcaagggaaggggcaaatgggaaagattattattatatgcaccgattaacgggacaggttgaaacgcttattattgaatatggttttctagactctgctgtagatcgaaagaaattaaatgttcgctcctatcgtttccaattagctgaagaagcagcacttgctgctgtgcgttacacaaaagggaatcttaccaatccggtctatttcgtccaatcgggtgcctataaggaaaagagcagggccgagcaattatgtgaagaattgaagaaaaaaggttacgatgcatttgtgaaacaagaaggttaaattgtctaagtacactaataaagagagggaggccagtggcctccctctctttatttacgataagcttactatttcgttcatgtaagctttagattaattgtttctttgcttctgtagatagatgattcgatttacttcagtaaatcaggattttcattcttagctcgcttcacctttggcttacgaatgcctcctgcgatatctgcttttttaaagtcttttgcgtattttacctcttgagcgtcgcttagagaaaatccgctttcatgaatcggttgatattgagaattcttagccatttgtaattcctccttgtaatgtctcttaatacagggttaccctcccgaatttttcattaaacatacatgcctaactttgttaaacaaatcatgtttgtggtactttattagtaaaccattacttgacggaggcattatgaataaaaagagagcattaaacattaccattgcaagcatcgttgtactagttagtatttttttaatcggaagatacacctatgtgcatgaagaacatcttgaaagaggagaagtgattaagaaagaaagtacggaccatcatttttatgtgtttgttcagccagaaggagaaggcgaggcaattgaactcctaatggaagacgaaatgtcctggaaccttgtacaggaaggtgaactttatgaagtggcttattcttggtatggctcgaaagaaccgacaattgaagagatgaaacaaatagaaagagaatgagtaaaaaaactcattctctttctattttataatgcctgtttctgcaatttttacctttacattagcttctaaagttaattctgggaactctttttcccactgttttggatgccacgcttcgtgatgataagcgtttaaatcacgtccgataccaagaaaatcacagtttgcctcctgtagctttgcgagtatggcgttcgccctttttgttaacctgattgataactcatccgcaatatcctcaacttgactttctttaaataagtggtcttgaggatactcctcaatatttcctcttacttcgagattaacgactgctttggttaaatgttgatcttgaaatgaatattcaatatcggtattcgcattccgaatattaatcgtcactgtttcggtgagaaaagtttcactttgttgctctccaatattttcgacaatacttgctttcttactttttgcattgtctaacagaagaagtagagtagcatcgaagggaggaaggttaattccagtataagtagtatggtgaaacagagcgattccatttatttctggcgttccaatatcatcattataactaatatatggaagcgcgtagtcctgaccagagtcataggaatagcgaaatgttttttcgacactcatctgtggtgcttcggttttattttcagctcctttaattaaatttgttgtaaactcagttacaagtgtttctcctacatgatctaaattgaagatgtcatccgcatcaccttctaccaccgctactctagcgtcaagcggacttttgggatcacgaaacataatatcaaatatatgatgaatattatgttttgcgacttcttctcctaagagaattaattgggtttttgatgcggttacttgttttgaaatgattctgtccattttcaaacgagtgtctctcggtgaagaaccagtaaccgtgagtactcgattggaatagactcctccctgactgactggaacacctaggttacgaacagcaaatgttgtacggatttgcttgtcgttttcataatcgaatcctgcaccataaattagtttagactcttttaaaagttcttggtcccagcaaccagtcatcaacaacagaagcattgtcattatgatttgataaagtgtttttttcattaaaactcctctttcttcttaaatagaagactaatcaacaagagaattaaaggaaaaccaaatgcaaaaaaatagcttgctttcgcatgataaccagagatcatttcaactgtatagcgatcatgagaaaacgtggaaaagattagggcaatgattgctgctgtcaaaattggccacgttgttttttttctttttgttaagcgctgtattcctcttcctgcgatgtataagtaagagacataagaagtcatcactgaaataatccagatggataggaagatcaaatcgaccctgtccacgataataaaggagacgccctttaacatataaacgagaggatctggaatcatttcaagttggttagggctaaaaaaaacaaaagttgtgaatgtcaaaaaagtatataaaattgtgacagcaatattagcaagagttaggcttttaagtgctgccttacccttgttttgaacataaggatagataaatagaacgatttcaaatcccagcatggagacaatccctttttgagtcgctttgagaattgtaccaaagccattttgaccaattggtagaatgtacctgatatctgcatctttcaacgtataagcggacattacgattagcgggaggatgaggatggatacaaattgataaaaccttcccattaccttgatcttgccaactgcaaggtaagtcccacttacggttagcaataataaaataactaacattggagtacgaaacaaaatccaagttttaatggttgtttcaaatagctctaacacaatgacggcagttgctatcgcaaaagcaatataaagaactgaaatgacgaacgctgcatacttaccaataattttaggagcaaattcgtataacgataaagagggaaaacgttcacttaaaaaatataggatgaaaataatcaattgaatggcaccaccggttattaaaagtgtgatccatccgtcagttcctgcatcagcatataaagaagatggtagtgaaagaacgccaacccctacctgcgtttgaaaaataatgaaaaagaactgtgcgttattaatcgtactagtcgttttcattctttttccaccttcttgaacgccactcctgcttacgatattgtgcatgtacttccgttggtcgctctcgaagaagccatcttggaaggcgaacaattgaatcttttagttcgttaaagcgaaatggtgctaatggcgaaaagtagggtgtaccgaacgtttctaaaccgcataagtgtatcagtatgatagctagaccgaatacgagcccaataaagccaaatgtagctgagagaagcataagtggaaacccaagtaaccggattgacatactcatttcataggatggtactgcaaaggacgaaattgctgtgagggctacaacgataatcatcatatttgagacaagatttgcttctacgatggctgttccaataactaaacctccaacgataccaatggtttgggcgataggccccggtaggcgaatggcagcttctcttagtaactcaagaataatctgcataataaatgcctcaagtaatggtggaaacggtacattttcaagtgaacttttaatgtttaaaattagttcagcaggtagcacctcagagtgaaaagaaacagtggcaatataaagagacggcaaaccgagtgcgaaaataaagctggctactctgattagtcttaggattgaaccaatataccaccggctattgtaatcttccggagattgataaaaagcaaagaaagtaacaggcatgattagggtggaaggacttccttccattaacaagccgattctgccttcaatgatatgagcagttaatcgatctggtcgttctgtacttagcatttgtggaaatggagaaagtggagaatcttcaataaattcttctacataccctggtgtttgaatagagtcggttttgatagccgtaattcttttttcaacctcttgaatcaggtttggattaacaaggtgttgcaaatatataattgctaactttgtatcggttgctttcccaactttaaaaaaccttatcacaagatttgggttctcaattcttctgcgaatcatttgtaagttttgcataatgttttcaacaaaaccttcgtgtgaaccacgaacaacttgctcattaattggttctgatacgggcctggaacttgctgaaaatgcttccagtagataaaagtgttgatgaccttctataaagaaggcgacaaaaccttttgttaatgcagtgatagcttcatttaagttcaatgaacgtcgatattccttagaagtcacagtatcttcaatgtctaatttattcttttccattaatggtttcataatggttttttgaagtttatcctcatctacgagagggtctaggtacgcaagtatgcatgcaatgttctgaatggtaatgtttctaaatttaatatcttctgtatggtaaaatttcgaattgagatattccttgttttgttcaagagaaaaaaatgcttcatgtgattccgtggcagtagggatttgataaggttcatttcgaattgattttcgtttaccacgcctcacgctataaccccctctaagtgataacagatagttatagcttgtgatgaaatggtaaagttatgtatgaaagattggaaagaagattagaatgattttgtttgcaaattaatccagttacgtagccagatttaatatagaagccgtctatacatagtggtatatagctcttcacttaacatctaaacgatttttgtttaatgcatgtacataacttgtctaattaatgtataataaaatcaacttaaatggaaaggtggttcttacgttgacgagtaaaaatatccaaaaggaaaaattagcggttgatcggtgtattaaacatctagaggtcgttaacgtggagccgaaagtaagacagctgatttcaatgtatttaacttctatttatcgagaagcctatcaggaaggttatcaggatggagagaaaaacgtacaattggagtcagaaccaagtataatcagataactagttgaatttataatgaaataggctataatgaaaataatatttgatcgtcagtgcgaaagagagtagtgtctaatgacggataaagcgatctggggatggtgaaagcctggagcctaatcagacatgaaccggactttcaagacactgttttgaacttcagtagaaacagtcgggctcgccgttatccgagtgaagttggctcaagtatttttgttgagcaatcagagtggtaccgcggaaaaaatctccgtctctattttatagagacggagatttttttgtttaagaaaaaaacgtttaatgacatgaggaggaagatgatgatgtatataaagacctttgcagacaaactcgttcaagcatttggtgggaaagtagagcgtagtgacatgatacagcgaattgaaattccgaaacatgagtcacttggtgattacgcctttccatgttttcaacttgctaagttagaaaaaatgccgccgaatcaaattgcgactaaccttgctagtaagttgaacgatcctctattcgagaaagtagaggcagttggcccttatgttaatgtgtttcttaataagaaaatcgttacgagtgatgtcattcgtcttgttctgaatcaggaaggggagtatgggagctccaatttaggtgaagacggggcggtaacgatcgatttgtcatcacctaacattgcgaaacctttttcaatgggacacttacgctccacggtgattggtaatgctttagcgttaatagttgaaaaagttggctatcgtcccattcgaattaatcatcttggagactggggtacgcagtttggaaaattaataacggcgtatcgtaagtggggtaatgagcaaaaagtccgtgaacaaacaattaaagagctacttaaattatatattttgtttcacgaagaagcggccgttgatcctttacttgaagatgaaggcagaaaggcatttaaagagttggaacaaggcgatttggaagctgtgacgctctgggagtggttccgtgaagaatctcttaaggagtttaatcgtatttatgacctcatgggcattacatttgattcgacaaacggtgaagctttttataacgataaaatgcagcgagtgattaagatgctagaagaaaagaacctattagttgaatccaacggtgccatggttgttgagcttggagaagatattcctccgtgcttaattaaaaagaaggacggagcctctctttatgccactcgagatttagcagcagcgatttatcgttatgaaacatatggctttagtgaatctctttacgtagtagggaatgaacagagccttcatttcaaacaattaattgaagttcttaaaaagttagaattcgaatgggcagagcaaatgcaccatatcaactttgggatgatgcttaaagatggaaagaaaatgtcaacgagaaaaggtaaagtcgttttgcttgaagaggtgctaagtgaggcgattgaacttgcaaaagaaaatattgaagctaaaaatcccgatttagcaaacaaaagtgctattgcagaacaaattggagttggggctgtattgtttcatgatttaaaaaatgatcgtcgaaatgacatcgacttttcccttgaagatatgctacgagttgaaggagaaactggtccatatgtacagtatacacacgctcgtgcttgttccattctacgtaaaggaaattatcaaaaagtagaaaatatcgaaatgctagaagttgaagaagcctggtcagttgtcacaaaacttcgtcagtttccgaatgcgattgaacgagcagctactgaatacgatccttctcaaatcgcaaagtttgttttagaactttctcgtgctttcaataaatactatggacaagttcgtattttagaagagaactcatgcaaacaagcaagattacagctagttatggctgtatcgattgttttgcaagagggtttgcgattacttggtcttcacgcaccagaagaaatgtaaagaagcagcccaaattaccgggctgcttccttcaattgttcatatcggtatcttcaatcattccttgcgaagccagttcttcatagtcatctaattgttcttcatatcgttcgtgacgttcattgggaacgacaccagttggtttaccgtcaatatcagcagatagaaaagtttcgatttcttcaacataaccatttagttcattcgaatcgatatacattcgatcatagttcatttgctgatcattaaaatctgaaggggtttcagatgttccgtatcttgcggttcgttgccaggagtcttcagcgtcaaaaaaattcgattcttcatcatcatttacatgctcactgaatgattgacctagcacatcttcttctgcaggtctttgatttgacgttttttgtgaggggctatgttcgacacaggttgaagcagtagggagaacggaaagcctttcgatggagatcgcatttccgcatatctcacatctaccatatttgccgttatttatacgttcaagtgcattgttaagttcggctaattcttgtttcgcatgttcatttagtgaaagatctttttctcgctcataaagttctgtagctgtatcaccagggtgattatcataatttgaaagttcccctgtggaatgttggacaaatgattgagaaattccaaactcatcattatcaaccaattcttcattgagtgctctaatacgttcttgaatcgtttttttaaatgagcggagttgacctgtcgttagcattgaaaaatctcctttcgtttatttatgtacgtagtatggactaaaagacaacgagttacttctgaaaataattccatgaggtatggatgaaataccagtaatttggaaaaagtaacgaggtagttgatgagaagctggtgatgagatgaagagaaacgtatatccacttgaagttcttctttggagtattgcctttcccggatttggacaaatcttaaataaaatgtatttaaaaggtgctttttttattgttttagagtttgttatcaatgtaaatgcaaatttaaacatgaatattctttatagttttcaagggaaatccgctcaagcaattgaagtgacaaattatgagtgggcgttgttttatccatgtgtttatctatttgccatttatgaaagctatttatgtgctttagaaaagtccggtcaagaagtaaggaaatacttgtcactcccctttgtttccggtgcttatttttctacagtgggagttatttattcaaatgtaggcggtattctttttccgcccacatttgtggctattttcggaattgtctttggcgtggggattggaagtttggtacgcactttgttaattcgctatgtgtaaaggaacaaagaaaaaagccatgaagcaaacttgcttcatggcttttgagcgatgtgttttagtgtaagatctttaatttctccgtttctaaacgctcgtctccgctttttgtagatccagttgcagtgggcaggggctcgatcgcttcaccccgtaaaatgaacacatagacagtgttctttttacgggctccagcgcttgtcgaggcttaacggaggcttccgcttttcgtgatccagctgcgcgggccaaatcctccggctgtttcgccctttcgattgggacaaaaagcgtctcattcgaaagggctccaacatcctgcggatttaaacgggcccactccgcttttcattgatccagctgcagtgggcagacactcggtcacttcaccttttcatccgaacacaaagaccgtgttcaaatgaaaaggctccagtgcctgccgtgtctaaccgcccacttccgcttttcttttaaatctcactcattctgaaatctgctgattgtagttcttcggcgtctttttcgcgttcttttcttgcccattggaagaagatgtagccgagggcgctgccgtatgataattcttggatgattttcatgatgattccgcctagctgttggtcttccataattcctagcggcttgaattggtcaaatagttcaggtgaaacggttgtaccactaggtacacagtatcccattgcattggcccatacagtcggatcggtataggttgcgtaaagtggagtagttgcaaatatgattagtgcacatgctggtgttagtagaacgccatctgcgaaaatatagccgagcttcttaacacctgatagcgtgtcatattcaggtactggacaaacgagtggccaccacattgcgaaagctgtcacaatcagagctgctttatagaaattctgagctgtgtaatggaccattaagtagtcgaatatttctggtatgtgataaaaagaaaacaatccattaaacaaaagcagtgaaataatcgggaaagtgaaaaattgaacgattttgcgaataactttaacatttagtaatggtcgaagcaaccatgctggtgtcccaacgagaataaggggtggcgcaactaaatagacaagagccatttcagtcatgtgaatacttagtaataaatgtcccattagtgataatggtccaccgagtccaatgtaaaataaggcaaccccaattaagaagaagatctttttataaaggggaaagggtgatgcgtctttaaagctatctttccagggacctgttagaagtaagtagaagccagcgataacaatcgcagctacgagaattccaggactccagagagcactaaaggaaaacgtgctcgataattgttcccacataaggaacacctccatctatgatcataatactgttccgtaaatgttgaccgttttcatcataccacatcatgtacaggcatcctatcttatgataggaaagcctttactttttcttctctttctattgtaaaaaggattgaaggggaactcaagggaggttcatgagtttctgtgaaggaatcgtgacagcctgatgttgacaattggctgatgactttcatacaatgacaacagagtgatatatgaataattgttcatataatgaaacgggggagattcgcttggataatcaagataaggatgttacaaatgaagaaatggatttagatgaagaaacgcttttcattgtttcacaaaccttcaaagctcttggtgatcccacaaggatacggatcttgaacttgctagctgatcgggaatgtgccgttagtgaaatagcagatgcgcttcatctttcacagtcgactgtgtcgcatcagcttcgctttctaaagaacttacgattagttaagtttagaagagcaggaacaagtatcttttattctcctgatgaccaacatgtaatggcattgcttcatcaagccattcatcacgcatgtcatgattgaacttatgttagaatagtacggaaacgttcaagaaaacagcgtaaaggtaagcgaatatccgatatactattggtgtgaatgataaagtgaaaggagaatggcttcgtgttatccaaaataaaacagcacaaaacggaatctgctgttattttcctagcctttgttctaccttttataacgatgattgtcattggggtattgtctatttacttatcatacagcggatagtgcctaagaaaggtggagctaatatggatatagggtcaattttagtttatatgtcaacgggacttttctttgttgtgtttggtatgtttggatttttcttatatatgttaaaacggaaagaaaaaacagttgagcaagaggagattgagaataatgagaactaaaaatattcgtctcctgattattttattggcgttaagcgcagtctggggagtagtctactgggtctgggcgtttagtaatgggtaacaagccttttcgatagatcgagaggctttttttcatgaacccgaacactatttattgtctaggaggagctatggattacattcaggaacttagagcgctcgtcgggagtcgaccacttatattaccaggtgtagcaattctgctatttgatcaatcaaaatcaaatcttcttatgcaaaaaaggacggataataaactatggggattaacaggcggatttatggagccaggagagtcgtttgaagaaacggtagctcgtgaaacgtttgaagaattgggaataaccattcagaacttaacttttgaatcggttttttctggaaagaatctttattaccaatatccgaatggggatgaggtttttagtgtaattgctgtttattctgggctatgtgcaagtgaagattttaaattagacgataaggaagtatctgaagtgaggtatttcccaatcaatgatttgccggacaacataaatccaaatcatcaaattgtgctgagccagttaggctattagttaaacgtatagtccattgacaggtctgtgggaatcggatatgcttaaatcaggttaaatgtttaaacttttaaacggataggggctttctgtgatgaataaagaaaatgatcattatgaagcgcgtcagctttttcgcaaaagtacgccgatctttcaggcccttggcgatccctacaggcaagacatcatcctgttacttagtgaacatgattgtctaagcgtgaatgagattaccgagcaatcaaccctgtcgcgtccagcgatttcacatcatctaaaaattttgcgtgaagttggccttgtttctgtcgaacagaaaggaacaacacgtttctattctcttcaacttgaagatggtgtagccatattgaaaatgctactagataaagtagaagagacttgcttttaagtcttctactttatttattaagcaatatgttcaaatgtttaaactttaagaaataaataaagggtggatttgatatgtccgaaacagcattaattacaggggcatctggaggtctaggggcagatattgccacgttattcgcaaaagatggcatacacttaattttagtggcgagaagtaaagagaagctagagttacgagcacaagaattatcaaaatatggtgtacaagttgatatatcgttagtgatctggcaaagcctggagctgctggtgaattatttgaacaagtaaaaggacttggtaagaaagtagattatttagtgaacaatgcaggtgttggtctattcggtaagttcgtagaaaccgatttgcagaaggaattagacatgctgtatttaaatattaactctctaacccatttgacgaagttagttttggaagagatgacagaacgcggtaaaggtagcatcctaaatgtagcttctacagctgcatttcaacctggtcctttaatggcagtctattatgcatcgaaagcctatgtactttctttttcagaagcgatcgaggatgagttgaaggggacagggctcaccgtatcaactttgtgccctgggcctacaagaaccgactttagtagccgtgctaaccttgggagatcaaagctttttgatggaggtacaatggattccatgtctgtcgcaaaagcaggatatgaaggagttagaaaaggaaagagtatcattattcctggtacacagaataaaattctagctaaatcaatccgttttattcctagaaaagttgtaacaggaatcgtgaggcgtatgcaacaagaaaaatagatgctatttgctttatctaatgataagcatgaacgttatggattcatgcttatgttcatgaaatgatcgcatctatcttaatcatcatatggcaactttctttattttgagataaggtagagagagaatattattccaatttggaggttaatctaatgaagaaacgcttcttattcgttacgggattaatgacactactggtcatacttgctgcttgtgggaaggatgttcccgacgaccttgattgggaagtgcaggactttacatatacggatcagacgaatagcgagtttggtttaagtgatttggatggaaaagtgtggattgctgatttgattttcacaaattgtgagacagtttgtccgcctatgacagctaatatgtcccaactccaggataagcttgcaggagcggatgtggatgtagagcttgtatctttttctgttgatccaaaacgagatacacctgaagaattaatgaagttctcggagaaatttgatgccgatttatcaaactggcacttcttaactggttacgataatgaggagattaaaagtttcgcagagagtagttttaaaacagctgtagatgcagatccaaattcagatcaatttattcatggcactgctttttatcttgtgaataaagatggcgtggtcgtgaaaaagtattctggcgtttcgaatgtcccttatgaagaaattgtcgatgacgtaaaagctctacaataagttaaagccagtccttcaagaaaaaggactggttttttcatggggaagtcaaaaactctgtaaaattgacaaaaaagaacatgatttctataataaccttggaaagcgataacaaaatgttggttattccatgactcaagcaaaggtttgaaacaccttgaagaatggaaagttcactatattagaaagattcggcatggtctcagctagagcttgccggttttttcagtgctgacagaccagagaaggagagaagatcatggcagaaaagcgtccaatcacagtagcaaccggagacggaatcggtccggaaatcatggaagcaacactaactatcttagaacaagctggggctgagattgagcctgaatttattgatgttggagaaaaagtttacctaacgggtaattcaacaggtattcctcaagaagcgtgggactcattacgtcgaacaaaagtacttttaaaagcaccaattacaacaccacagggcggtggttataaaagcctaaacgtaacgatacgtacagcgatgggattatatgcaaacgttcgcccttgcgtatcttatcatcctgtcgtggaaaacaagcatccagatatggatcttgttattgttcgtgaaaacgaagaggatctttactcaggcattgagcatcagcaaacgccagacgttgtgcaaagcttaaagctcatttcacgcccaggttctgagcgaattgttcgtcatgcttttgaatatgctcgcaaaaacaatcgtaagaaagtaacttgtcttgtaaaagataatatcatgaaattgagtgatggtctttttcatcaggtatttaaagaaattgcagcagaatatcctgatattgaagcaaatagttacattgtcgatattggaatggctcgtcttgctgattcaccagaagaatttgatgtaatcgtaactttgaatttatatggtgatattgcttctgatattgcagcacagattgcaggaagcgttggtttagcaggttctgcaaatatcggagatcaaattgcgatgtttgaagcgattcacggaagcgcgcctgatattgctggtaaaggaattgcaaatccatctggtcttcttcatggggcaattatgatgctagtacatattggacagcctgaagcagcagagaagattcataacgcctggttgaaaacaattgaggacggtgtcttaacaggcgatatcgcaaaaggaaaagacgctgtcggaacgaaagaattcgctaatgcagttgtagagcgtcttggtcagtctccttcagtgctagaacctgtcgtatatagtaaagaagtggtcgatgagccagaagaaatgactcgtccaaactatgttcctgagcgtgaacttgatggaacagacgtgtttttatttaataatacattaacggttgacgagattgctgagaagcttacgcgtgcagcatcagctagcaatcatgaatttgtgatgatgacaaatcgtggcgttaaagtatatccaaacggattttctgaaacgtttttatccgatcactggcgctgtagattccaaccagttgaaggcgagaaagaaacgcagggcgcaattcgtgagttattaacacaaattgaatccgaggaactagattggattaagattgagaatttataccgctttgatgggaagattgcctattcattagcacaaggacaataaggaacgaaagcgtgccaaatcggcacgcttttttattttactgcacattttttaggaattggataaattaaactcaattgcaaaaactacatggagaaaccgtgaatgtgtggtgaataaaatgtttcgatggttgaaaaaaagtcgttctccagaaaagttaaaaaacctacctgagcttattcgaaatctccaggactcaggagattttctacattatgaaagcaagcaacaggatagttcattttttatttactacttcaaaacgcttgttcacgaaacggaattaaatgatcatatccttccatacctagtagaaaaaccgttaaagacattgcaggatatacgagaaagagtgccgattccaggggttattatttcgagcgatctgaaagagatctgtgagaaagtgatgcgaggccacgtcattattcgattaaatgcaaatgcaacagaatgtgcccttattccatcacaagttaaaaaagcaagggctgttacacaaccagaagtggaattcacagtggtcggctcaaaagaagcatttgttgaatcacttgatacgaacttgcacttaattagaaagcgcctgcctgttcatgaattaaaagcctacgaagtaacggttggcaagctgacaaacacaaaagttgtcgttctttaccttgatggtattgcgaacgaagagaacgttaataccgttaaacaaagacttgaagatataaaggtcgaccaaattgtggataactctgtcattatgcagttaattaccgatgataaaaactctccttttccgcaactgattgatacggaaaggccagatcgggcaacatctgttttatgtgaagggaaggttgttgtcctatcggatggttcaccacaggcattgatcggtccaacaacccttgtcgagtttttctctgcatttgaagactattttgttaactggatcgttgcatcaagtgctcgtttgattcgtatttttgctattttgttctccatacttgttacgcctatttatgtagcgacgttaacctatcactatgaattaattccaaaagatttactcggtacgttagttagttcaagacagcgcattccgcttccaccaatactagaagcgatctttctagaattatcaattgaactattaagagaagctggagccaggttacctacaaaagttggacaaaccattggtattgtaggaggtattgtgatcgggacagcatcggttgaagctgggttaacgagtaacgtattgctgattattgtagcgctgtcagcactggcttcatttacaaccccagtgtatcgaatgagtaatacgattcgtttaacacgctttccgtttcttcttttcgctcatctgtgggggcttcttggggtaacgatttgcttttgtttcttaatcgctcacctacttaagctcaaatccttaggaagaccttttcttgagccaatctatccgctacgtgttcaggatttaaaagatgcgattatcagattaccgttaaaattccagaataagcgtcctattcatttacaatcagaagataccgtgcgatttaaacctgtcactgagaaagagaaaaatgattttcatgaataaggtgagaaaggagatgcttctatatggcaggaccagaagtgaacgatcaatataaggtatctccatttctcgtcttttatctcgtccattctgtccaggtaggcgtgggggtaatgggatttcaacgaattagcacccaatatgcaggcaacgatgcctggatttctgtattggctgccgggtttagcttaaaccttattatttttctgatttataagattatgatgaaagaaaagggtgacctcatctccttacaccataaccttttcggaaaatggattggaggattactaagcttaattgccattgcttatttcattgcaatgggtataacggttctacgaacgtatattgaagtagttcaagtttggatgttcccagatttaaataagtggatttttggaacagtgtttttactcctcgtttactattgtttatctggaggttttcgagtggtagctgggatctccttttttggtgtggtcattcctttttacctagttcttaccatgatatttcctttgttttatgggcattttcgtgatctacttccaatcttcaatcactccttaatggagatgtatgagggagtaaaaggagcgtctctttcatatttaggttttacaactctttttatgtatttgccgtttatcaaagagccagaaaaatcccatcgctgggcgcaaggtggtcatttattgactgtttttatttatacggctgtcatgatcacgacaatcgcgttctttagtcctgaacaactccaaaaaacgatctgggcaacattaacgacttggaaaattgctgaaatgccttttgtacagagatttgaatatatcggaattgcttcatgggcacttgtgatcttaccgaatctttgcattaccatatgggctgctggtagagggattagaaggttgtcaagagttagtcagcaaaacgtaaccattccaatactagtcctgatcttaattagtagcagtttgtttgctcgacgagaaagtatcgaccttttgaaccaatatacaagtaagatcggtttctattttgtctatatttatgttccatttatatttgtctttcagtacatcaaaagtaaggtgggaagatcgggatgactcgactgttcattttcatcgtgagtatcttactcctaacaggatgtgttcaaaaaagtatcctggatgatattcaaatggttacgattattggctatgatcttcctgaaaaagaaagcgaggaaggtcttatcaaagggattgcagtagcccctcaatatcaagctgatggaaaaattgataatagtgtttttgttcaaacagcagcacttagtaaagaaatacgaagtcaatacaactcagaatccccaaaaccatttgttagtggtaaactggaagtcgcgctttttagtaaagacattgcggagacagaaggcataatcgaattagtagatacgcttcaaagagatccttcgataggatcgagagtttttttaggtatttcaagtagtgatatggaaacgttactaaggacaaactatggcaatgtagacacaggtgcatttattcatgataccctggcccacaatagcaagcacggaatgctcccagaaacaaaccttcatgattttttatataattattattctgaaggatatgatcctttcctccctctagttgaacttgatgaagataaagtgaaaatcattgggcttgctctatttcaaggagatcgaatggttggttcaattgatgccaaacatctttttacgtttaaagttcttcatcagaaattttcgagtaatgattcttttactgtcaaaatgagtgaagaagaacatgctgctatatataatattgcttcaaagcgaaaccttaacttaaagaaagtggggagtaataaaattgaaattcatgggaaagttcttggtgttattaaagaatattccggtcagaagcttacgcctgctaagttaaaagaaattgaagtggcgatggaagaagatattgaaaaaaggggaatggaaatgattgaagaatttcaaacccaaaatattgatccacttggacttggtaatgctgtaagaagtgtaacgagaggcgattttaataaggaggattggagacagcgatatcctgacatggatattacatttcaaatgaacgtaacggttactgaatctggagtgattgaataaatcaaaaaccctgtccgtaccattgttaaatacgttacagggttttctgtgtcactgtatttcaatctttttcttaactactgacgtcaaggaaacaagctcattcactacgattgtaaggcgttcctgtgcttttgtttcaaccataaagcctttctcatcaaagcatgttgggtctgcacaaaattgatctggaaggacgagggcataaagacctctcataacggttctcatattattaagagcattaatgccaccttttccaccgccgccaacagacgctaaagcggtaggcttagatttgaaatgagaacctcctaagaaatcaagggcgttttttaatgctccactcatcccgttatggtactcaggtgaacagatgacaaacgcatctgcttttgtagcattgttgatgagtcgctggacttctggatgatccagatcttcttttctccctttaaataacggaaggtcatggaagccagcatcgaatgtaaggacctcaatccctttctcatccaactgatcagtcacagtgtttgttaaatttcgtgtcatagacttgtctctaggactgccgtttataaccattactttcattgtgaagctcctttctactacctctatattcttttcatacctcaattgtgagtaaatcaatctcctattagcgtattaaaaatctgtgaaacttgcatccgaaataaggagggggaattctcgtactttagtcttaggaatcttcaaaccagttgaattttgttgcatagagagcagcttgagtccggtcgtggaaattgagttttgatagtatgctactcacatgtgttttaacggttttttctgtgatatataaagctgatgcgatttctttattgctttttcctaacgtgatttctcttaatacatcactttccctcggggtaagcatggagagttttcgctcttcttctgccgggtttttctcagtcaggtgtgacataagctgatttgtagcaagagggtggaggtggcgattaccgcgattggcttcacgaatcgtgtgaattaattcatcaggatcaatatcttttaattgatagccttctgcgccagcccttatggctggaagaacatgatcttgatctgaaaagctcgttaagataatgattttaatatgaggaagacttttttttaattgttttgttgcttcgatgccatccatttctggcataactaaatccattaaaatgacatcaggatttaattccttcgctagtctgactgcgtccgttccgtttgctgcttcaccgataatctcaatatcctgctgtgtttcaagaaaaaagcgcaatccttttcttaccataagatgatcatcagctagtagtagttttatttttctttccatattaatccctctttcatattggcagtctaacttgaacttttgttccattctttcgtttactaacaatcgaaaagatacctccaagtagtgaggctctctccttcattcctctaagcccaagtgtgaaatctccaaccgcttctagattaaaaccactaccattatcaagaatcataagacaggcctcttgttcagtaatttgaaggtggagggtaacctcacttactcctgcatgcttatgtatgttgttaagtgattcctgaccgattcgaaaaagcgcttcttcaattggtcgaggaagaagtttaaagcccgagacgtcacaagtgggagatagacctaatccattcgcgtatgttttaagtgatgtcatgaggccggcctcaatccctacaggtcgaagttgccaaattaatgttctcatttcttgcatggcttcttgagaaagctgttgaatatcttgtaatgcatcacatagtacattaggaacgttaagaatatttcgtgcaccacgtgctgtcatagataatgaaaaaagtttttggctgactgaatcatgtaaatctcttgcaagtctatttcgttcttctgagaggataagctcctgtcttttctcattaacacgtgattgctcaatggccagagccatatggtcggcaactgctcgtaagatttccctatcacttttagagaaggattcctgaagcgcaaataatataccaatatgctcgtctcgaaccttcacttctcttgcatgaatgaaagaaggttttgggtgaaggggaaaagcgttatttttgagcgcaactggttttccgttttgaacagcctcgtttatttcgtgcatcgcttctgctgaataagcttcgttcacaacgcttagttctccatctttatagattgaatggagaacatcattcggtgtgcttttcaaaaagtagccgactagagaccagttgaatgactctcctgttcggtgcacaatggcactgatgagatcatcagcacattcgtggcgccacaattctctcgttaatgattctaatcttaaatagttttcagctcgcttctgttcatcttgatagagttgaattcgtttaatggcagtaccaatttgaaaagcaacggactcaagaagcgtcaattcatcgttagaaaacgactctttacctggtgaaccaacatttaatattccaaatgattctccggcagctgttaatgggacggtcgcatggtgcgtcagtccttccgtatcacccgttttaaaatgcaccgcatcttctagacgtttacattctataatattgacagcctgatttaatcgtccgtcccaatatttatttaagcaccaacacgtacctttgcacatcggttctttatccttttgagcaagagcagcgggtagactgacatcagcttcacacgtaaatttgtttttaccagttgataagaagatccaaccggtgtttaatccggtaacactcaataaatcttcaagaacagcttgaagcatagacttcaaatctgttgaacgatttaatgtttctgcgatcgtttttaacgtgtataattctcgttcatggcgttgatcacccatcgctattcccccaatattcaaacaattgacaacgtttattatactatagacgaggttattctctaaagagtggtatttacaagagagactgttagcgtcatgatcatgttagagaatggggggggaagagtatgaaaattaaagaaaaagctacagaactttcttcagttcaactgattgttcttttctatttattggctgttgtactgtcgacagttctcttaagtctcccaattgcccaccaagcaaatgttgactggagctttatcgatgccttgtttacagcggtaagtgccattagcgtgacgggactgacggttgtttcaaccgctgatacgttcagtacggcaggaacttacatactcgcgtttgttcttcaattcggtgggattggcattatgactcttggaacttttgtttggttgttaatgggtaaaaaaattggaatgaaagaacgccaattgattagtacagaccagaatcgtggcacattggctggactagtgaaattaatgagacaaatccttgggctcattctcttatttgaagcgattggaactgtaattcttggtatctacttattaaagtattatgattcgtggcaagaatcatttctgcaaggtttttttgctgcggtaagtgctaccaccaatgcaggatttgatattactggaagttcacttgtgccatacgcaaatgattattttgttcaaacgatcaacatgatcttacttattttaggtgcgatcggattcccggttctaattgaattgaaagattatttatttcaaaagaaagaaacagtagcttatcgatttactttgtttaccaaggttacaaccgtgacattctttgcacttattttaataggaactgtactcatatggattttagaagccggaaattttatggcggataaatcatgggatcaagcactattctattccctgtttcaatccgttacaacgagaaatggcgggcttgctacgatggatgtaagtgaatttactctctcaactcagatggtattaagtttgctcatgtttatcggagcatctcctagtagtgttggaggaggaattcgaacaactacgtttgctgttgctgttttaacagtcattcattttgcaagaggcaggaagagtgtcaaagtttttggaagagagcttcttcatgatgatattattaaatcgtttatcgtgatttttacggccacaggtctttgtggtctagcagtcgttattctttcagcaacagaaccattttcgttggctgagattgtgtttgaagtaacctcagcttttggaacgactggtttatcacttggcattacttctgagctcagcactgctggaaaatgtgtgattatctttctaatgtttgtaggaagaatcggcattatttcctttttgctaatgatgcgtgggaaggcttctgtcgaacattatcactatcctaaagaaccaattattaccggttaataagacttgtgtaacaaatgtatcgataggaatacgttttcattagagctgttattttcttctaggcaggggtatatgtatactacttctaattcctaaggaggaaggtatcatgtattcaaaaatagtagtcgcttatgatcgttctgaagatagtgaaaaagctttacatcaagcggttaaattagcagagctaagcaaagcttctattcatttagtgcatgtagcaaaagaatcaaataaactctcggctcaaccagcgacaagaataccctatgggacaggtagtattggcaatgaaggacatgctggtgttccatctccggttcctgaggagcagaacggcgtgatgattgaaagaagcgaaggagaggccatacttcgtgaagtaaaggaaacgcttcaccatatgggagtgaatgttcactctgaggtaagaggtggtgatcccgcaaaagagattgtggacctagctgtaatgatagaggcagatttaattgtaatagggagtagaggattaagcgggataaaaaaatggatgcttggaagtgttagtgaaaaagttgcccaacagtccccctgtccagtattaatcgtaaaataggaatttctggcctgggaaaccgggcttttttttatgaaaaaatgttaaatataaataactaaaagttatgtttacttaacattatgtttggtatagaatagatttataagagaagagatatgtgaggagtcaagatgatgttgaacaatcgaattagagaattaagggcacgttttcgcttcacacaacaggagctggcttcaaaagttggggtgacaagacaaacgattgcagctgtggaaaagggagagtatgtcccatctttactgctagcaatgaagatttgtcgtgaatttgacctgtctatggaagaagtatttcaattacaggaggaatcagaatgaagttatctgtgatttacatgatcaatgtcattgtgcttggactttttggatgggcaatggttacgtacttcgatgcagcgtctcaattccaacgtttaatgagtggaagtggagatgatgtcatcattaatattacgcctattttcattactctcctgattgttagcatcatcggattcatgattactcgtaataagagaagaaataacaaaggatggaaagaagcccttctgcttccttccgaactgtgtgaagatgatgaacgggaaaaaacattaacagctcacgcttgtcgaaatgcatatattgctatgatgtttacttcaccacttttaattgcagccatgaccttgcaacctgtagtgtcaaagcaattcccggcttatcccattcttgtcttactattcttaccatttgttcaaattagcgtgttctatttttctcttcgtagaaagttgagatgatcggttaccagcaaagcttcacagttagctcactacaactatcttcgtttccggtgttaagatcgacacgaatggcatctggcgtataggcaatgtggaagggagaagtgacaccggcacgctgaatcaaggaatgaacatgagactgatcatttttttgggcggcatcttttaattcatgagcaaattgagcatcctgattcactttatctagaagtttttgtccttccttcataagtttcgtacacgctacagctgaatgctggaaacgggtaacttcaataggaggaaagttgcggtaataaggataagtatagggagaataaggccaactgctatatccatcgtttttaaatgccattatcgtcctcctgcatacgtcatactgttactttatggcgttccttaaaaaggtgtgcgtctactctgaatttgtgaaatctgtttcgaacaggttacaataattcagaagacgttttgagaaggagcatgatgttttgaagaaatatattatttttacgattagccttgtttgtctttatttcatcttaaacttaattattggttcgattgtgaatgcagtctttcaacaagagtggttaactgcttggagtaaggggcaggaattaactcgtacagtgacattcggtcttttatataatcctattgatcttataagtttggtgttatcatttgtcatcagtgcggtcatcacatcaaaaatcaagtacacctaaatcgtgccaaggcacgattttttgtttttataaaggtagaatgtatgataagccataattgtaaactagcaaggagaatccatgatgataataaagcaaataacgaaggcatttccttatgcacttctacttgaagctgatccatttctcgctcatatcgaacattatttgaaagaaggatactgttacgttgcagtggaagagaaggaagtgattggcgtctatgttttagtaataaaagaggagaaaaaagttgagattatgaatattgctgtgagggaagatagaaggggagaggggataggaaaggtcctcattcatgatgcaattcataggtctgcggatcatggagcaaggaaggttttgatcgggactgggaattcaagtctcgatcaattagcgctctaccaaaaatgtcaatttcgtataacagaaattattgaaggattttttgatcactaccctgaaccgattattgaaaacggaattccttgtcgggatatgattcgactatgttacgaaatagagtaagcaagatccatcttctgatatgaggaaatagaacttttgataagatcgctagtggaagaccgtctgagaagatggtctttttttgctgaaactaagatgaatgcagataaatgatagcctgttaaaagaacagtgtgctttcaatgttacaatggttaatagaagagataaaggagtggctaacgtgaaacccggtgagcttactaagaagtgcagtatgttagagacaataattgataacgcttacgaatggcttgtcgttgtagataaggaaggcattattgatttcatgaacaaaacatattgtgaatttctagacgtagatagctcttgtgtcattggcatgcacgtaacggatgtaattgaaaatacacgcatgcacatcgttgcaaagagcggaaagattgaactggcagatttgcagtatattcgtgggaattatatgattgcaaaccgcgttcccctttattatcaaaacgaattaatcggggcagtaggtacagttatttttcgagatactgagcaatggaagcaaatgaatacacatatcaaggtgttgctttctgaactcgaatattaccgaagtggttcttccaaggagaatggtgctagttattctttaaatgatattgttggagtttcagattcaattcaaagattaaaagaaaaggtgaagcaggttgcaagtggaaatgtatctgttctaatacgtggtgaaagtggcactggaaaggaattatttgctcatagcattcatcaattaagtgagcgaagtaatcgtccatttattaaagtgaattgtggtgcaatacccgaccaactacttgagtcagaactttttggctatgaagaaggtgcttttactggagcaaaaaaaggtgggaaaccaggtaaatttgagcttgcaaatactgggacgatctttcttgacgaaatcggggacatgcccgctaacatgcaggtaaagctattacgtgtccttcaggatcgagaggtagaacgagtaggtggagtttcatcgaagaaggtggatgtacgagtcatagcagctacaaatcgacctttagaagccatggtggaagaacggcgttttcgtgaagatttgttttatcgtattaatgtcatgcaattgtacattcctccgttaagagaacgaattcaagatgtaaaacctctagcagattcgtttgttaaaaaaatttctataaaagcggggaagcgtgttgatcatatcgaggaggcagcggttcaattactatgggaacataattggcccggaaatgcgcgtgagctagaaaatgcaattgaagcagctgttcatttaacgcgtaaagaaacgatagatcctctatccctgccagattacttgaaagataatgagggaattaaagcggggaatcgtaacttaaaagacatactagaagaagcagagtcagaagcgatccgtaaaaccctcattcaatgcgagaatgataaaatcactgcggctgaaatacttggtatagggaaaacaagcttatatgacaagataaagaagtataatctttaaatgaattccagaaagtcggaatctgttccggatttctggaatttcttttatttctagaaattgatgatgctttgccgattaaataaaggctaatattccgctttttccgcaaaaacggaatgtaggaaaagggaataaatcacacaactattgaatacgcttacaattttgtgaacaatcaaactatggcatgattcttgcaattagttatgaagaagacaaaaaggagttgtgatgatgaagaaacattatatgagtggttatgatgcagtaagcgatattgctgatgggtcaactttaatggttggaggctttgggttagtagggattcctgagcaaatgattttagggttagtagaatgagaagttaaaaacctgacgattatctcaaacaactgtggtgtagatgattttgggcttggtcttctactaaaaaaccaccaaattaaaaagatgattggatcctacgtgggagaaaacaaagagtttgaaaggcaagtgctgtcgggtgaacttgaagttgagttaattccacagggaacactcgctgaaagaattcgagctggcggtgctggtattcccgctttttatacaccagcaggggttggtactaaggtagctgaagggaaagaaacacgagtgtttcacggaaaagaatacgttttagagcatgtcttatatgcagactacagtctgattagagcttatcaggcggatgaggcagggaatcttgtttataacaagacagcgcgtaattttaatccaatgatcgcagctgcaggaaaaatcactttagctgaagttgagaacatagtagctacaggtgaactgaatgcagatcaggttcatacgccaggaatttatgttcatggccttcttgaagcaaagcaggagaaacgagtcgaacgaaaaaccattcgtaacggataggagagataaggatgaagtcaacaaaaagtaatgtacgagaacgaattgctagaagagcggaaaaagaaattaaaaacggttattatgtgaatcttggcatcgggatacccacacttgtggctaactacatatcagatgataaagtgattgtgcttcaatctgaaaacggtcttcttggtattggggcatatccacaagagaatgaagtggacccggatcttattaatgctggaaaagagaccgtaacagaaatgcttggcgcttcttattttgatagtgcagaatcgttcgggatgattcgaggcggtcacattgatctcgcgatactcggaggaatggaagtatctgaagaaggtgatcttgcaaattggatgataccgggaaaaatgattaaagggatgggcggggcgatggatcttgttcatggagcaaaaaaaatcacggtcatcatggaccatgtaaacaaagacggtgctcctaaaatcgtgaagaactgtgcgcttccattgacagggaaaagcgtcgtcaatcgcattattacagatcgtgcggtactagatgtaacagttaatgggttagtggtgcaagaaattgcatcgggctacaccctggaagatattaaacaatcgacagagcctgtcatcaaagtatcaccaacaatgaaatatgatgtgtattaataaggagggctaacgatgttaagtatgatcggtttaattggtgggttactacttctcatttaccttacgatgaaaggaatgaatctgctagttgcgggacctctctgtgcgatcgttgttgcagttctgagtggattgccgcttttcccgcagcttgtggaagaaggagctccaaattttgttggaaattacatgggtggattctcagggttcgttgcttcgtggtttcctatgtttttacttggagcaatctttggaaaagtcatggaagatagcggtgcggcggatagcgtctctaagtgggtggtatcaaagcttggattaaaacaggctgtgctcgccattgtccttgcttgtgcgatcttaacatatggtggtgttagtctattcgtcgttgcgttctctgtttatccaatggcagttagtttatttaaacaggcagatttaccacgtcggtttataccggcgacacttgcatttggttcagttaccttcacaatgacatctgcaggatcaccagaaattcaaaactggattccgatcgagtatttaaatacgagtccttatgcagggtgggaagttagtttagtagttgcattatttatggcgctttttggatactggtggctaaaacgtatgatttcaaaagccgtggccaaaggagaacgatttgaagcgaggaaggaagatcctgaagtagagaatcgtccacttccgaatccattacttggacttgtaccacttgttatcgtattaataatctccttcattttccacgatagtttgaagcagtcagcgctaatcattgctttactcggtggaattgtagctacattcttattaaatcgcaagtactttgaaaactttggacgtgccgtttctgatggtacgcttggagcattaattgcaatcggaaatacagcggctgtagttggttttggtggtgtagcaaaggctgttccggcatttgaaacggcagtggatttcatgacgggtattccaggaagtcctcttattgggggagctattgcagttagtgtgattgctggattaacaggatcagcatctggtggtcaagttatcgctctaccaatccttgctcctcactatattgatgctggtgtaaatccagaagcgcttcatcgtacaattgcgatctcttctggtgcacttgattcattgcctcataatggctatgttgtgacaacgattcgggcaatatgtggtgaatcccaccaggatgcatacggtgcagtaggagcgcttacggtcatcgtcccacttataggacttgcccttgctattctattattcagtctcggacttggaatttagtattataaaggagggagttttttgttagtaaataagaaggtagtcgtaattactggggcagcgagcgggatcggcaaggaactagcacgagtgtttgcagagaacggtgcaaaggttatccttagtgatttggatgaggataaggtaaaaagggcggcagctgaattaaaagaaaacggtatggatacgattggaattcgctgtgatgtaacgaaagaaaacgaagtagaggcattattttatcaaacgctaaaaaagtttgatcggatggatgttttgattaataatgcaggtcttcaacatgtttcaactattgaaacattcccaacggagaagtttgaactgttaacgaaagtaatgcttgttgctccgtttattgcaactaaactagcctttcccattatgaagaaacagaagtgtggccgaattattaacatgtcttctattaatggacttgtgggcttctcaggaaaagccgcttacaatagtgcaaagcatggtgtgattggtcttacaaaagtagctgcgcttgaaggagctgaagatggtatcacagtaaatgctgtttgcccagggtatgtcgatactccgttagtaaggggtcagcttgaggacttagctaaaagtcgagaagtagcattagagagagtacttgaagaagtgatctatccgctcgttccacaaaagcgtttgctaacagtgcaggaaattgcagattacacgatgtttctagcaagcgataaggcaaaaggaattacaggtcaggctgttgtcattgatggaggatacacggcacagtaattgactttttcagtgaagaaaagctaaatttcctcactttaaaatacttgtaaacgctttccttttgtttgtaaaatagagaagaatggagggggaaacatgaaagacgtttttatattggaaggtgcaagaacgccatttggatcatttggtggttcactcaaggatattagtccaacagccttagggatttcagcaagtaaagaggctctaagaaaaagtgggatagaggctagagaaattgatctttctgttattgggaatgtgattcattctacatccaatgcttcttatttagctcgtcacattgctcttggggctggaatacctattgaaagtccggcactaacagtgaatcgactttgtggctctggcatgcaagctgtcatatcagcagtgcaatccattatgatgggagacggtcacacagcccttgccggcggagcggagaatatgagcttatctccttatacgttaagaggaagtcgttttggagcaaaaatgggtgctccgaaaatggatgatatgcttttggctacgttaactgatgagtatacaggaactggaatggggataacgggagagaatcttgcagtaaagtatgggatttctagagaagatcaggatgagtatgcaacccaaagtcagcaaaaagctgctgatgcaagagagaaaggtattttcatagaagaaattgtacctcttgaagtaaaggggagaaaggggattgtaaccttttcaactgacgaacatattcgagaaggtacaacagcagaaaagctagccgggcttaaacctgctttcaaaaaagatggaactgtcactggtgggaatgcaagtggcataaatgatggagccgcttctgtcgtattaggaggagcagattatgtctcttcaaagaatcttaagccacttgctcgaattgtctcctggggaatagcgggagtagatccttcgattatgggaattggaccagtgcctgctatacggcaagcattagataaagcaggtatgacacttcagcagatggacttgattgaagtgaatgaagcctttgctgctcaatatctagccgttgaaaaagaattagagcttgatcgctcacgagtgaatgtgaacggcggtgcaattgctttagggcatccagtaggtgcgagtggcacgcgcattctttatacacttataaaagaattaaagcgtagaaatggaaagtatggtgttgcctcactctgcattggtggcggacaaggaattgctatggtggttgaaatcaattaatttgtcagaaaagattgccaattaaataaatattgcgtatactaatggtactaacatacggaaaggggttgtgcatgatggtaaataacaaaaagaattcattgttaattgcatattgtgcacagtccaattggtaaggtaggagccttttcttacttctgattaataagatcaaaaccatgggctgtgcgactgtgtcgctatgtctatggtttttttatgctcgatcagctaatcacatacgctgattgtatgataaaagccgacatcactgtacggctttttgtcatatttacacttattaatcaggaggcttttaagtgaatcgaataaaattaggatggaattcatactttgaagaaaattatcaagctatagcaaatggacttataccagctcgagttatagtggaacatcgtggaggttataacgtctctacaggagaaagttcttatgcagcagaactttcaggtaagttccgatttgaagtaacacagcgtgatgctttgccagcggtcggagactgggtacttattgctcctaaaacggataacaaagcgattattcaccatttgctacctaggaaaagtaagttctcaagaaaaattgcagggacgacaactgaggaacaaattattgtagctaatgttgatacggtttttcttgtcaatgcattaaatcaggactttaacccaagtcgtattgaaagataccttgtcatgtcgtgggaaagcggtgcaaatccggttattgtactcagtaaagccgatctttgtactgatgttgaagagaaagtaagtgctctttctagtattgctgtaggagtaccgatccacgtagtgagttcagcgacagataaagggattgataaattaacagcgtatttaacagagggaacaacaacagcattgttaggctcatcaggtgctggtaagtctacgctcataaacaagttatacggccaagaaattcagggtgtacaaaatattcgcgaagatgacggtaaaggaaagcacaccacaactagtcgagaactgattacgcttcacacaggtggcgtactaattgatacacctggtatgagagaacttcagctctgggaaacagatcaactttctcaaggcttccctgatattgatgcatttgcacagcaatgtcactttagagattgccaacatgatggtgaaccaaaatgtgctgtaagaaatgctatagaggaagggttgttggaagaaagaaggtttgagaactataaaaagttccaccgtgagctagcttttcttgagcgacaaacgaacaaaaaagctcagctggatgaaaagaagaaatggaaaaagttagcaggagatcgtacaagaaagcatcgctaagctctttaatttggaaggagacgatcagatgacggataagcgctctgtgttaaacgattatgcatcgctaattaattggttagaatcgattgctatggagatgaccgaaaccatcttttttcagcctattaaacaagacaagtggtctccggctgaaatcctttcacatatcatggtgtgggacaattaccttcttaaagaaagaattccctttattgaaaatggagtcaatttacctagacttgataatgttgaagaagttaatcagcgtgcagcagagtatgcgagatctggtctatcaaaagaaaaattaattgctgaaaccgtacaagcgagaagacaagtagtggagcatcttcagttagttgagccgattgagtggatgagcacattttatatcgataggtatccaatctgtcttacaagttatattaaaggtcttattgagcacgatgatcaccataagttgcaagtagaagtttttatgaacgagcaaggattttccctgtcccactttactttatagctaaactttctcacctctccgacttctaaatcagcggataagaaagagaggctggggttaggctataaggtggaggtgagaagaatggcaaaacataaagcgaaccctacaaccaatggcctggcttcatcccaaccagaaggacagggaacaggagtagaagtaggaataacgtacgactctaaacgaaaaaagaaaaagaaataacaatgaagcgctgctatgagcagcgctttttagattgttttagctgtttttgttccattttagatcgttcattattaccattcattagtacatttctgcaaactgcctgatgtgtaaagtgtttagtacactaacgagacggcttgtggcttcaaagaggctgtcctttgatacagttgtaagaggtaatttgatccttacagcatcttcataaagtgaaggagacagcaatacatgagcttctagaagcgtatcactcaattcctgaaggtttaatgctggtttaaaatcaaaccagattgaagtagagtccgctatttctaaaattgttatttggtcttttaatgcatctaatttattaagtacttgttttttccttgcacgtaattcctctttcacctcttcaatatgctcatgaatttcaactgaatataaaatgttatgaacaatttcaagaaaaacgggtggaggtgtcatgctaagttgaatttgaacctccgataaacgctttatgacatgctccggtcctaaaatccaccccatacttaaaccgggggaaataccagtaatgtgtccaacttgtacaacgagtttttgaacggtaccaagttcataatatgaacaggcatcattatcataagaccctgtaagcaaagacgtttccactatttcaagtataggaataccgattttttcacactgtgttaataatttttttctttgttggattgttgatgattgtcttaagggaaaattatgctccatcattgaatttgcaatgattagtttgattccttctctttggaaatgatggtttgttaaaggacgatcagttgaatagcgaatgacgtgaatgccagaagctagaaaaagatttaatttggaagagtttattggttcttcgactgcaatcacgtctccaggatttagaaagcatttcactgataaaagtatcgcttgttcaagactagatgtcagaatgatgttttcagtagatactgattgattaataaagcggttgatcatatgtttcgtttgaaacatagttggagaaaaatgttctttactagttgtataggcagttaaatcataggcattttgcgcaaggcataaatctggtgcaatctctcctgcgttcaggttaatgaacgaggaatcattcatatagttagaagaatggttaaatagtgacgtatcttcggataaatgctgatttcgaagtttattccacgttgtagaatgactgggaatgaaatctgctgcatctgcactgactcgtgtcccgcttccttgccttgacgtaatgagtccgctagctctcaattcagcgtaagcagttgtaacagtgcttcgattgacacctagttggacggctagatcgcgttcagcaggaagaggattccccgtttggagagagccatttataatggaatcctcatagtaatcaacgatttgtttgtacaacggtttgctgctctctggattgagtataaatctcgccattgtccaccacctcactactattatagagaaaaatagaggtaattgtataaaattttcaaaaaaattagagggagaaattctcgataaacacaggttttaagccatttgacggatatttttgtagaaaaagacaaattggatggtatacttttggctaaattggatggttacagaaagttttttgaaatttaaaataagtttaatcattcagttaattgttaatattcaaacgatgatcgataatggtttacataagttgagtgatatgacctccctgttatagatctcgcaatggtttcccaatcgaataacttcgtttgaatttataacacgaaggtctacgtaaagctagaccttaactgaatggtacaaacaaatagggggtaacacaatgaagaaaaagttttcgcttttgctttcggtcatcttgttgttaagccttttccttgcagcgtgttccggtaattcgaacacttcaagcaacacaaacagtgaaggagaagcgacaagcggagatagcgatagctcagaaggatcagcggaacaggttctaaacttaacagatacacaggatatcccgactatggactcaacacaggcaacagatactgttgcatttaatgcaatgaaccaggtatttgaaggtctttatcgtcttgataaagataacaagcctgttctaggtatggcagcagaagagccagaagttgaagaaaaagacggcgaaactgtttatacatttaaaattcgtgaagatgcgaattggtctgatggcacaccagtgaaagcagacgatttcgtatatgcatggcacaaaattattcacccagatacaatgggcggatatgcatcaatgatgggtgctgcaggtattaaaaatggtaatgaaattattactgaaggcgacccactatacggtaaagtagaagaacttggtgtgaaagcagtagatgagaaaacacttgaagttgtggttacacaacaagttccttatttctttgacctactaacattcgcatcattctatccacaaccttcggaatttgctgaagagcaaggggagaactattcacttgaagcagatacaatgctttataacggtccatttacgctagctgaatggaatcacggtgaaggttggaagcttgctaaaaatgatggttactgggatgcagatacagtacaattgcaagaagcaaattacaaaattgtaaaagacgaagcaactcgtgttaatctttatgagactggaagcattgatcgtgctggtcttagtgcagatttcgttgatcagtttaaagatcgcgaagactttacgacaatccttgatacaacaatttatttccttcgtttgaatcagaagaacgaagcacttgcgaacaatgatatccgtaaagctctattcttatcctatgaccgcgatggtctagtaaatgtactactaaacaacggttcagtagcagctcgttaccttgttccaaaagagttcctatatcttaacgacgaagatttccgtgctccggctccagacggctatcttgcagatcaaactgcagatgatgctgctgaatactggaagaagggtctagaagctcttggtacagatactgttgagctggaattccttacaacagatagtgaccttgcttctaaaatcgcagagtacgcgaaagatcagtttgaatctaagttagacggacttacaattacaattaacaaacagccttggaagcagttcctagatcttgaggacgctggggactttgatatctcaactggtggttggggaccagactatccagatccaatgacttacgtgtacatgtttgaaacagatggcgcatacaaccgtatggattactctaacgaagagtatgacaagcttgttacagatgcaaaaactgaaactgacgagcagaaacgctgggaaatgatgcaagaagcagagcgtattctaatcgaagaagatactgcgatcctacctacttatcagggtggcggagcgattatcatgaaagattacgtgaagaactaccatatccacaagtttggtgccgattcttctcttaaatgggtaacaatcgaaaagtaaaagcttcactagaaaagcgcgagccattaggcttgcgcttttcttaaggttgttgtgctgtctaaccaatctggaagctttcgttgatgagcgagctgttcataggcatatgcgagcttaattagttgcggttcgctgaacggcttaccagtgaacgtaatcccaagaggttttttatttgaagtaaagccagcagggacggttatagacggatagcctgcttttgcaggaagtgttgagccgtaagctcctacaaatagcaacgcatctagtttctcggtttgcatgagtttgtctaaaccattttcttttgcgttagataaatcctggaggcgactttgcaaatattgtgcttcggttaaagatccgctcgtttcgtttgcttcaattaaaagggattgtccgtacggaagagctaatgggttttgatgatagtaattaataatcgattgaaggtcacttaaagaagaagttgtgttttttgctagatagctattaacgccagatttaaattcatatcgtaagacctggtagtcttgctcaagcatttcttgatcagagcatatttgctcaacctttaagattgagcaaccaatcttctttaggtcttcggttgctctatttaatatctcttgttcttcagcatgcatggaatcgtaatagccgttctggacaactccaactttcaattcttcatataaaacagggagtagataaagcgtataatcttgatgactaggtatggtatttgttgcatgatccaaagggtcttcccctgataaatgactgagtagaatggctgcatcggtaacatttcgggtcattgggccagctgtatcttgtgaaaaagagattggaataattcctgaacgactaattgtgccaacagtgggcttaaggccaactccagaattcgaactcgatgggcttagaatggatccgtttgtttctgttccaatcgcagctgtggcaaaatgacaagctactgcaacagcggacccagaactggatcctccaacatcaatagtgcctggtccataaggattaagtacttggccacctctcgaactgtatccattcggcattttatcactcataaagttggcccattcagtcatattggttttgcctaaaataaccgctccagcgcgcctcagtttcgtcaccaaaaaggcgtcatctttcccgtaggaagtagctagagcttgtgagccagcgcttgtatgcatatgatcacctgtattgatattatctttaagtagaattggaattccgtgtagtgagcttcttgctcctttcattttgcgctctcgatcaagtgagtctgcaatcattaatgcatcagggttaatttctagaatagcattaactctgtgattatggtttgcgatttgattaaggtaaaattgaacaagctgctttgaagtaaacttattagcaagcatagcctgttggatatcgaggattgtggacttttccaaccaatcgatagatagcatttttaattcctcctaacgctttttaaacctaattcgacaataaatggaaaaataccttttagacatcctattctttagtgctaatgatggctgaaaaaacaaaaaaaccgaaccaagataaggttcggtttttgatcgttaagcaactctcgtttgacgagcaaaccagggttttaattttatgaaaaaggcaacaaaaatactagctacgattgcaccttttagtagattaaatggtgtaataccggttaatacaagtgcctgacgggctgaagcagacatttcttcaaagcccataaaccatgtgtatgccggaagaataattaaatagttcaacaatcccatcattgctgacattagaatcgttccgagcgtcaatcccagtgctaatcctttctgggtttgattaaatttacggaagattaaagaagttggtacgatcaagaaaactcctgcaatgaagtttgatatttggccaattggtacaccggtgaagcttccctgaattccaaagtgaatgaaattcttaatcgcttctacaagtatccctgctactggaccgtacagaatggcaacgaatagcgctggaatttcactgaaatcgatttgaagaaaaacaggaaatccaggaagtgggaaatctaacagcattaataaatacgagatactgctgaacatcgcaactacaatcatgcgttgcgtttttgaaacacttttcattttgacattgctccctttttttcgaaccaccgaaaaaggagatgtggtcccgatgcacacaaaaaaccatgagtatggggctcatggttacggcatggggaaataagcaagcttctataaaatttcaaagaaagcttactactccaccatcttctcccatccagactatactgtcggctctggaatcacaccagatcctgcccaaaaaacaggctcgcgggcttgaggaattacttatccttcaccgccggtcgggaattacaccctgccccgaagatagttcgttataatgtttacagctttattatacagtggaatgaaggatatctcaatcataacatcttgaaactaagctattttatgataacgctttcgatagatgctataaaaaaactctctacctttttggatagagagtttcaagaaagcgttcttattttttctcagcaagccatgcagcgaccatttcagcttcttcaccttgaatcaaaccagcgggcatgccgccacctttaccattcttgataatatcgagaatttcatctttcgaatatttaccaccaacggcttctagtgctggtccagcaccgcctcccaggttttcaccgtggcaagaagcgcagttttgtgcaaataccttttcggcttctccacctccagcggaatcgccgccttcttcaccgccgccttcttcggcctgttcaccatggctggcttcatttccaccagcgtgttcttcggttgtggaaagccagtatgtaaagcctacaaccataactaggaacaaaattattgcagtaatataagcggatgatttacccattctgttcacctcctgtatcctcatctttatcatacttttctaacattcaattatcaaatatattttgcttatttcttcctgaattatgtatctatgagaactagtaaaaaaatcttctattttaatgtgcgaattcatagacatagagtgtgaagaatgaaagggaggagataaaatgaaaagcagctctccaaggctgtttggtgatacaagcagtaaacaaattcgtttaatttctttttttacagtatcaggacttatttttttgtttattgtagcaggtgtgatttcatcatcggaaacgaaataccagctctcctcttctatgctacatgattggatcacaagcttttcaacagaagcgatggtgtatggaatgggaactgagaatcattatttaactcaggtattgcctgaagagagtgagccgccagcattttctctcgtaatgtttcaatttattacgagtgtaaagccaggagatatcaggagtcttctaggaggggagctcccgggttttgcgttatatgatgctaaaatccacgttgctggtgagggaactaatttcaccaatcttcctgtcgaatccgctccgcctttggatgatttacttaaagaaagagaggtacctacggagaaattagaaattcaagactcaaaagatcaggttacaccgccacttcaaacaacaaatggtaagaaagtggcctttatttatcattcacatagctatgagtcttacttgccgttattaggtcttgaaggtgaaaaaaatgctgatctagcgaatgatgggaaaaccaatattacgctagttggaaaattgttaggtgaagaactagaagatcgggggataggcacacaagttgacgattcaaacattggagcccttttaaatgaaaagggacttgagcatggaagtgcttatgatgtatcaagaacgatcgtgaagtctgcggtagcgagcaatgatgactttaacttattcattgatattcatcgtgattcattaagagcgaaggatacaacggttaccattaacaatgaggaatacgctcgaacggtttttgtcattggagaagaaaacccgaattatgagaagaatctcgcgcttgcaaaagaattacatgctgcgctaaaagcagaatttccagggctaagcaggggagtaataagtaaaaaaggaaaaggcgtagatggcatttataatcaagacttatcccccaatgctatgttgattgaaatgggtggggtggacaataatcttgagcaacttagtcgaactgttaaagccattgcagatgtcattagcgaacattattggggaacggagaaagtaaataagtaaaaaagtgaagcgctgtgtcagttcacagcgcttctacaaggcttctttcttaatagttaataagctagtagcaataccaactgcaaaaatagtaacagcagaatagagcgaagcatttaatccaatggttttggatccgataagtataacaaggccatctattataaagatgatgattccaacatttaacgtaacgatgcgggagataaattgagcgagcaaatctgttccacctgtacttgtctcgtatttcaacataattccaatccctgtacctacgaaaaagcctcctaatattgaactgatgagaataggaaaagaaaaggcgtatcgaagtggagaaagaagatcaataaaaaaagaagaaagtaataacccatgtagactattataaaagtaagggcgaaagtagaggaacgcaataatataaagaggaatacttaaacagatgatggtaaggccggtttgatatccccatatgtatttcacaattaagccaattccgatcattccaccatcaataagatgattggggacaagaaaggcattgatacctgagccaactaagatacttcctgtaacaactgcagctatttttttatacatatgatgttcacctgcttgttcatggttgtatcatgtttatgtaagaggatttgatttcattacgatgatatgcgataacgattgttatattgaattgacaacgaagagggttgataaattacatggaggcagtcatttccttatctcacattgaatatacgtttgttctattagggtttattaattcattttaacttttataaaggaacttaagtaatttatcatttttagtaaagcgagtaaggtcagaagaagttgagggctgtataaggtgcttattttattgaaaaaacaaagggagaaaagcttacacgttaaaaatacgcagcgtacgaaacgtagtacgttagaatgagagcgttttatgattcgtttagagggcaggccattagcctgtcttatttgcatttcaccacctataaaagtaatattttaccaatattattctttcaaaaagattataccatgacgcttctttagatgttattgggaaattgaatcacaaaaaacagcgaataaactcatgttttcctccatatttcccaatacaaatccttaaaatactgtgatattctacaaatgtaccaaaaattctaattattccgaaatgggggaaatgaaatgaaaaaaggaattgctgttgttcttgcaacggggttagcgtttggatctgcccttccttctgcttcagccgcctcttcaaaagatttaaatgtggagcagaaacaagctcttgaaaagatggagatcgtgaaacaagattgggaaaaagaacgtaaggtaccatcatttttatctggtaaactatccgaaaaaagcgtcaaaacagaaaaggcagttaaatcataccttaagtcaaatgaatctctttttaaagtaaagacacaagatttaaagctagtaaacgaaacgaccgatgaattagggatgacacactatgagtacgttcaaacagttaagggtgttgaaatcgacagcgcaaaattcatcgtacatacggatgaaaacggcgaagtaacagcggtgaatggtaaccttcatccagaagctgctcaaaattataaaggaagttcagaagcaaagctttcagagaaagatgcagttaaaaaagcatgggatcatattgatgtgttgcctcagaacgtcgttactgatgagccgagctttgctcgaaagtccgatgtttctgatatggtagagaaaagtgagcaggtcgtttatgagaaagataacgaatattatcttacttataaagtgcagcttcagtttattgatccgtatccagcaaattggcaggtgtatattgatgctcgggatggctcggttgtagatgcttataatgcagttgctgacggagcggaaacaggatatggctatggcatccttggtaactataaatctctcaatacttactactcaaatggaacgtattatctttatgacacaacgaagccaatgaacggagtaattgaaacgcgaacggctaataatggcacatcccttccagggtactatgcggttgatagtaataacgcgtttacatctagctctcaaggtgctgaagttgatgctcactataatgctggagtcgtatatgactattataagaacacacataatcgcaatagctttaataataatggagcaacgattcgatcaactgtacattatggatcgaattataacaacgccttctggaatggctcacaaatggtatatggcgatggggatggttcagttttcgcaccactttcaggagcacttgatgttgtcgcacacgaaattactcatgcggtgactgaaagaacagcaggtcttcaataccaaaatcaatctggggcacttaatgaatcaatgtctgatgtgtttggttatttcgttgaacctggagatttccttatgggagaagatgtatacacacctaacaagtcaggcgatgcactaagaagcttatcgaatcctgaagcatatggtcagccttcacatatggatgactattattatacttcctcggataatgggggcgtgcatacaaatagcgggattcctaacaaagctgcttatttaaccattcaaagtatcgggaaaacaaaagcagagaaaatttattaccgcgcactaagtctttatacgacacctacaacgaactttagtgtagctcgttcggcgctacttcaggcgacaactgatctttatggaacaggttccacatataattcggtagcaaacgcctggaatcaagttggcgttaattagatggatgaaagaagagttcaagctgaactcttcttttttttgctttgttctaaagaaaagagggtaggaaaagtaggatgaacgatagaatggtggaaatagtaaggaaggaaaagaagagtgttgaaggggaagatactattgatgtaattgattgagttatttttccaattttgtttgaaaatagttataatgaagaaagattacggatcggaggcgcaaaatggaacatttagatatgcatcacatatttgaacttggacttattcttacgatgattgcggctggtattacggctattgcgaaaaaactgaagcaaccatatcccatcgcgctcgtcatcattggaacgttaattggactatttaacattccggtccttgaaccgcttaaaatgtttattactgagggagacgtttttaatttcgttattttaacgattttccttccagcgcttctaggcgaggccgctttgaaattgccttttgaacatttaaatcaaaacaaaaagccgatcctcgctctggctttcggaggaacctttctttcttttttagtgattggattttctacccattttctactaggattatcaattcccgtagcattcgtatttgcagcattaatgagtgcgactgatcctgttagtgtgttatccatttttaaaagtatgggagtaaatcacaaactttcaacagttatagaaggagaaagtttgtttaatgatgggcttgcggttgtactgtttaaaatatctgcattttctcttctagcctatctcgatatgggctggggtggactaacgagcggtgcttttgaatttgtaaaagttgtagcgggtggattactggtcggtggtggtttaggctacgctatttccatcctcacgaagtactttgatgactatccacttgaaattatttttagtatccttcttttctacggttcttatttaattgcagaaagcattcatgtttctggtgttattgccatcgttgtagcggcattaacgtttggtaactttggctcaagagtaggcatgagtccaactacccgattaaatattaataacttctgggacgtagctgcattgctagcgaattcaattgtgtttctgatggttggtctcgagattacacgtatcaacttttctgatcagtggggaacgattggtcttgcgctcttaatcgtgcttattggaagaagtattgcggtttacggtagtacgctattcgtcaaaggccttccatggtcatggagacacgttcttaactggggaggtttaaaaggttctttatcgatagctcttgttcttagcttaccaggcgattttgacgggcgagatacggtgttaattctcaccttcagcattgttttattctctttagttatacaaggattaacgattaagccgctcattagctattttggtctaagagcaaagcacagcggatcaaaagagtatgaagatatcgttgctaatttgcatcgttatgaagcgggtgtagcagagattaagaaagtaaagacgcagctcttcgtacctgaacctgtttattcggaattgctaaatcgttaccaggatgaaattgataaaagtcatcgagaacttgatgccttattaaaagagtatccggagcttaagaaaagtcagctcataacgttaagaaagcattcactatacgctcagtatgataaaatcaaccaactcgaacaagaagaaatcatttcaggagaaatagctggaaagtataaagagctattgaataatggccttgctgaatttgaagaagaggaagttgtgaaagattccaaaagaacacattaagctgttacatttgtagcagctttttctaatgaagtgcatatcctattattaagctggacaaagcaagtgtagtaatgagaagatttcgtttattatcgattgtacggggtatggtttacagtaagtaaagcaataaggtatagtgtaaaaagtcattttcaaccacatgaaataaactcacaagggggacttttgagagaaaatgccttatcttcagaccgatcgtctgaccatcattcctttctcctttgatttgatcaaagcaatgacaaataagaaggaactagaaaagcttttgcatgtagaagtaccggaagaattcaataacgtacaatttgaacagtttttaccttttcatctaactgatgccgctatttcaagccatagatgggaaggaatattaattcatacttctgatgaaaaagtcattggcacgatgggatataacaatttagaagcgacaaacaatcttgaagttgggtatcaattaattcctgactatcgtaataaagggtacgccattgaaatggctagtgctctcgttagctgggcttttccggataaggaaagtaatgaggataaagaagagatgaataacgtgatggaccgcattggtttatctaaattaacagtggaatcgcatctcctaaaaaacaaaattgataaagaaaagtttataaaagaaaatgaatatatgtaaaaccctgccgatgcagggtttttttgtaggtgattaaaaatctgctcaccatattctgaaatttcctcttcattcagcagactccggtgttaatggctcaactaatcagggtaattacttaatgaaatgacgtgaaatatcaaacaatatcaaaactatcacatatttaggaaatcaccgtcacctctcgttaaaataagactataaacaaatcaaaggggagaaagggtgaccgatacatgggttactatgataataatgaaacaagaatgaaacaaacgaaaagtggaaggaactggtttattccgagtacgttcggtgccattgtaggagcatccatcatgcttgttgctgcgccttatgtgtctaacacggatcagccatcaacgaatcaagccgcggttacaacagctagtggtaatgtagaaacctcaaatgtggcttataacgtttcctctgatattacctcagctgtacaaaaagcacaggatgcagtagtgagtatcacaagctatcaaagccaaaatagtgggttttctttagaagatccttcgggtcaatcagggcaagcagcatcgtcagggtctggagtgatttataagaatgaaggtggtaaggcttatgttgtgacaaataatcacgtagtggaaggcgcctcttcggtagaagttacgttaagtaatgaaaaaaaggctgaagcaaaggtacttggaacagatgccctaatggatttagctgttttagaaattgatgcaaaagatgttgaggccgttgcagaaatcggttcctcatccaaattacaaactggggaacctgccattgcagtcggtaatccattaggattcctcgaagggtctgttactcagggaattattagtaatccgagccgtacaattccggtcgatcttgaccagaacggtcaacctgattacgaagcagatgtgattcaaacggatgcatcaattaatccaggcaacagcggtggtgcattgataaatattaaagggcaactaattggtattaactcgtcaaaaattgcagaggaaacagtagaaggaataggatttgcaatcccgattgatgatgcacagccgatcattgaggagcttgaaatgactggggaagtgaaacgtcctgtaatgggtgtaacacctgcttcattagcagaagtaccaacgcaatattggactggcacgcttaaccttccggaagatgtagaaagtggagtcgtattaatgggaattgcgcctaactcacctgcttcagaagcaggtttaaaagaaggggacgtagtagtgaagctggatgatacagaagtaaaagactcagcagcgctacggaagtatttatattcgaataaagaagttggggacaaaatggaagtaacgttctatcgtgatggccaacagaaaaccgtaacaatgacattagcgaatcaaaatggattgtaaatgaaaaaccctctggattatgcatccagggggttttggttgtttacttgctgttttgtatcagtcaatcttgtaagaaaataaaaaactggcgtgtctaaaagagccagagccattttaatgacaaattgagagaggaccatcacccataggttaggaacagtccctgcaaaggcaatcgtaataaaaatagttgtatctaaaagctgtgaagtaaatgtacttacattattacgtagccatttatgcttgtcggaagttcgcttctttaacagagagaagacatagacatcaacgtgttgagacacgaggtacgctgcaagacttgctagaacaaacctgtagttttgacctagtaaaatttcataagcagcctgggtatcggctgcgaatggcgctactggaagaagcataccaagatagatcatgatacttgcgaaaatctgagcgataaagccgtactgaaccgttcgttttgcttcttctttaccgtatttttcgtgaatgatatctgtgaaaagaaacgaaaaggcatacatcacaacggccgctgggatgacgaagcttccgatcatcaccacttttcctgctaggacgtttgcgatcacaatcgaggtcgcaaacagaacattaaacaggacaagatttcggtcgatgaattgatttttcatcttattgcgttgctttctcacgaatggctgtcgttttaagttcgataccgccacgagctgattgataaaccgtaatggttacttttaaagggtcaattgcgtatacgatatcgtctgcaatgcgtgcagcgagcgtctcgcagaagcttccttcgtcacgataagaccagagataaaatttcagagatttagactcgatgcatttctcatcaggtacgaaagaaatctcaactcgaccaaagtcaggttgtcctgttttagggcataccgctgtaaattcaagtgcattaaacgtaatttcttgaacgttcggtgcatcgaatgattcgttttttatcacttctcttgcttgttccacactctctgggcgaggcatcggaccagaagagggtagccaagctttatccatattattcattaataatcctcctttagttttgatgaagcaggaaggttacgaactgctgtcattcaacgttgtctattataacagaggaactttccaatgcgaagttggaagttcaggccaaatttattagtttagcttttaacataaagggaaagtaaaaaaatagctaagtaaactaagaaagataataggaggaatcatcatgcaaacaacgactacgacagtgaataaggaaaagaatggtaagcttgtaaaagggattttggtaggtgctattgtaggtggcgcggtagcgatgcttgactcaacaacgagaaataaagtgagatcatcagcgggcacgttcaaggactcttccaaaggattttatactcgtgtgaaagaaaacccaggcgaagtgaaagacgactggatggatcgcattcaatcagcttcttctgttcttaaagaagctatgaatgatgctcagtccctttatgaaaaggtgaatgatgatgtggtagatcaggtgaaccaagtgaaagaagattcaactgaagttctttcttcagcaaaagaagcgagtgaagatttaaaggacatcggaagtaaagtgaaggatgctggacaggaagtaacagattcaaatgagagtgaatatgaaccaacaaacattcctggcagtgaaacacgcacacctggtagcacgtcagtgaacccgaagacttctccaaatacaaagctttaatttagagagcccgttaaattcagcttatcatgaaaaagacttccgcaaattgcggaagtctttttttttacgaaatgtaagacgcaccaatgataattaaaagaataaataaaactacgattaacgcgaaaccttgaccgtatccatatccactcatcgttgttcctcccgtcaatatgtgtcgcttctttactaacgtatgtaggaggtaagacatcgggacttaggcgaatgcccttttttgggtgtgaaggctaaatggtacgcatcgctactgcaggataatcagtaaatattgccgaacatcctgcttttttgagcgcagctatttgatgaggatcattgacagtaaaagcacgaacagggataccacgcttatgtgtatttgttataaaatactcatcaatcgcaccccactcaatgtggatactgttggcaccaactcgttgaagataatcccacggctcaactaacttttccatgagtagaatggcggtttcaactttgctggttttttgagcgagacgctgaatactatagtgattaaaggaagagataatggttcgatcacaaagctgataatgtgtaagcaaatcaagtacctttttttctagatgttcataaggaaagagaccatttttaagctcaatatttaaaatgagggaggtggaagtgatccattctagaacgctttttaatgaagggatagaagtgccctggaatcgatttgagaaagcttgaccggcgtctagtcgaactaaatcttcgtataggaagtcttttacaaaaccaataccatttgtcgttcgctctagttgttcatcatgaatcacaacaggtacaaggtcttttgttaattgaacatcgagctcgattccttgagcaccagctttatgagccgcctgaaaggatagaagtgtattttcaggatgtgttcctgacgaacctctatgtccataaatatggaaaaaagacataagtcacctctctttagctaaggttgaatgatctatgtatggtattcgcgctttagtagggatttcctttgtggtttctgcttctaagcttctccccctattcgaataaaaaagtcatgcgctagggttgcatacatgttagtgaaaagaaaggaggaggaattttttgtttaagggatttgaattaccagaagcacacgctcattattttagagggaatttggaagagcggtttaatcatcatcattttcagattttaggattcagttttcctataaacggcagctcttttgatcagcatgttcatcgaattgaagggttaacgatagaggaggagggccatcaacatcgctataatgtcgaatctggaccacccattttattagcaaagggtggtcattatcataagtttagcggagaaacggtgtcaaaagaaaaccatgaacattatttttcgggagaaacgagtcttcctttagggaattatcccttaaattggtgagaggcgatgcagctgcatcgcctcttttacattttaatttcgcgcttgttttggtaaaacgtaaatgcaagtgcgcctattaatattgtccctttaattatatcctgagcatagtaaggaacatttaacattgttaatccatttagtagaatgccgatcaataccgcccctacaaatgtaccgagtgcgtttggcttaccagcgccgagtacagagtagccaattaatgctgcagccacaccatccattagcagtggggcgccggcagaaacctgccctgtacctatacgagatgctagtacaatgccagcaatactagcaaacaagccacttaatacatatgcgagtgtacggtatcgctgcacagcaactcctgaaagccttgctgcttcgcgattacttcctgtcatataaagcaatcgaccagcacgcgtatacgtaagaaaaaggtgaaccaatattacacaacaaatcataaaaatagcggggaacgggacgcctgctatttccccttgtccaataaaaagaaaagaggggataaacttgcctggtgccgttgtaccgtcatccattggcatattattgtagattgaaaagccttttgtgtaagttaattgaattccgtttacaatatacataacagcaagtgttgcaagaagatcagggattctgattttgattgtaatgaatgcgttgattaaaccaatgactattcctaatatgataggaataagaagggcgacaagaagctcctgtctataccagacgagggaggcagcacttgcaatggttgctaaactaaccgtcgatccaactgaaaggtcaaatcctcctacaataagtgtaaatgttaccccgagtgcaacaagcgtaacaatcgagatggaccgaagaatatcagcgaaattactataagtaagaaaccgatcgttcagaatggtgaaacttactataagagctaatatcacgagcagggtgccgtatttaacaaaaaaatgaactattttatttttaaaaggtgtgacgagagcattttgtttctgtgtatgtgctaattcagctgctgatttcaatagttgtacctcctgttgctgcttgcataatggctgattgattcatgttatcaccagttaaggtcgctgtgatttctccgtcatacatgacaaggattttatcggatatctcgagaagctcatcgatttcactggaaaaatagaggattccttttccttcatcagcgagttgctttatgagagccaatacctcagttttagctttaacgtcgatgcctttggtaggttcatcaaataggaatacgtttcggtcttcatctaaccactttccgattgaagctttttgttgatttcctccactcagatgatgaatcggttgttgagtagaagcagcttttataccaagcttattaatttggtcggacgaataattttcttctttctttcgattaagtaagccattttttgagtgacggcgtaatgaagggagggttaaattctctgataacgaaaaatccagtaaaatccctgtttttcttctttcttcaggtattaggcaaacacccgcattaatggcgtcactaggagagcgaaaacgatacgtgtgattatgaaggtgaatcttccctttttgaggctttgaggcgccaaataaggctaaggcggtttcggatttaccagcacctacaagtcctgcgacgcctatgatttctccatgatttaattccaaattgatgttttttccagtctcaggaacatgcacattctcagctcgaaataacgtgtggtttaatacttgtctttttcgttctttcttctttccaatcgctgaaccaagcatattggtaataatctcatcggctgataccgcttttgtctcagctgtgaggtgaactttaccatcacgtaaaatcgtaaatcggtcgctaatttcttctatttcaggcatacggtgagaaatatagataataccgacacctttcttttttaacttgttaatcaggtaaaataagagttgtgtttcttctatgctaagtggcgcggtaggttcatcaaggattaagtattgaacatcatgagccattgcccgagcaatcagtatcagttgtttttccgagagtgtgcaatcggaagcaagcttatctggattcaaagggatcccgagtgtcgctagtaattgctttgtttttttgcgctcttttttagaagagtaaagtttaaagggagattgatttaaggaatcagcccaaatattttctgctaccgaaagggcaggaaaaagagccgtatcgacttcttgtacaacaatgccaatgcctgctttttttgcatcagaaggggttcgaattgataagggttgcccgttatatgaaattgaaccactgtcccgttcatagtccccacagacaattttcataagcgtacttttgcctgctccgtttgtacctagtaaggcgtgcacctcaccggcatgaatcgtgagtgatacgttttttaatacagtcgtactgccaaatgatttagaaatatttttaatcgttaattgattcatttagcgtctgcctcttcaacgagcttttccatccaaggtgatgtggcagcgtcagatgatccccatccctcaacgtattccccaagctcatccatggagatcgtttcttcaggtaaatcagactgctttacaagatgaggatcaagtgaaaagatttcaggtgtatcttcttcagcgattttttgataagcaaaccgaacttgaacacgtccaacttcagctggatcagttgcagcagaagatagccacggactattttccttctgcatcatttggaggtcttcatcactcatatcaatgccataaaccttgatttcgtctctgcctgcttgctcgatcgctctagtcgcgcctttagcaaattcatcccatggagcaaatacagcgtcaatgtctcctttgtttgggtattgctttagaatcgtttccatttgtgtttgggtatcaagagctgtattagcgcttgctgtgccgaacttcgcgatttcttttattcctggatatcgctcctggaatgcctcgtaaatggcatttcggcgttccatcggtgcaaatccgcctacccaaacgtacacaatattgccttccccatttaaatcttgagcaagtgtttttaacgtatcccaggcgagactgtagtcatcctggtcgatgacggttacgccaggtacgttaatatcactgtcaaagacaacaacaggaattccttgccccactgctttttttactcctgcttcaagagcatctgctcggccgtgatcgattaaaatggcatcgacatcctgattgatcgctgtatcaaggtgtgtcgccattttcgaaaggtcattatcggcattatatacctggacacttcctccaaacttttcaacctgatcttcaacccctttgacatattgggaagagaatgttccaagagaagcttgcataatcgcagcaatttttatcggtttttgcacctcttctggaatgtcagatgaagtttgcgatgtttcttcttgagtttttgaggcagtctcacttgtttcattattgcttgcttcagtttcacttacagcatcttgctcacttgtgcatgctgcaagaacgaagagaagaaggatggataaaataagtcctaaacgtttcatgaatgtacctccgtaatttcattgtctggtaaaccaagatgagcaaggttttcctcgtagggtgttcgaatgatgccgtgttcggtaatgattcctttgattaagtgatgtggtgttacgtcaaatgcaggattgaaaatttcaatgttttcagcagcgacgcgctctccctgatagtgtgtgatttcttttgaatcacgctcctcaatcggaatggcatctccattaggaatcgaatagtcaatcgttgagataggtgctgcaatataaaagggaacattgtaagcctgagcgatatgagcaagaccgagcgtaccgattttgttagcagtgtctccatttgcggcgattcgatccgcaccgactataaccgcagcgattttctttgtttttaagacgtgcgctgccatgctatccgttataagcgttacgtcgataccggcacgttcaagttcccatgcggttagtcgagcaccctggagaacgggtctcgtttccgttgcaatcgcggaaatcgttagaccgttttgcttagctaagtggagcggagcaagggccgttccatattttgctgttgcaattcctcctgcgttgcagtgggtgagaatggtatctccgtccttcaatagtttaagaccgtgttctccgatgcgttgacagacaagttcatcttctttatggataagtaacgcttcatgaagaatcgcgtctttcattttttcgacagttgataaaggaagagtaactcgaacaatgcgatcaatcgcccacgagagattcacggcagttgggcgagaagatgagaggtattctccttgtttaagtaactctgctttaaaagttgatggttcgtttgtttctgcgtgttgactccagaggacaagaccatacgcagccgcaattccaatcgctggtgcaccgcggacgacgagagcagatatgctattccaaacatcttcgatcgccgtctgtttgagatagctttcttgatgtggtaacttgcgctgatcaagcagtaagagatgatcccctttccactgaagagatgagatgacagtcatttaaacgacctccttaatcgtttcaatgtaatctttaatcgaattgatgttttttcgatttaaaatgagtttttttccaagtgttaaagctcttctttctacagccagttttacttctggataagtaatcgtctcaatttcttctacatgagcaagtccaatcgttcttcggataattttacaaccagcaaaaccaatactatcgacaaaaatagactgaagatgagtattgagataacctctggaatagcggttatcttctgaaaggtgggtgtcccagagggaacggaacgtagagtcaaatacggtccaaacttcagtgataacaccaaagagatatgccagatatccgtctttttctttctcggttcgatgagcttcctgggagagaatgctaagcgtaatattggcaataaaagccccaacatcaaatcccgctgggccatagaaagcaaattcaggatcgattacttttgttgaaccctccgttacgaataggctacctgtatgcaaatccccgtgtatcaacgcctctccttttgttagaaaggaatgtttaagcgaagcaacttcagttaggaagtcttgatcttcccacaaaatttcaacatctggtcgaagctcttctgtaaatgcgttactttcagcattgtagaaggggtctgaaaatacgagactttccgtgattgcgcataaatctggattgctaaaccgtttagcaagctctttcttttttgcagaaccaagaccgtagtcagaggtgaaaaagagcgtgtgagcgaggtaagtcccgacatttcttgcaagctcagggtagacacgtccttcaataagtcctttgcgcaaaatcgtatgcgatgataaatcttccatcactgttgccgctttttctgagtcgtgcaaataaacaactggggaaaattcaggaacaagcgaatgagcttgtatgagggcctcgctttcaattctcgaccggtcaagtgtcagtggccaggattcaccaacaaccttggcataaggcaaagcttgtttgacgatccaggattcctctgttgctttgttttgaacatgaaaaacatagtttaaattgccatccccgatttcttttacgataaggggggaagagggatcgataaaattgtgatgcactaaaaagtgaacaacgctttcttgtgtaaatggtgtatatcccgacttaacttgaaaagacatgtgtaagtcccctttcaaaaatgaatagattatgtacagaagcattcttgattaaaagacataaaaaaagcctctttccgaagaaagaggcttgaagagatatccttcacacctcttatcttccaggataaatatcatcctgttggaagtagcaccgtgccatctaagccatcctgtaaagatgtacttaagaataggtcggttgctgggcgtcatagggccaaatccctcagcctgctcttgataagagaaagtttatgaaattattttacaattttttcgcttgaaatgtatgttacagagaaacagatgcatttgtcaataatattttgaattttatttataaatatctggacgtcgatcttcaaagattggaatacgacttcggatagatgatatttcttcttcatcaatcaagcctgttaatatcgtttcctcttcgcctgcttctgcgataatcgttccccacggatcgatgattaaagaatgtcctccaaacgcattatctggatctgctcctacacgattacaagcaataacgtaacattgattttcaatagcgcggctaataagtaatgctcgccaatgatcggtgcgctgtttcggccattcggctggaacgaacaaaacttgtgcgccttcaatggcatgaaggcgaagccactctggaaagcgaatatcataacagatgaatccggcacttgggagttcttcaagtgtgaagtggcttttctcattccctgaaacaaggtatttctcttcattcatcaatcgaaatagatgagctttgctatactcatggataagctgcccatctcgattgaaaacgagcatcgtattcgttacgtgatcatgttgttgtttcgcaatcgacccacctactatactcaccgtattctttttggccagttttgaaagaaaagcgattgatttttctgcatttgtatctccaatttcatcaagtcgcgataaatcataaccagtcgaccacaattccggtaaaacgataatatctggtttgtcgtgaacagccttagaaactagctcttcaactttagagaaattttcttccgggtttccaaaagcaatatcaaactgcaacagagcgatctttttcattgttttctcctcctcgcttacaaaataagctttacatgattgtgtatccaagataacataatttactagaatttcacgaaaattttaacaggatgtgattctttgaaacaatttcaaacttctgatgctcttaaacgattaccggaacaattttttgcaaagcttgctggaaaagtgaaccgctatgtagatgcgggttatgacattattaatcttggacagggaaatcctgatcagccaacacccgatcatattatcaagtccttgcagaaggcagctgaaaacccaacctatcacaaatatccgccatttcgaggacagccttttttaaagcaggcggctgctgatttctatcagcgagaatttggagtgaaccttgatccagagaaggaaattgccgttcttttcggtggaaaagcaggccttgttgaagtcagtcaatgcttactaaataaaggtgatgtggcactcgttccagaccccggttatcctgattattggtcaggcgtcgcgatggctgaagcgaatatgcaaatgatgccgttgcttgagaaaaatcatttcttaccagactatgaagcgattccagaggattcgttaaaaaaagcgaaaatgatgtttttaaattacccaaacaacccaactgcagctgttgcaacgaagcgattctttgaggaaacgatcaattttgcggagaccaatgatatttgtgttgtgcatgatttcgcttacggtgctatcgggtttgatggagagcgaccaattagctttttggaaacagagggtgctaaagacaatggaattgaaatctataccctttcaaaaacgtataatatggcaggatggcgtgttggattcgcagtcggaaatcaatctgttgttgaaagcatcaatctacttcaggatcatttttacgtcagtctatttagtgcggtgcaagaagccgcggctgaagctttgcttggatcacagcagtgtgtagaagaccttcgcgaaacgtatgagtcgagaagaaatgttctcattcaaggactccatgacattggctgggatgtcacttctccagcgggatcatttttcgcctggctgaaagtaccagaatcatttacttcagaaagttttgcagatttcttgcttgaaaacgttcaaattgttgtcgcacccggaaacggctttggagaatatggtgagggatatgtgcgagtcgggttattaacttctgaagataagctaagagaagcggtcgaacggattaagtctcttaatctcttttgattcagaaaaattaaaaaacagtttgacagaatttgctgcgtctggcataattcaaatcaattactaaaacgaataattgcatactcttatccagagaggtggagggacgagccctttgaagcccggcaaccgatttttaagttttcttaaagacacggtgctaattctcgcagcaaaagctggaagataagaggaagagcatggtgataaagacctcttcctcgtgaaggggtcttttttgtgtgataagcgaagagtgaaaggtaaagactgaaaggaatgaacgtgatgagccgtcttatagctacctatcttgtaaataatgatcatcaattagcccagcgtgccgaatcgatcgctctcggattaaccgttggcacatggacgaatctaccgttattagaaaaagaacagttacaaaaacataaaggagaagtcgttcgggttgaggagagagaaggtaaggggatcatcgttatctcatatccagctattaattttagtgctgacattccggcgattttaacaaccgtcttcggcaaactttctcttgatggagaaattaaactcattgatttagagttttcgaatgagttggttcaagcatttccagggccagcgtatggtattgaaggcatacgcgagcttgcaagtggatatgatcgaccacttgtcatgagtatttttaaaggggtgattggaaagccattgcatgagttagaaaaacaaatgcaggcacaagcccttggtaaagttgatttcgtaaaggatgatgaaattcttttcgaaaacgagttatcacctcttgaaaagcgtgtccccgctttaaaaaaagtgctggatcagacgtcagaagtgacagggaaacgcacacgatatgcggttaacttaaccggaagaacggacattctgaaagatcgagctaaacgcgctattgaattaggtgccgacgcccttttgtttaatgtttttacatatggtttagatgtccttcagtctcttgctgaggataaggatatctcggttccgatcatggctcatccttctttttcaggggctatggctgcatcgggcactcatggcataagttattccctgttacttggaaaattacttcgaacagctggtgctgatttttcccttttcccttccccttacggaagtgtggcgttagatcgaaacgaagcgctcgcaacagccctagctctgacggaagagaatcaactgaacaagacatttccggttccttcagcgggcatccatccaggattggtccctcttttaattcaggactttggaagggatagtgtcattaatgcaggaggaggcgtgcacgggcatccaggaggagccgcttctggaggaaaagcattccgagatgcgattgaagccgttctaacaaatcaatctcttgaagatgcatcacgtaatagtgaagaactccaacaggctcttacaaagtggggcagcacggaggtgattcgatgaaaaagccgataatattttgtgattttgatggcacgattacaaatagtgataatatcgtttccttaatgaaacgttttgctccaaaagaatgggagcaaataaaagataatgttttagcccagaacctatccattcgggaaggggtggggcagatgtttcatttaattccttccagcagaaagaaggatttgcttgattatttattagccacaaccgagattagacagggatttttagactttgttaattatacgaggcgagaagggatccagctttatattgtaagcggaggcattgatttctttgtctatccgcttctccaaccatttaaaataccagaagaaaatattttctgcaatgggagcgattttacaaacgaaacgatcacgattacttggccatacccttgtggtgatgattgtacaaatgattgcggatgctgcaagccaggcatcttaaaaaagtttgatggagatacatacagaaaaattgtgatcggtgactctataacggatctagaggcagctaaacaggcagatcaagtctttgctagagattacttagcaaagaagtgtaaagaactgtccattcctgcagttccgtttgagtcgttcgatgatatcgttcgaaaattggcggaagaaaaggaggggtatgatgagcatcttacagaaacgttggaacgaacttgctgatatcaaagatgaattggctgctcgtgattggtttccaggaacaagcggcaatctctcaatcaaagtaagtgatgagccgctacagtttcttgtcaccgcaagtgggaaagataaaagaaaacgaacggaagaagatttcatattggtcgatcgtgatggacgggcgatcgaaagaacttctttaaaaccatctgcggaaacaattgttcaccaggccatctattcaaaaacaaatgctggatgttgcttgcacgttcacacagtagataacaatgtgatttctgaactttttagtacagagggtgaaattacttttcatggtgttgaattaataaaagcgtttgggctttggggacaaaatgattcaataaccgttccaatcattgataactccagtgacctttctctacttgctcaggatgtcgttcgtgtcatcacaaaagaaacgaaagctgtattaatgaaaaatcatggtattacagtatggggccgcgatggttttgaagccaaaaagtatctcgaagcatttgaatttttatttagttaccaacttaaattaagaacctttcaatcagtagtaagctaagcgaaggaggaagaaaaaatggcggttattaaagtgagaaatacaggtgaagtgattgatggaagggatgctgtaagtgcatttctacaacaggaaggtgtactttatgaacagtggcaggtagaaaaactccctgaacaattaagaggtaattgcactgtaacggaagaacaaaaaaatgaaattttaactgtatttaatgaagaaattcgttcgctagctgaacgcaatgggtatggaaactgggacgtggtggctctttcagaagagacgccagacctagatgccattctgaagaaatttgaacaagtgcacgtccatacggaggatgaagtaagagcgattaccgctgggcatgggatttttgtgatcaaaggaagggtcggatattttgatgttgaattagatccaggcgatgtgatttctgttccggtggatacaccgcacttctttacattaatggatgatcgtcaggttgtagctgttcgcctatttattgatccatcaggctgggttgcccatccttatgaagaaaaagaaagtgtaaattaaacgaaacggccgtgaatgtgcggccgtttttttatccgtatttaggtgcaaatcttaatcaaagcattaagatctggccaaccaaaacccgtttctagaagcttttcacctgcaatttcagtctctttctcagcaacttcaagtggataaaagctttgataaaaatgagcagctggatttccgtttagaacccacacaagcatcgattggtacgattcgtttcttagctccttcgcaacagaacataagagcttttttccagccccttttcgctgtgcttcttcaagaagataaatcgcgtacagctctccatcatagtgataagatgttgatctattttccccaccgtttgcaaacccgataatttctccttgatcgacggctacaaaaatagtgctgccagcttgaataagctttttccaacgggcttcccgtatttgaatatcaagtgcattaagataatcttctggaatgagctgctgatatgtcgatttccagctattcacatgaacagttgctatcgctagagcatcatctactgtcgcatttctaattttcatgggagctctcctcattacctatgatttcttactccactcacttctagaaaaagggaatgaatcctgctagtcgaataaatgaagtaagccatacataatggaaggattgagtgctatgaaaaaaatgaaggtgaaaatagaaggtctcgacgtctgcatttatgaatggggaagtcagcgtaaccccaccgttctcttacttcatggtttgacgaacaatgcgcttgggtttaacgagatcgctgatagtttgcaagatcattttcatttgtttgcgattgatttacctggccacggtgagactcagacatttaatgaagaaaaaaatttttcttttcaatttctaaccgaatggctcgaaaaggtacgttttgaaataagcgatcagcccgtttatttgattggccattcttggggagcggctctagctctccactttagtagtcggttttctgaaatggtgaatggcgttgtgatgattgatggaggttatctccattttgaagatgatccttctgtaacgttaggtgaactcctcaagcaaatgtcacagtgggtaacagaaagttattattcaagtatagaagaatatgagaaaaagaagaaagaggaaattggtagatggagccatgaattggagcaaatggtacacagggatatgaaggaagtggtgggcggcgtagcaatgaaggtaagcgaaaatacggtaagagcgattgtaaagtcactctatcttgagtcatgccgcgatattttccatcagatacatgctccaatctttcttataagagcaacgcttcctgaggatggagaaaagataaggcgtcaggcagcaactagaatgcagaaggaattgggaactcagtgtaaggtaagtgctattccggaaacggggcatgtcctacactggcaaagacctgaagaaacgataaaaaagattaaacagtggttagaagaaaagggtaacgaaaagatctatacacaagcctctgaataaaaggggttatgtgcgatagatctttgggaagttcaatgtaataatcgttcctttgctctcgttgctttcaatggtaaaagtgcctttatgttttttgacaattctcttgcaaatcgtaagtccaagtcctgttccgttctttttcgttgtgaaaaaaggagagccaatttttttaagttcttcatcagcgatgccactaccattatcaatcacctgaatctgtatgtgttcctttagttccttagctttgataataatttctccttcttcaccaattgcttccatcgcatttttaagcaggttaataaaaacctgttttagttggttactttcactataaataggagggagagtagaagcatattccttttgtaaaataatacttttcatgttagcctgaccgcttagtaattcaataacttcatctaatataagatcaatgcggttgttttgaaaattggtttttgttggttttgcgagaatcagaaattcatcaatgatttgctcaatacgatgaaattctgaatccatcacttgtacgtagcgttcaatgtctttatccgtatttctgaattgaattaatttcaaaaaacctttcaatgaagtgagtggatttcgtaactcatgtgcaattcctgccgcaagttgaccaacaatggatagcttttctgattgagcaaggtgttcttcattcattcgtttttctgtaatatcttttgctactccgattaatcttccaactgaaccttcttctacaaggggaacaagtgtaataacgaataatttgtaaccctgcttcggaaaagagtacccttcttcaaattgaatcgttttctttcgaataatagcttcttgaaatcttttaatggcttgtatcccctgatcaacaccgaggaaatcttctattcttcggccggatatggcttctttggaagtttcatagttggatagataagcttcatttacagcttcaatttcataatgatgcacatcaatgacccgaatttggaagatcagatctgaaatatgatgaaagatgatatctaaatttacatcttttagctcgcttcccttttccatagaaatcccccataatcagctttttgacatcgcattaattggatatttctacaagatatgcgaattcccttctaattatgatcgatattcgtaaaggattgacgttttgtagcgattgaacagagaggttgaattctaaatccctgttagaaaggttgctatccattggaagaagattgcaattcaaatggtcatgctatagagtaagaagaagtatttttggtgcaatcattcatcttgtgaaaggaagggtttctaaagaacatggctaaaagggatacagtcttttttctaagtttatttttattcttttttcatggtgcaaatacaatcattattagctatatgccagtttatttccaacatagcggtatgtcggaaagtaaaataggagctattcttgcaactggaccactagcggcaattctagctcaacccttttggggatacctaagtgataaatttggtacgataaaaaaggttttgcttgtgacgctagttggagtagctgttgttagcgtttttcttttaacgaacagtaattatgtgtttattttaatctcagcagcgattttctatgtgtttatgtctcctaccggagcacttggcgatagcctggctgttaaaaccgctgctagcgtgaataaaaactttggaagtattcgaacatggggatcgattggttttgctgtatcaacgctaatcgttggtcagtttttctctttctttggtattagtacgattctaattccatttatgtttatgattgtgatcgcctttcttacagcgatgagagtgtcagatgtaaaaacgcgtaacaagcctgtgacagtgtttgatgcgatgaggattgggaagaatagtaagtttttactgttcttaggcacaatcttgtttttaacgatcccacatcgggcaaatgatagtttcgttggactatatcttacagaacttggtgggaatgagtctcaaattggacttgcctggtttgttgctgtagctagtgaagctattatattcgctacaagccattactggttcagaagatttaatgaaattgtctttatcatgattgcgggtgtgatctatgcagttaggtggtttgggttagcgtacatagggggtccggtagccgttatccttcttcaaatttttcacggtgtaacgtttggtgttttttacgttgctgcgtttcaatatgtgacaaagttagtgcccgagcacttgcaagccacgggacatcttctatttatctctgttttctttggactatcagggattcttggttcattgttcggagggctgatctttgaaagatcttctggagcaactttgtatgctgtgatgggatgtttaaccctagttgggtgtgttgcgttacttttctatcgcatcgttgaaaaaagaaaaacgaaaacagatgaaagttacgcttagggcagatgagattctgtccttttttattatccaattatttcatacccgaattatgctgaaataaaccagataggcatattggtgatggttgtcacagaccggtgaaagaaacgtgactacaatgaaggtgtgataaaaataaagttgtggagcgtgaggagtatgtttgttcattttttgagagagaacaagggaacttctggcattcttttccttattcgattgtttctaggctatcaatggatcgcggctggatggacaaaaataacgaatggttttgacgcaaatggttttttgcagggagcggttgcgagtgcgagtggagaacatccggctgttcaaggttggtgggctacttttttagaaggcgtagccattccaaatgtcgatttctttaatgtcttaataccatggggagagtttctagttggacttggcttaatacttggtactttcacaactcttgcggcattcatgggagtagtaatgaactttgctttcctctttagtgggacaactagcacgaatccaatgatggttattctcggaatgctcttattaattgcgggttataatgccgctaaaattgggattgatcgatggcttatcccaattgttaagaaaagcattcatatgcgacaggtgaagccagtacttcatcactaagagaggttccgtgaaaacggagccttttttgttttgataattagaaaggttggtgcaagcgaaacattacagttaaataaaaaaagaggaggaactgtaataaaaagtaaagaggcagattgaaaggaacagcgaatttggtttagtgattattaatttgggaggctagaccgtgattgggatatttaaagaaaatgaagaacgctatttgaggtggcacagttctaatcaaaatgggtatgtttttaatcatttcaaaggaaaagatgcggcatataataaaattcatgcagctacttgtaggacactgtggcgagaaaaagatgagggagcaagaacgaaagtggaaaaaatttgttctgataaccttgatgagcttcttaagataacagaagagatgaggcagacaaaaggttattcttattgcaaaatctgtatgcctgaatacatagtgaaaggtgaaaagttagccaaatattcctggcgttaagttataaggaaaatggtatgataactttaattctggtgttaggagaggatagaaatgcatcaaaatcaagttttagtaaaaggaaaaaccgtagataacgaaacgcgatgcgaacattatcacagtgaacgagatattattgcgattaaattctattgttgtgatacttactatccgtgttttttatgccatcaagaaacagctgatcatcccgtccaagtatggccaaaggaaaaatataaccaaaaagctattttatgtggaaggtgctattctgaactaacgattcaggagtacttaacagcacactctctgtgcccttactgccacgcttcatataatgaaggttgcaaaattcattaccatctttattttgacgaaaataaaaccgtgaaataatagctttacttcggatgaagatgcaggtattataatttcaatctttaattgaaattcttttacggtgcattaagctaactctaacgataatagactactcttgcttaagacacagaagttctgtgttttttcttttgttatctcacctccaagtattgtatagatgtattttggcagaagtcttagtttgactcgtttagtttaatagcaccattaagaaagaaggaaactaatcatgaagctgaaagaactatttcttcatccgccaagagctttactgcttctatttctcatagtaagtacgattggaactgttttattgaaattaccacaggcaacaactacacctgtgagctggttagatgcctggtttacagctatatcagccatcacagttacagggctcgtcgttgtagacacgggttcggtttataccgtttttggtcaggttgttattatgctattaattcaagttggtggacttggtattatgtcatttgctgttgttgtctttcttctaattggaaagaaaatcgggatttcacagcgtcttttaatcactcaagcattaaatcaaaaagggatgggaggtattattaagcttgtaagaagtctatttattttttcaatagtaattgaaattattggagccattctcctatctgcaagatggattccggaatatggagtagggaccggcatttatgtagccatctttcacgccatttcagcttacaataatgctggattttcaatttggtctgatagtctttcctcctatgcaggagatccgattataaaccttgtgatcgtaatgctctttattttaggaggaatcggcttcacggttttgattgatttaaaggagaagaagcattttagagagtggacgcttcacacgaagttaatggtgataggaagtctctttattaatgcacttgcttttctcgtcattattactcttgagtggaataacgcttctactcttggtcagttaaatggacctgggaagggatgggcggccttatttcaagcgttaactccacgaacagcaggctttaatacgattgatatcggtagtatggaagaagcctccctcttctttacaatatgtctcatgtttattggtgcaggaagtgcctctacgggtggaggcattaagcttacgacgtttatcgccatgcttctttctgttaacaccttcttaaaaggaaaaaatgaagtaacgatctttcataagacgctagccttttcagttattatcaaagcacttgccattacggttatctcgacaggcgttgttctagtaggggttttcattcttgaacttacgcaaggctctccttttctagcgaatttgtttgaagttgtatctgcatttggtaccgtaggactatcaatggggataacgggtagtttagatggtattgggaagctcacgattattgtgattatgatggtagggaaactagggccccttacactagcctttatcttcgcttctaagaaaacaccaaaaatcagatatcctgaagaagaagtactgacaggttaaaatggtttctggttaacttttttataaatgggccttagaagataaagacaatagagttagcgagatgaacggtttacgtaaatacgtaaacccgttcattttaaaagataggaaagtaattctcgaaaactgttgacgacattatatccacatggtaagatgtatcttgtcacttcgaaacatcaccaacaacttacatgcgaaaatgttttaaaaaaagacattgacgcaatgagagattgctggtaagatagaagttgtcactcgggagaaacgaaccgagattaatagaattaaatcgatctttgaaaactgaacgaaacgccatgtaagtagttgtttctacggaaacaaattgttttaaaagctagattaagctttctatcggagagtttgatcctggctcaggacgaacgctggcggcgtgcctaatacatgcaagtcgagcgaagagatgggagcttgctccctgatcttagcggcggacgggtgagtaacacgtgggcaacctgccctgcagactgggataactccgggaaaccggagctaataccgggtaatacatcgcaccgcatggtgcaatgttgaaagttggctttctgagctaacactgcaggatgggcccgcggcgcattagctagttggtaaggtaatggcttaccaaggcgacgatgcgtagccgacctgagagggtgatcggccacactgggactgagacacggcccagactcctacgggaggcagcagtagggaatcttccgcaatggacgaaagtctgacggagcaacgccgcgtgagtgacgaaggccttcgggtcgtaaagctctgttgttagggaagaacaagtaccgttcgaatagggcggtaccttgacggtacctaaccagaaagccacggctaactacgtgccagcagccgcggtaatacgtaggtggcaagcgttgtccggaattattgggcgtaaagcgcgcgcaggcggtcttttaagtctgatgtgaaagcccacggctcaaccgtggagggtcattggaaactggaggacttgagtgcagaagaggagagtggaattccacgtgtagcggtgaaatgcgtagatatgtggaggaacaccagtggcgaaggcggctctctggtctgtaactgacgctgaggcgcgaaagcgtggggagcaaacaggattagataccctggtagtccacgccgtaaacgatgagtgctaggtgttggggggttccaccctcagtgctgaagttaacacattaagcactccgcctggggagtacgaccgcaaggttgaaactcaaaggaattgacgggggcccgcacaagcagtggagcatgtggtttaattcgaagcaacgcgaagaaccttaccaggtcttgacatcctctgacaatcctggagacaggacgttccccttcgggggacagagtgacaggtggtgcatggttgtcgtcagctcgtgtcgtgagatgttgggttaagtcccgcaacgagcgcaacccttgatcttagttgccagcatttagttgggcactctaaggtgactgccggtgacaaaccggaggaaggtggggatgacgtcaaatcatcatgccccttatgacctgggctacacacgtgctacaatggacggtacaaagggcagcgacaccgcgaggtgaagcaaatcccataaagccgttctcagttcggattgcaggctgcaactcgcctgcatgaagccggaattgctagtaatcgcggatcagcatgccgcggtgaatacgttcccgggccttgtacacaccgcccgtcacaccacgagagtttgtaacacccgaagtcggtggggtaacctttatggagccagccgccgaaggtgggacaaatgattggggtgaagtcgtaacaaggtagccgtatcggaaggtgcggctggatcacctcctttctatggagaattacgaaggtaacttacgttaccaaccttacatgagcgtttcgtttagttttgaaagaatgatttattctttcaaaacaggtgaagtgatgaagcttacgctgattcaagtagtagccttgttccttgaaaactagatagcacaaacaacgacatccaataattattttttatgcaagaacttagtaataactgatgcgttacggcagcaatgcctaacaaatcgaaggttaagctactaagggcgcacggtggatgccttggcactagaagcctaagaaggacgggacgaacaccgatatgcttcggggagctgtaagtacgctttgatccggagatttccgaatgggggaacccaccatctttaataggatggtatccatttctgaatacatagggaatggaaggcagacccggggaactgaaacatctcattacccggaggaagagaaagcaaatgcgatttcctgagtagcggcgagcgaaacggaatcagcccaaaccagagggcttgccctctggggttgtaggacgtctctttggagttacaaaggcacggatagacgaagcgacctggaaaggtccatcagagaaggtaacaatcctgtagtcaaaatccgctgccctccgagacggatcctgagtacggcgggacacgtgaaaccccgtcggaatctgggaggaccatctcccaaggctaaatactctctagtgaccgatagtgaaccagtaccgtgagggaaaggtgaaaagcaccccggaaggggagtgaaagagaacctgaaaccgtgtgcctacaactagttggagcccgttaatgggtgacagcgtgccttttgtagaatgaaccggcgagttacgatcccgtgcaaggttaagctgataaggcggagccgcagcgaaagcgagtctgaatagggcgaaatagtacgtggtcgtagacccgaaaccaggtgatctacccatgtccagggtgaagttcaggtaacactgaatggaggcccgaacccacgcatgttgaaaaatgcggggatgaggtgtgggtagcggtgaaatgccaatcgaacctggagatagctggttctctccgaaatagctttagggctagcctcgcggcaagaatcttggaggtagagcactgattggactaggggtccttaccggattaccgaatccagtcaaactccgaatgccaacgatttatccgcgggagtcagactgcgagtgataagatccgtagtcgagagggaaacagcccagaccaccagctaaggtcccaaagtatacgttaagtggaaaaggatgtggcgttgcttagacaaccaggatgttggcttagaagcagccatcatttaaagagtgcgtaatagctcactggtcgagtgacgctgcgccgaaaatgtaccggggctaaacgtatcaccgaagctgtggattgtcttacgacaatggtaggagagcgttctaagggctgtgaagtcagaccgaaaggactggtggagcgcttagaagtgagaatgccggtatgagtagcgaaagacaagtgagaatcttgtccgtcgaaagcccaaggtttcctgaggaaggctcgtccgctcagggttagtcgggacctaagccgaggccgaaaggcgtaggcgatggataacaggttgatattcctgtaccacctcctttccgtttgaacgacgggggacgcagaaagatagggtgagcgcgctgctggaaatgcgcgtccaagcgattaggctggtgaataggtaaatccgttcaccgtgaaggctgagtcgtgatggcgagggaaatttagtaccgaagtccttgattctacgctgccaagaaaagcctctagtgaggaaagaggtgcccgtaccgcaaaccgacacaggtaggcgaggagagaatcctaagacgatcgggagaactctcgttaaggaactcggcaaaatgaccccgtaacttcgggagaaggggtgcttcctcgggtttatagcccaggggagccgcagtgaaaagatccaagcgactgtttagcaaaaacacaggtctctgcaaagccgtaaggcgaagtataggggctgacacctgcccggtgctggaaggttaagaggaggggttatcccttacgggagaagctctgaatcgaagccccagtaaacggcggccgtaactataacggtcctaaggtagcgaaattccttgtcgggtaagttccgacccgcacgaaaggtgcaacgacttggatactgtctcaacgagagacccggtgaaattatagtacctgtgaagatgcaggttacccgcgacaggacggaaagaccccatggagctttactgtagcctgatattggattttggtacagcttgtacaggataggtaggagccatagaagtcggaccgccaggttcgatggaggcgtcggtgggatactaccctggctgtactgacattctaacccagcaccgtgatccggtgcggagacagtgtcaggtgggcagtttgactggggcggtcgcctcctaaagtgtaacggaggcgcccaaaggttccctcagaatggttggaaatcattcgcagagtgtaaaggcacaagggagcttgactgcgagacctacaagtcgagcagggacgaaagtcgggcttagtgatccggtggttccgcatggaagggccatcgctcaacggataaaagctaccctggggataacaggcttatctcccccaagagtccacatcgacggggaggtttggcacctcgatgtcggctcatcgcatcctggggctgaagtaggtcccaagggttgggctgttcgcccattaaagcggtacgcgagctgggttcagaacgtcgtgagacagttcggtccctatccgtcgcgggcgcaggaaatttgagaggagctgtccttagtacgagaggaccgggatggacacaccgctggtgtaccagttgttccgccaggagcatagctgggtagctacgtgtggaagggataagtgctgaaagcatctaagcatgaagcccccctcgagatgagatttcccacagcattaagctggtaagatcccttagagatgatgaggtagataggttcggggtggaagcgtggcaacacgtggagctgacgaatactaatcgatcgagggcttaacctaaaacgaaaagcgaagtaagccgtttaaatccgacaagcgttggaagcttttgaatcagacgcgctttttgcgtcagaatcaaaaggtgaaacgatcgaggatttggcttacgtagctggacatattattggaatacgttgtgcgtgctatctagttttcagggaacaccctgtaaagtctagtgacgatggcgaagaggtcacacccgttcccatgccgaacacggaagttaagctcttcagcgccgatggtagttgggggatctccccctgcaagagtaggacgtcgctgggcaattgaagaaaggcgagagacctgagggtttctcgcctttttgtatggttttatatcttaattactttttctatctttttattttgtgtcaatcgacttcttcgaaagctacgtaggggtgggagaagcaagaaattcgaggaagcaagtgatgtcagaccggagtggatatttgaagatccatgaggatctggcagcgcgcagctgacgaagaagttcgccgcttatcgcgccccgtatgagaacacggaagttaagctctagcgccgatggtagttgggggatctccccctgcaagagtaggacgtcgctgggcaattgaagaaaggcgagagaccttgagggtttctcgcttttttgtatggttttatagatgagttttcactagctccaagccctccttcatcacgttcgcggaattaatctcaaattcgcggaaatatcatataaaatcgcggaataaattcaactatcgcggaattatctggaatatcgcggaattattaacgactttccacttattgccctcatatatcacgctcaaagaattaaccttaaccctaatcatccttttaacacattaaaactatcaacaactcttcactcgacttaaaataagagaagaggtgaaggaatatgagtaaaacggttatcgtctggtttcggcgggactttcgtttaaatgatcatactgcccttgaaaaggcaattgcttattgtgaagaaaacgatgctacctgggtgggcctttttcaattagatccccattttacagaaaacattgatcttcatcatgattatttttttcaaacggtcgcgcaatttcaagagcgatgtatagagggaaatttacctttccaaattgtatatggagatcccattcacgtatttgaaaaagtaacggatactttaaatgtgaaagctgtattctttaatgaagatgaggcaggttacggtgcaaggagagataaagaagtatgtaattggttaacagaaaaagaaatcgaatcatatagttatcaagattattacctacatggttcccaagcagttaggaaacaggatgatatgatgtataaagtatttacgccatattataagcagtggcgaactttgaagaaaccgcaagtgcttcatattgatcaaaagagagctaaaaagtatgcccgtgaatttaatgattatctagatgacagaacagaattcacaagcgttttaaaacggtgtgggcgtcattggaaagcaataggggaaaagagtgcacagcagcgtgcaaggcgttttgcgatagaaagattaaaggactatgatgatcatcgtgatgtgccttcactcattgggacaagcaaattatctccctatttaaaaacaggcacactttcgattcgaactctttttcatatggtagcagaaaatgacaataagggtgcagaaacattcatacaggagcttgcctggcgagatttttatggaatggttcatgcagagtttcctgaattcaggaatagtgagtttcaaacgaaataccgaggaattccttggaatgatgataatgaaaaattgaacaagtggaaaaaaggtgaaacaggttttccgattgttgatgcggggatgagacaactaaatcaagaagggtggatgcataatcgactacgtatgattaccgcctcgtttcttaccaaagattatcttattgattggagacttggtgaacgttactttgaagcaaagctgattgattatgatgagtcttctaatactggaggctggcagtgggcatcttctaccggaacggatgcagttccttattttcgaatttttaatcctacgacacaagcagagcgttttgacccggatggcacttatattagaaagtacgttccagagttaaagaatgtcgcgaataagtatattcatcaaccatcaaaaatgagtgaggaagagcaaaaggaaagtagttgtgtcattggacaagattatcctcatccaaccgtcgatcatagagaacagcgtcaaaaggtacttagtgtttataaagaaagaacatagcgagatcaggtgcttcttagcatctgatcttttttgtgggataagagaatgagaacggtgcatgctaattggaagagactgtaacgtacggagatgattacttttgaaatggtttaagagaggtgcatctgaaaaaccgagtacattagaagaaatggtcaaggacctgaagcaatcaatcgattttgttgcgtatgagaacaaagaaagtgatcagccttatcgtttaatctactttgcctctcttattgatcctgaacagttacatcgtgatattttacctgtaataaaggagtgcgaatcgaaatcgctcgaagatttaaaaggcatccttccaattgagaatattgaaatctcatcaaaactgtcactcatccaagaacgtttattggaagggcatgtcgctgttcagctttcaagggggcaaaaagtactgctcgttaacattagtctacgtaaatcaagggatctctctgctccagaaattgaatttagcgtaatgggaccgaaagaaggtttagttgaggaccttcatacaaatatgaatttacttaggcgcagaattccccatcccaggttaaggatgaaggaaattacagtaggaacggttagtaaaacaaaggtggtagtcgcttttatagaaggtgttgcaagtgagcagaatatcaacacagttatgcagcgtctggaagatcttgattttgatattatctctgattcttcatttattggtcagatgttagaagataactcattctccgtttttccacaaatgattgatactgaaagaaccgatcggattacggggcatatgaattttggtgcttttgcaatcttaacagaagggtcttctaatgctttaattggtccgataaactttgggcaattgttagtttcgtttgaagattattatctaggttggaatattgcttcttttttccgtattgtacgaatgattgcgatcttggcatctattattgcaaccccattgtacgttgccgtattaacgtatcattatgaattatttccatctaagctattagcgacgttaatttcttcaagaagtgacattcctttttcaccagtcattgaagtgttttttcttgaagtcacgattgatttattacgtgaggctggggcaagaatgccgacgaaagttggtcaaacacttggtatcgttggtggtattgtcataggaacggctgcagtagaagcttcccttacgagtaatatccttctaatattagttgcgttgtcagcgctagcgtcttttacaacgccagtttaccgtatgacaaacaccattcgatttttgcgctatcctttgattgtgttcgctcaatttctaggtttgatcggtgtagcgctgtttggcttatttatattgacacatatgattcggttaacctcatttggaaatccgtatctggcgccattatatccgccaagaataaaagattggtatgactctttttttcgtttgccttatgtgatgcaaaaaaacaggtttcaattttttcgaggaaaccaatcaacacgctttgaggataagaaaaaaaagtcaaagcattcgttggactttgatgagcagtagagggtgagttgtatggagcagaatcgaaaagatcttctaatttcaccattcctaatcatgtttattattcatagtaatcaagtgggagtcggaatattaggatttccgaggtatattgcggcttatacagggaatgatgcctggattgtcgtgattataactggggtaattttccatgtttttatatggatgatgtaccgtgttcttagtgatggctcgttcgatattatcgaccttcataataaatggtttgggaaatggattggctccgtatttaacattgctctcatgatgtacttactattaggtacgattgtcatactacgcacgtttatagaagtgattcaggcttggatgtttcctgagttagcgacatggatcccagtggcgatgtatcttttgttaacgtattacgtcctagcaggagggtttcgtactgtcgcaggtatttgtttttttggagttttaattccgatgtggttagtatttacggcaacggctccaatcaagttttcgacatttagtaatttactgccaatcatggatcattcgttaaaagaaattgctcttggaacaaggcaaatgacgcttagttttgtaggcattgatattttattactcgcatacccctttttaaaaaatccgaaaagctctcggatatgggctcacatgggtgtgctattaacgactttggtttatacgatggtgatggtcatttcgttagctttttatagtgagggtcaacttcagcagtcaatctggtctacattaattgcgtggaaagtggtagagcttcctttcgttgagcgctttgagtacataggaattaccttctggtgttttgttgtttttccaaacatttgtctcacgatgtggggggccagtcgtgttggtaaaaaagtgcttcatataaagcagaagtactttatttttattcttatcacatttgtatttatcgcatgtgtaatggttgtcaatcgcgatcaagttgactatctaaatacgctaacctctataatagggacttatgtgtattacttttatatcccatttatttttctatacagtacgatttggagaagggtgacaaggcgaatatgaaatatgtgttttgcttactcctattttgttttctacttacagggtgcgtagcggaagaaattattgatgaagttcccattctgtttattgtaggatatgaccagggagaagatggaaagataaaaggaacgatctccctacaaacgtttgaccccaatcaagaggtagaaacgagagcttttgaagcggaagcttatacgagtaaaggtcttcggaatcaactaagcggtctacctaagcccatatcgattggaaaaatggctgtattgctatttagtgaagacatggccgaagaaggaattattgatattctagatagtttcttgagagaccctgcagcaggccgattgatttatattggcgttgtagagggaagtgcaagtgaattaataaaaaatgaatttcaatatttgcaaggaatcggcccatttttacagaatcttattaagcaatcagttgagtatgggaatatgccacaaaacaatattcatttattcgattacaaatattatggtgatggaatggatccggttactcctattctgaggatggaagaaactgaggttaaaattaaaggtcttgctttgtttgacgatgatataatggttgggaagctcaacctggatgaaatgttcatatttgctttgattaataagagtttcagcgcaggattatatgagttagagcttcctgatggcgagtacgcaaacttacaaaaaatcaaatcaaaagtaaaatataaggtgaaaaatgggaataccaatccttcactaaacatatcagttaagttaaatggcaatatcgtagaatatacgggtgaaaagttgacgaaagcaaagaagacagaaatcgcgcaaaccttcgaaagaaaggtggaagcgcagggaattgagatgataaaggaatttcaaaagttaggcattgatcctttctccatcggtgaccatgctcgaagtcaaacaagaaactttgattttaaaaaatgggatgaacgttatccggatctccctgttacgattgatgtaaaagtgaatattggagaatcaggtataattgactaaggaaaggcgtggaaggctcatgagcaattacaccaatttgagtgatatcaaaaaccgttttaaaaatcgattcgatttttaaaacggttttttcatggacctttacttagataataaggtagaggagtgggcgaatatgattcttcttgatggcaatcgtttatcacttgcgcagttaagagaactattgtataacggtgaacgagctggttgttcaaatgaaagtttacagagggtagatgagagtagagaagcagtggaaacgattgtggcgaacggcaaaacggtgtatggcattacgactggatttggtaagttaagcgatgttcatattccttctgcggatgttgatcagctgcagttaaatcttatttattctcatgcgtgcggagtaggagacccgtttcccccgattgtctcaaaagcgatgctattgcttcgtgcaaatgctttgctaaaaggcttttctggtattagacgtgaagtcattgaacgcctgatcttgtatgcgaatgaggatattcttcccgtcgttccccaacagggttcgcttggagctagtggtgaccttgctccgttagctcatctcgccttgccgttactaggagaaggagaagtattttacctgggaaaacgcgagaaagcgatcgtcccgttaaaggtgaaaggaattcaaccaatacagttaacagcaaaagaaggtctcgccttaattaatggcactcaggcgatgacggctatgggagctgttacttatctagaagccgagaaacttgcctatgaagccgatggtatttcagcgctaacattagaaggattacgagcaattacagatgcttttgatgaaaaaatccacttggcgcgtggatatcctgagcaaatggatgtagcaagaaggttaagaaaacttttaaaaggcagtctactaacgactaaacagggtgaagttagggtgcaagacgcttactctattcgctgtatccctcaagttcacggtgcgtcctggcaggcgctgggttatgtgaaagaaaagctcgaaatcgagatgaatgcggcaacagataacccacttatttttgatggtggggcgaaagttctatctggaggtaactttcatggtcagccaatcgcactggcgatggactttctttccattgccatggctgagtttgggagtatctcagaacgacgcatcgagcggcttgttaatccgcaattaaatgatttacctgcatttctaagcccagagccggggctccaatcaggtgctatgatcatgcagtatgcggctgcttccctcgtctctgagaataaaacgttagcacatcctgcttcagtcgattcgataccctcttcagctaatcaggaggatcatgttagtatgggaacgattggagctcgccatgcgtcgcaaattacgacaaacgttagacggattctcgccattgaagccatttgcgccatgcaggggattgcataccgaggtgaagagcaactctcacctgaaacgaaacgaatttaccaggcgggtagacagattgttaaattaattgattgtgatcgcattttttcatatgatattgagcgtttcacagactggttgaaaaacgagaatgagattacgaaaattgtgctaggattaaagtaggtatgagtgaaatgaaataaagcaataagaatgatatagtagatgaaatagatacaatcagggggcctttccatgaatgaaaaagaaattgaaattcttgagattttagaagaaaatgcgcgtattccaatggatgtgctagccgatatggttgaattgtcggttgaagaagtagagaaaacaatcaagagacttgaagagcaaaacattattttgaattattcgtctgtcatcaactgggataagacatctggagtagatggagttgcagccatgattgatgtgaaagtaacaccaaaacgagacgttggctttgatgaaatcgctgaacgtatttatcgttttccagaagtgaaagctgtttatttgatgtcaggtgcgttcgatttatctgtacagatagaaggtaaaacaatgaaagaagttgccttttttgtctcaaataagctatcgacgctagattcagttctttcgacaacaacgcattttctgctaaagaaatataaacatgacggtgtcatctttgagcccgaaaagaaagataagcggattgtggtgtcaccatgaagcatgttcaacagcaatatgtgtctaaaaccgcttcgcaattaaaaccatcaggcattcgaaagttctttgaccttgcatcacaaatggataacgttatttcacttggtgtgggtgagcctgattttgtgacaccgtggaatgtatgtgaagccggctacgcttcacttgaaagcggttatacagcttatacggcaaatgcagggttacttgagttaagagaagaaatttcttcgtatctgtcagagcaattttcactcaattattcagctgaatctcaaatcattttaacggtaggagcaagtcaggcgattgatttggcttttcgagcggtgatagatccaggcgacgaagttatcattgttgaacctggttttgtcgcatatgctccagctgtcaccctcgcaggaggtacgcctgtttccttagagacaaaggcagaagatgagtttaaaatcactcgtgaatcgcttgaaaaggtgataacgaagcggacaaaagccattcttctttgttttcctagcaacccaacaggtgcaaccatgtctgaagcagaactgaagagcgtaacggacgtaattgaagaacatgatcttctcgtattatcggatgagatttatgcggaattaacgtatgatgagacgcactacagcattgcacgtgtaaatggaatgagagagcgtacaattctaatctctggtttctcaaaagcatttgcgatgactggttggagactaggttatgtgaccggtcctgaagagatcatctcggccatgttgaagattcatcaatacacgatgatgtgtgcgccaacaattgcacagcatggggcactcgaagcgttgaaaagtgggagagaagatctcgagcgaatgaaaaagagctaccgtcagcgaaggaatttcctcgtgaaatcatttaataatatcggtctttcttgtcatatgccaggtggtgcattctatgcgttcccatctatacaggcaactggaatgacgtctgatgaatttgctgaaaagctattagaagaagagcgggttgccgttgttccggggcacgtctttggtgccggtggcgaaggatatgttcgctgttcatacgcaacatccattgattctttgcaggaagcggttaagcgaattgaacgatttgtcagtcgtcatcaatcacaggcataattgagaacgccgtccatcacagtggacggcgttatgtattaataagacgttggatcatctttacttattgtgataccagaagaagattgttttgccactagctgtcgtagcaattcattttgctcctgatctgatgcgttttttcgcttcataaagctcatggtcttaaatagaaagacgatggttaaaacaatgataaataaaagaatggcgacataaagaaaaccaaaaagaccaaaaagcacaccaaaaccttccattccactctcagacatactctctcacctccattttatttgtatattttaccacttcttcatacgaatgaaacctctttaaaaggagaggcgcatcactctccttttctaaacggacgtggtgtgatattattatcaagttggagagttcgtaattccctcctctcgtaaaacaaaactagggaccgtgaaaatgatagcccaaatctctgaatggagttggggtttttcatgcgtctcccttactgaataatgaagggggcttttttatgtcttttatgattccaaagaaggttgaagtacttggagaagatattcagaaaagcgaattaaagtatcatcataaacgggtagccgttacgaaagaattcacatttgatgccgctcatcatctacattgctatgatggcaagtgcaaaagcatgcatgggcatacgtataaattagtgatcacgatcagcggatttgttaatgacattggaatatcagttgattttggtgagattaaaacattgtttaaagaagtgattgattcgaagcttgatcatcgttatttgaatgacgctcttccaaatatgaacacaacagctgaaaatatgattgtttggatgtgggaacagttggatcaggccctgacagaacgcaagatgaaagatcttggtcagcgcatcgaggaactggttctatacgagacaccaacaagctacgcaacgctgaagcgggaatggatggaagacaatgaataaatgggatctgccagaacaatcaaaatacatgcagtgggaattaccgatggttgaagtgtttgagacagtagaaggagagggaacgcgagcgggatttccaaccgtttttgtacgcgtcttccactgtaacctacgctgtagctggtgtgatacgccttacagctatgcaccggataaagcagaatacacaggatcaattgcctccatcattgatcaaattaaacaatataagagccgtcatatttgctttacaggtggagaaccgctgattcatcgtgaaaaatcaatggcacttcttcaagccatggtcgatctaccgcatattgaagatatacacattgaaacgaacggggcgattgatctcactccgtatgaagccgttcgaaaagacgataaagcatggcaggaaaaagttcgatttgtgatggactataagcttcctgattctggtgagcagcatcgtatgcttcacgataactttacactgctcgatacgcaggatgaaatcaaatttgttattgggtcagatgaagatttcactgtcgctagtgaggttgttgcagaaaatcatcaaaaaggccaggtcctttatagcccagtgtgggaaacgatgccgccacaaaagctcgttgataaaattctagaagccggattgagtcaagtgaagctaagtatgcagcttcataagattatttgggatccgaatcgaagaggtgtgtaagatgagtaaaaaagcagtgatcgttttaagcggtggcttagatagcacaacatgtatgggaatggcgaaggaaaaaggatatgagctttacccgattacgtttcactatggtcaaaagcataaccgcgaagttgagcaggcgaaaaaagtagcgaactattacaatgcacctgatcaccgcattgtgaacattagttttctaaatcaaattggtggtagtgccctcacggatgattcaattgatgtaccgacagatatggatgaagatgagatccccgtaacttacgtgcccgcacgtaacatgatctttctttcccttgcatctgcttacgcagaagtaattggtgcagaagcgatctatatcggggtatcggccgttgactacagtggttatcccgattgtcgacctgagttcattgaaagcatgaatgagaccgttaatttagctacaaaagcaggcgcaacaggtagtgagatgaagattgagacaccgcttattaacttgacgaaagctgatacggttggcgaagggctaagattgaacgttccttatgaactaacaacatcttgctacaatggtgaagaagaagcgtgcggcgagtgcgatagctgccgtttgcgtttgaaaggttttgaagaggctggagcggttgatccgattccatataaagcttaattcatagtagaaaagctgcctgtcgggtgatctcggcaggcagcttttttgagatttggacaataaaaatgaaatttagccaatatattcaccttttggccaataaacttcttatggaagacatgtttcgacaaatagcgcaggtgacaggcactgcaaccctgcaccccgcacttactctggcatttcaccactataaacagaggatggacggataattcggttattttcattttgctcatagacgtgagcgatccaaccggcagttcttgctgctgtaaatgtcggcgtaaatagttctgtaggaagttcaatggatcttaagatggctgcggcatagtattcgacattcgcataaagttttcgatcaggtttgtactcctgtaaaagacgtacagcagtttcttctacttcgtgtgctaattgaaactcttcatcatcataaaagtctgatgtgatttcgcttaaagcggcagcacgggggtcccgggttttatagacgcgatgaccaaagcccataagcttctcacgattttcaagcttatgtcgtaatactttctcaacatctccatctcgcttaatttcgtctaacaaatcaattacaccagttggagcgccaccgtgaagtggccctttcatagcaccaatcgctcctgtaatagctgatgccaggtcactttcagttgaagcaatcacgcgtgctgtaaatgtagacgcatttagaccatgctccattgttaaaataaaatacgccgttaatgctttcacgtgattgtcctgaggttgcttacctgtcagcatgtataaataattccctacatgagagagtgataagtctggttcgatgatcggtaatcctttttgagttcgatagcgataagcaatgattgtcggaacaatactcagtagttgaatgccctgttcttgcgtcgcaggaaactgaaacgattgattaccgatggaagataatatggttcgaacaacgctcatcatttccgtgttgtctggcaaacgattgataatttctttatgactcgtcgataaaactcttgcttcaccaagtgatgaagtaaaagcagttagttgtttagcatcaggaaactcgccattccatagaaaataggcggcttcttcaaatgacttttcttttgcgatgcgtttggcccattctcctcgatagacgagccatccattctctccgtccacaaggctgatcttggaatcagctgcaacgattccttctaaacctgcatgaatcatatgctcaactccattctgttcgtcttgtttttagtctatcgtttcgttatgattatgactaataaattattagcttataattaatagagattcgtaatcaataggagtgcaataagatgaacatcaattggattaaaacgtttgttgcggcagcaagttacgaaaattttagagagaccgctgagaaactatatcttgcgcaaccaactgtaacagttcatattcagcagctcgagaagcaggttggtagtaagttgtttatgaaaagtggacgtcgtgttgttctttctgaagcaggaaggcagtttttacctcatgcgaaggaaatgatggagcaatatgagcaaagcttacgtcatatgaatggctggcgacaggggtaccatcacaaattaacgctcgctgtatctccattgattgcagcaaccgttcttccaagtgtgctacagcaatttatgaaagcttatccatcgattgaagttgttgtaaaagtaagtgagtcgaatgagattggagggatggtagctagaaatgttgcagatttcgggctttctcgcatgcaatcggtagagacccatctaaagtgcgagcaaatcggagctgatccgattgtgcttgtagttccacatgatggtggtgatgctgaaaccagtctgccgctttcactaaatgatttttgtacacagttaacgctattaacatataatcaccctgattactgggatgatttgttagttgagttaagatcgaaatacgaaggcattcggacgatggttgtttcacaagttcatattacaaaaaggtttattgaggaaggactggggtattcctttctaccacgttcatctgtccaacgagaactatttgaagggaggatgctacaagtagatacgagagaaattagactacctgaagttcacacgtatctggtataccaccatttatcgaaagaagctgtgaaattcaaagaatttatcgaacgaaatctccaatgaaaaagcccgatcagcgtcctgatcgggcttgcctcttattttccgagtgtgaaataagagtgtgtgggataggtgcgtgagtgtagatcctaaaggctagcttacacgctttcctagtatgtgttaattgaaaaaaactatgcgtgattagtaagaagtaagtccccaaattttccactctttatcttcttttgtagcaaaaaaatgcatccttacagggagttgcgctgatttttttgtgataagcacgtcaattaaataggtatgatctgccacttttttcttacaggctttcaaagcaggtttgtaatagtgagacgttttctttaaaggagaaatgcttacaatttgccaggttttcgtgtcctggtttgtagccataagtcctgataggagtgagttcgctttagaaggaagtccttgcttggaattcacctcacttaaattcggggttggacactttccttgaagaagctgtaccggactggctgcgttcgaagacattggtaagagaaagaaaataacaagtgttgcgctaatgtatcgtttcacgatgcattccacctttctctgcttacagtgtccagaatgaataaatgtatgcagtgtgatcgaatgtacgttcggtttgtggtatactttatgtaaggggagggagcagaattgaaaccttcaattgaaacgaaaacagctcgatcaatcttaacaaaaggaactggatttcttcatgggtatagtcatacacttaatccttatgctggatgtgcgtttgggtgttcgtattgctatgttagaagaatgccgatatccctttttagagaagaagattggggagcctgggtagatataaaagaaaacgcaactgatcttgtgatgaaagaaatcccgaaagcacgtaaaaagggacgggtatcgatatttatgtcttcttccacagatccgtatcaaccagtggaacataaaacacatttaacgagagggttgttagaggcgatgatcgaagagagccctgactttttgtttcttcaaacccgttctccactcgttacgagagatatcgaccttctaaagcaattcaagaataaaattcttgtaagtatgacagtagaaacagatcttgagtcagttcgcaaaacctttgctccgtcagcaccaccgattaatgcaaggttaaaagcgattcaagagttacggtctgaaggcataccagtacaagctgctgtcgcaccactgctaccatgctcagagcaatttccattaaagttagctgaagtaacggatcggcttacactagatgacttttttatgggagatggaagtgggggcaaacgaacggagcagcttgggattcgaaaaatatttgaggaaaatggtttgaatgattggtatgatcggcaggcgtatttgaaaataaaacgtcgactacaagaggtttttcctgagaacgcgatttatatttcccaagaaggtttttatccaccaaaaggaagcgactgttaaatcgctttgaacagaaattacaccaaaaggttagaagtgattcttctaaccttttgtgtggcgacgctattttaatttttattttaatttctgagcatttccattaagaatttttaactggtcattctcataaccgacttgatacgtaacgttatagagtgacgttgttgtttttttatcctcagttcgttcatttgctttaattgttgccgttacttttacttcgtcattggtttgatttaagcttccggtcatattcgaaacttcaacattgagagtatggatgtaacccttccgaaaatcttcataaaccatctcgctttgccagcggctgccaagcagtgagtaggctgttacatagtcttgagtggaaagactttcataaaagtaaccaatgaggtaagtagcgttatttttaaagtcttctcccgttaatccttgaggcgtagctacttcttctttactttcatcatcgactgttagcttaatcggttcatcagaccagcccttgatttggtcgatgacgttaggaagcggaatgctaaacccaatggcgcctgaatctgtaccagcagaattgattgcaatggcttcacctgtagtagcatcgataagagggccaccactgtttccttttgtaataggtgcggatatttggtaaatatgttcatagcgataaggttctaaaataaactctcgatccaaaccgctaataatcccggttgttacagtgttttgtagcccgagaggacttccaagagcgatgatgttatcgccaacttctgccatgcgttcctcagtaactgaaagcgggggattctcttttagcccaggtacgcgtatgaccgctacatcagttgtatctcccataccaataatttgggcttcgaattgtttagcgtcggacgttttaactgtgatcttttgtgctccttcaactacatgagcattcgtaatgacgtcaccctccgaattgtagaggaagccagagcctgaagatgacccgtcttttaaattaacctcaatttgtacgacgcttttttgtgtttcatgaatcacggattttaaatttggttcttctgctgtcttttctgatgtatctgttttcttaccgagagaagaagttgctttaacggccgtactagagtaggattcatgtaaaaaataaaaacctatgcctcccataactagaatgaagagagaactagtcagggatagtagtaaagctagtttcttagacatccgttcttacatactcctttcagttaattcaaataccatgtaaagtgatcaacttggacggtgaactcatcaagattctccacctcatcaccaacatcatagatcataaaatcaaattttcctgtatcgtcaggatatagtttgtcgggattaatatacacttcaccttcatcaaattcgtttccatctccgtctattactttataggaggctccaatcgagtttaccggaacagtagctttgcttgtcacttgaccggttacctttaattcgtcgtaatcggttatttccgtttttaaatcggttagttcgattgcactcgttcggttcatttcttcttcttttgcagcaaccaccatcgcatgttcaatgcgcttctgttgttcctcttcaaaagaatttcgtcttttttcaatgacggttttgagatttgataatttttcatggtctttattaatctttaaaccttcgtcaacggcgttgagtgcttctgtaaagtgattctcttctaaaaattgattcgcttcattaattgtgaagtctattaattgactgcggatttggctagcaatttcctgcgcctcatcaacctgtaatgtttctgctctcgtcaaaacaggtttcaattcatcaatcgatttttttcctttcatatcatactttaactcagcaaccatgacggttgttcgagcagaggcgatatcattctgtaaatgagaggaaagctctcccttataagcagctgttatatcttcagcttgtcgaattaattcaagtgcttcatcatagtggtcctgctgtctttctttttccgcctgattaagcgtatcttcgacgttaagtgcagtgactaccatatttatattcatttccgctgctgggaaatgagctcttctttttttagcttcattaaattctttttgagctgcttcaaaatcgcctttcttcgccaactcttctcctttttcaaatgagcgaatcgccgattttgttaccgattcttcatatagataatagcctgaaaggcagctaacgaggaaaaggaacatcatcaatggtaaccaacgccacaaaatggaaagacttcggttggatcttgtctgcggaatcagttcttttccgcaggagaagcagaattgttcattttcgcctctcttttttccacaatgtggacaatacattcttattccacctgctttcaatctcaatcactagttatattttgacacattttattgatgagggaaatatcttttaaagggttgttggtgaattgaaatataaagcaattttcacgcaaatattgtcctttctactttgacaaaaccttatatgagggagtgattgattcaaaagacgtaattataataaatgtgaattaaagtaagtgaatagtcgtagggccaagatcctgatatcttgtaaaattagtggtttcatacgtttgtcccgtgttttagggtcctgttcacactatatttcctttgataagatgatctcaagaccccctttcaaatattccgttaccaggaagaccggcattcgccggtcctttttttttgtgattgctagtgaaatcaaacatgctcaggggctattatgagtaagagaaacaacatttattttaaagaaattcattcttttttgaaacctcaatccatgcagtgtcgtctaatagttgaaaacccttattcccttagatgtagctacctaggtctctttctggtagctgctttttttatgttcattgcaataatgagaaagaattggtataatgactaacgaacggtaggtagtatcctgcgtttttatttttcttgtaaactaacgaacggtaggtaatgtgtaatgaaaaaagattcaactcaagatcgcattaaagaggtcgcactcattttatttgcgcgtaaagggtttgaaggaacttccctatcagacatcgcttcaggtgtgggaataaaaaagccttctctctatgctcattataaaagtaaggaagatctctttttaggtgtcatccataaagtatccgttgattacaatgcgtttttcataaagacggcagaagaattaagcgatcggaagccagaagatcagctttataatttgcttcacaaaaacacaaattatttaagaaatgatgagttggggctgatctttaaacgaatgatgctgtttccaccagaatcgttaagaacagacatatacgctatgtttgaaaaaacagaggatgtgatgagacagattattaagtcaatccttgttaagatggtccgcgaagaggagtgggaacaggtttttgacgcttatttatgcctacttgatggggtgtttgaacaagttttctattattcacctgaagagcataaaaaacgtttggaaaattcgtggtcggtatttattagagggatttatagtggggaggagaagtagcatggcatggatttatcttgtaataggtggtctgatggaagttttgtgggcaattggtttaaaatattccgatggatttacgaatccaattattagtttgttaacgattttaggaattgtaacgagtttttacttttttgcgagagcattaaagtatttacccgtgggaactgcctatgccatttttactggacttggagccgcaggaacagcggtcattggcatggtgtttttaaatgaatcaattagtttaatgaaaatcttttttatcatattgctcatttcttccattattggcttaaagctaaatgcgaaggaagcataggaggagttaacaatggcatggattgcattattaatcgcagggcttggtgaagttggcggtgtgattagtttaaagttatctaaagggtttactaaattaaagccgtctatttttacaatcttatttgggtcgatgagcttttttatgttgtcattatctttaaaggcattgccagtaggtacggcttatgctatttggacgggaatcggttcagcgggaagtgttttaattgggatgtactggtttaaggaaccaaggaatcgaatgcaactagtgttaatatcctgtgtcgtcatttcagttgtagggcttcgtgtagcagagggttgattttgtcagatcattcagatagaatagaattattaattataggaggtgaggaagagatgtctaacgcttttgttcgtacggaatttatggattatgtatcgatttgccgtgcgatttttcatgaagttgctattgaagggacaggtgtgtccaaaatcagcaacttcataagaaaaaaagcgtaaggctctcttaccctgcttcaggcggaatggataaattaacagataagggagcggcaatttgccgttctcttttttctttaagtacaaggcttcatattggcttaaagatgataaattccagattaaaccacaggtaaggtgtaaccttatttgtggtttttttgtttgtagaaaggatgataaacatgatatgtactgcacaaggaattagtaaaatgcttggtggaaatagcttatttgaagatctttcatttgaagtgatggagaatgacagagttggaatcgtaggtaggaacggaagtggaaaaacgactcttttaaagctgatagcgggaattgaatcaattgatcatggggtgattcattataaaaaggggataaaagttggttacttagcgcaaatcgcgagtgattccgagttaacagtcaagggtgttcttagaaaagctttcactaaccttattacaatgcaagagcgaatgagcgacctcgaatcggaaatggggagaggagatgagaatgatcgtacgttaaaagaatatggacaattgcttgatgtttttacaagaaaagggggatatgaaattgattcgtctatccaccatgtcgcaaatggacttgggatcaaggaccttctttcaacatcttttgatcgactgagcggtggggagaagacgaaagtaagtcttggtatgttattgcttcaagaacctgaattgttgttactggatgagccaaccaatcatttggacgtggaagcagtagaatggcttgagacgtttataaagcaatacaagggaacgattgttattgtttcgcatgatcgctattttcttgatgaagttgtaacgaaaataatggatgttgaagatggtgaattacatgtttatcaggggaactacagtgattttgtagagaagaaagaaaaattgttgctggctgaatttgctgcttatcaagagcaacaaaagaaaatcaaaaaaatgagagaagccattaaacgattaaaagaatgggcaaatcaggcgaatccaccaaatgctgcgcttcataagcgtgcgaggaatatggaaagagcgcttgagcgcatggataaaataaagcgacctcttctagaacgaagaacaatggggttggaattcgatttgaatgagagaagtggaaaagatgtcgttcgttttgaagatgtttcaattggttatcaaggacgatcattagtaaagagtattaacttgcacattcgttacggggaacgggtggcgatagtagggaaaaatggaagtgggaaaacaacgctactgaaagcgctacttggctctattccgcctcattatggaaaggtaagcataagtggaagcgtaaaagttggttatctgtctcaacatgttctgaaagaaagtggagagaagagagttatagatgtgtatcgggatactgcaaaggtttctgaatcggatgcaaggcatgagttagccagctttctcttctatggttacagcgttttttcgaaagtatcatcattaagcggtggggagaaaatgcgactgcgattggcccagttaatgagtcagaaactgaacttgttagtacttgatgagccaacaaatcatctcgatattgactcgagagaaatattagaagatgcactcgacaaatttacaggaaccattatttgtgtctctcatgatcggtattttttaaataagtgttttccggtaacgtactggatagaaaataatcatctccaccactatatttatacttacagtgaagcgaaacagaagtaccttcaaaccttggaacaagaaaaagaatctccggttaaaaagaagaagactaaaacggatccggtggaagcggaggtaggacttgatgcagaagcagaagtagaaaaactcgaggcgcgtctctttgaaattgatcagaaaattagcgtgacgaattgcagaagagaatatcaggatttatctgttgagaaagaaaaacttagttttaaacgagaacaattatatgaaatgttaatgggggaagagagatgacagagaaaaaagtgattcatacggtttgtatgccacacacagtcagtagtctagtcgtagactttcgggagttaggggtaaaggaaggaatgactttaattgtgcatacctcacttagttcacttgggtgggtgtgcggaggagcagaagccgttattcaagcgcttatggaagcggttggagaaaagggcacgcttatcatgcctgctcaatcggccggtaattcggatccggcagaatggatggcgccccctgtacccgaatcatggtggccagtaattcgtgaaaatatgccggccttctcacgcgaaacgacagcaacaagaggtatgggggcgattgctgaactttttagacgatttccaggggttgttagaagtaatcacccaatgtactcttttacagcttgggggaagaatagagactacgtaacggagaatcaaccgctacaagcaggatttggagaaacatctccgttagctaaaatatacgagctagatggaaaaattcttctcatcggtgttggacatgatagcaatacctctcttcacttatccgagcatgcgaaaaaagatcaagtgtatgttacaaaatcagcggcgttgttggagaatggtgagagagtttggaaaacctacaacgaaatcgactatgattcagattgttttgagaagataggaaatgaatttgagagaattgaaaactatcaaagaatgaaaatcggtggtgctgtatgcaaattgcttgatcagaggaaggtggtggactttggacggaaatggtatgcagaacttttttagtagcagttttgatatgatcactgtttagccataggactttctctatacgtacaattgcatcgttaagtaaatagtactttaggagtgtacgaactataatgataaaagtaccttaacaaatttaacgaaagaacttctttagagaggttcttttttattatcacgtaactatgcaggaaaatacgtctctttacaagaagatatgatttgaaacatttttctccctccaaagacctatttaattaactatcaatttttagaaggagtagctatgacttataacaaagataatattacctataaaagctcgagttctcctcctgacaatatattacaagaagaaagggataaggtaacgaatttagtgaagtattatgaaggctctacaacagctcttgtcgttcaaaaaaatgagaaatggctgtatttaaacgctgcagctgttcatcttcttggctataacgattctagtgaattagaaggaaagtcgatttgggagacgattcatgcatcagagagagaaactgttttaaagcgaatagaggcttcgatcaacggagtgaatcctggcgctttcattcaacgatggataaagaaagatggatccagcgtttctgtagaggttttggcgattccagtggagaattttcttggtcaaacgtcagcaattataaaagaggttgatcatgagagcaaaaatatacaggaaatgtacgcaaactatgagctcattactgagaacatgaatgagattattagtttacttgatgctaacggaagactactttatgtctcgccttcctatcgagattatgctcgagcaagcatagacgaggaaattgggcgcagttcaattcgatatattcataaggaagacagggagcatgtgagaacagagttttttaaactggttaaattccgcaaccctttaatgattaagtatcgtatgcagcgaaaggatggggtttttcgttatattgaatcccaggggacctgcatcttaaacgaagaagaatgttcttatgttgtcgtttcaagagatgtgaccgaaaaacaccaggctgagatgagactacaattaaatgagaaaaagcatcgcatgatcctagaacacagcaatgacttaatatgtatgatgaatcatgaggggatttctgtctacgcctcaccttcctataaggaagtattaggttatgagcaaagtgaagttatcgggaaggatatactaacttttatccatcctgaagattatgagaaatgtcagaaagccattcaaaccttaacggaaacgaaagaatcgattacaaccgtttatcgaaaactgcatgcttctgggcacagcgttattttcgaagctaaagggatggctgttagcgagggggatgggcaagtaaatcattttgtatttatatctagagatatcactgaaaaaatacagctagagcaatatcgagaaaatattgagaagttagcaatcattggggacgtggcagctggttttgcacatgaaatacggaatccgcttacgtcaatcaagggcttcttaaagcttttagcgaagaaggaagcagaacacgatattatgtaacatcagatcattgaaggagagcttgccaaaatagaagaggtgataaatgactttatttcccttgcaaaaccggaggcaggtgaagttgctgaggtaagtttattaaaactaatcaaaaatgcaattaacgttttaacaccgcaggctgcttctaaaaacattagaattaatattagcagtcagttaaaatcaatcgtcatttgttgtcaaaaaaaccagatgaagcaggtatttattaatattctaaaaaatgcagttgaagcgattgaggaagatggcaagatcgatgtaattcttgaagaaaatcaaaacaacgtttccattgagatccatgacaatggagttggaattgaagaagaaaggcttgagcgaatcggtgtgccgttttatacaaacaaagaaaaaggcatagggcttggtatgaccgttagtaataaaatcattaccgagcataaaggtagtcttcgagttgagagtaaacctggtgaaggtacaacagtctatattcgccttccgaaaaactaacctttatttaccacaaacctctctatttctaaaaggatagagaggtttgtgtaaaacagattacatatggttaaccacggtgttaccgacataacgaacagtgaataaatgatatatgaaagaagggatgagatgaccgatctcgttgggattgatgctggtggaacgctgattaaaacggttcacattaagcaaggagaatatgactttaatacatttccattgaaggacatcaatgaggtcgttacctggcttaaagatcaacatcctaaagcaaagttgatgatcactggaggcaaacaatccgtactggctaaattagttgaaaatgaagttgaattggtcccggaattcgaggccacaacaagaggcgttcgagcgattttagagcgatcaaatcttacgctgcccgatgattacttagtcgtaaatgttggcacggggacttcgattcactcagttaatcacaaaagtgctgaacgacttgggggatctggtgtagggggtgggatgctcatgggacttgcttacttattgacaggtcgaacagactttaatgaggttactcaactagctgcaagaggcgatcgtggcggcattgatttaaaagtaaaggatatttatgaaggtacctccccaattggtggagagttaactgcaagtaactttggctttattgcacggattcaacaacaccaagtacgtgatgaagatgtgttggcatgcttaatcggaatgattgcagaatcaattttaatgatggcaataccacttgctaaaactattcctacttctaccattgtatttatcggttccacatttcaatcgaatccattgattagaaagcaacttgaccattttgaagaactatttgaaatcagcactttctttccgcaaaaggggcaatatagtggagcggttggcggtttattatatcgttaaaaatatcatctaaaagaccgttttgttatgatatggttagataaagaaaggatgactgtaaatgccgtggattaaacctgccaaacaatcagatataaaggagcttgaaatctacaaaaatctggaacaccccgttcctgtatttaatcgactgattgcgaaaagtcctgatattttttcaacgtttatgcctttagcagcagcagttaaagcgggtgttttaaatgaatttgaaacagaagcagttgtcgtttttgtttctcatttaaatggttgtgaattttgttataccggacatggaaacttgttaaaagaaattagtggagatgagtctattcttgaggagcttgaaaaatataaaagctccaatgcttttgagagtcatttgaaaagtattctaagctatgccgagaaacttgttacgaatccaaagagcctggagaaagcggatctagagaaactaaaagaacatggttatagtgaaaaagaaatcgttgaaattaatcaattgattgcatatacatcgtatacaaatcaaacgtcgattggtcttgggttataaagagagttttactgacgggttaatccagatgttatttgttaagaaaacgaaaaaggaccttcctaaataattggagggtccttttcaaacatttacttcgttttatagtaatctaatacaccttgataaatgccttctgcaagttcttctctatactcttgtgtaagaagaagtttgtattcttcattattcgttaagaagccaacttcgacaagaacacttgccatctttgattctcgaataactgagaagctctggttctttactccacgattatttgcttccgttacttcaattaatcgtttttgaatactttctgcaagagctttactttccgctgagctatatttatcgtaccaataagtttcaattccgtgagctgcttcactggctgcatttgtatgcacgctaataaacgcatcggcatttaagttattggcgatagttgaacgctctcttagctctaagaacgaatcatctcttctcgtcatgacaacgttcgctccagctgacttaagctttttctcgagataaagtgcaacatcaaggttgatgtctttttctaatagtttaccattgcttgcaccaggatcatgatctccatggccggcgtcgacaacaatggttaagttgtttaatgagtcactgctttgaaggagtaggtaaccactgtgaacgtaagctacttgaccttgatatttaatttttgcccaatctccagcgtaaccgtagattgcaacttcagcattacgtggcaatgctccgatttttgtgccgctcatttcaggagaggttcgaacgtttaagcttgaagctgtgacaatgcccgtttccaacactacttcttctgcctgttctttcattttatatgcgtttacgatactagaagaaagcgctccttccccacctagtaccattaaagaagtcgcatgttgatgaacatatgtttgaacgactgaaattggtttcaaatcatgagctaaaacgactggtgcatcgaatttctccgctagtgaagcggctgctacagcatcaggatagtcttctttatctgcttgaacagtagttcctctagctaaaatgtaagaagagctagatgtgaaaaaggctttgtttacagcaatgttcgttttaaagcggtcttgaccagagagacgaacaactttctttccttgctcctctaattggctgcgtacgtcctctgttaaaacagtcgtcccaccaattaaatagactgttttaatattagatggaagctgaggtgcttttgaaacagttgataaataaataggataattctttattgatgctacgctggaggctgaaagagagtctgctactttcattccgttaacaattattgcggtagatgctctatctagcccagcagcctgattgacggcattggctgtttcaaaacgatctgatccattcaatcgtgaaacggtaaactttttctttaattcattctcgataccctgactaattgcagtcgttccaccaagaatataaatctttttcgttccaagacggtcaagctcttttgcaacgttaggatcaagcactgttgatccagttaatagaataggagcttgtttcactcctgctagaccagagcttgccagtgcatcgaaaggcttatctgcacgagttaggataacggctttttcggctgttgttagcgttcctggcgagactttcttagaaatttcaatagctgtttcaattcgatttgctccactaatacgttcaacatcattactagctgatgttttttccggaaaacttattcctgtaaaaattaaaataatggccataatcaacgtaaaaagctttttccgcacgatgtgtattcccccatattgtgtttgtctgtttttcttatgtacttagtggcctaacatcaacagcctcccttcaaaattagtatcaaatggaaagtatttcttatactatttttaatatcggcctcgaatacgaaagattatagggtccttttgtactaaaaacagataaaaatcgacgggatttgaggaaacttctcttacaaaattcgagttgttggaatttaacagcatttctataaagattgacattatttagacttttctttaaactaatgacaacgaaagacgaagggaatggttaagaagcgatgaagaactaatcttatttattcagatcaactttcaataaatgaaattgagattctggagaataggattagtctgtctttttaaccttccatgcttgctgaaacgtgcttctttaagatgcgttctttttagcgtgcgtaggtatatggattgacagacctctccagaaaatggggaggttttttactcccccgaaaaattgaatggagaatggggagattcgatgaacgttatgtcgatcaaaggattgaagaaaacttttaatgaaaacatattgtttcatcatgtaaatatcgatatccatcaaggtgagcgcattggtattgttgggccaaacggtgctggcaaaacaactctggcaagaatgatcgtaaaagagattgatccagatgaagggacaatttcatgtaaaggaaaaattggttacttaaagcaatcgattgatcaggaggggatgattgagaatcatagagtggatggcgattctttcgatttcaaaagagaaaaggaattagggattcgtttacttaatctagaggcggaaaatttaagcggtggcgaaaagttaaaacttgcgctcacaaacgtttggtctacgaatccagatttattgattctcgatgaaccgacgaaccatttagatgaaaaaggtgttaattggttgattcgggagcttcattcttttcaaggagcggttcttgttatttctcacgatcgttattttctcgaccaaaccattaatcgaatccttgaagttgaagcgggtatgatcaatgattatcaagggaactattctgcgtatcgagttgaaaagcaaaatagatatgaagaacagcttcatcactattcggtacaacaaaaagaagttaagcgaatagaagggcagcttgctggattaacgaactggtcagaaaaagcacatcgtgactcaacgaagcaagatggagctaaggaatattaccgaatgaaggcgaagaaaatggatcgccaggtaaagtcaaagcaaaaacgacttgagaaggagctacagaaaaataaattagaacaacctgatcaggagaaagcggttcgatttcaattccagggaaacaattcacgtggaaaacgcgtattagaagcgatgaatgcaggcaaatgctatgaggaacgatggttatttcgtagaagttctttctatatgaagtatggggaacgaattggggttattggggaaaatggatgcgggaaaacgacattgctacgtacgttgcttggattggaacgaccgagcgaaggagaggtgtggaaaagtccatcacttaagattggctatctttcgcaagatgtccatgaccttccggaagacaagactgctcttgaagttttaaatgtggtaaccaaggaagaaatctttcaggcaaaatcgattttggcttcaatgggaatggaaagagtgaacgccacaattaaccagcttagtcttggagaacggacaaaacttaagctaacacgtatgctgatgaacaaatatgatctattaatccttgatgagccgacaaatcatttggatttgccttcacgagagcagttggaatctacccttcaatcctttacaggcagtttacttattgtgtcacatgatgtgtattttttggaaaagatgtgtgatcggttgttagtgtttgaagatcaaagagtgaaaagggttgaaatgaacttatctgactttcggagtcgaacgaaagaaaaaagatcttttgtttcttcaaaaaaagatgaagaacaaaagatgcttttagataacgaaatttctgcgctaataagtgagattagtttactacttcctggtgatgagaaattagctgagctcgatagtagacttaaggtgttagttgagaagaagagattactttagacgtcttctactgcaaagaagcgttccactgaatacaaatctgctttcggatgattacgaagtaagacatagccttcacgctgtgcttcttcaaaattatcgtactcatcttctgaatgaaagattgctctccgtctttcgttatagagggtaatggagtagtattctttaatttccatttatctctctcctttttcctttgtttctactagttttatgcaaatctcttattgtttatactagacttatagaaaaagtgcgttttattctctttggttatactaaggagagataggagctgatgacaattcaaattggcacactaagtgaaatcatgcgtcaccctgtgaaatcaatgacaggtgaagccgttacagagaccatggtcatgaactacggactttatggtgatcgaagtcatgtcattttagatgagaagcaatcgtttttaacgattacacagtttccatcactagtgctctatcaagcatcgttcagtgcacatgaatcactagacgcttatcctgagcctgcgattgtgacaccagagggagaaacatttaaatggtcgaactcaacctggctaacagaacttgaagagaaaacttcgaagcagttaacaaaaaaagtttaccatcctgaacatgttcccatcggaccgattgaggaggaacatcttttaatcataacggacgcttctcttcaggcattatcagaatcatggggaaaacaaaccgacgaacggcgatttcgaccaaacttgaaacttgatttaatggagaaaatcccatttgtcgaacaaacgtggaaagggaaggttttaagaataggggaagaggtacttattgagttcgtaaagccctgtgaacggtgtatgattatcacggttgatcctaaaacaggagtgaaacagcctgacttattgaaaaaggttgcaaaagaacacgagaatttttttggaatgtatgcccgggtgattcgaacaggaaaaataagtacgagtgatgaagtgtggctcctagataaaggagaaaagggataagggaaatattcccacaaacaatttttggtttttacgttagagataatgctgagcagggtacaagcaaggatggagccccgtctttggatgggatgcttcgatttccacacaggaggggtcccatccacggggtggggtcccatttttgtgttttgattttatacttatcaaaaatcggtcgtcctttgtgaatgatcacgaggcatgggctgtctgaaattctgtggtaaactatggaatggtacataaagcatcttaagggggaagctgatgagtacgttttacgttgaaaagtatgattttacacatccatctaaacttgaagaggagtttaaatctcttctcgatcagccacttcattctgctgatgaattagagaagtgggtcttgcgtatttctgaattaatggatggcgtggcagaagggcttgctggccattatattgatttccagtgccacagtaacagtgaagaagcaaaaaaagcgattgaacacgatcaagaatacattgaaccgatgataaagcgatatgaaggtgaatttgataagaagtttcagagctcaccccatagactggagttaaaccaggactattacaagcaatttctgcttcgaaaagaaaatgcgatgtcacttttcaatgaagataatattgatttagaagttgaagaagatcgaatcgtaaaccgttattttgaacagacaggttctctttcgtttaactggaacggggaagagaaaacgttaagcgaaatgtttcttatgatgcaagatggagatcgctccattcgaaaaagcgcaatggaaaaaatctttcaaacgttattaacgaaaaaggaagatttacaaggaattatggatgagctgattcagcttcgccagaaaaaagcagaaaatgtgaacctcgataattacagagattatatgtttaagaaatacgagcgttttgattatacaccagaagattgtaaggctcttgcagaagctgtgcgaaagcatgttgtgcctttaaaggaaaagttgcagaaaaaacaccaggtagagcttggtattgagacatataaaccgtgggatacgagagctgttccaaaagataagctgccgcttcgtccttttaataaaatcgacgagctgattaagggaacttctgctatttttgatcagctatctccacgcttctcttatcttttaaacgagatgaatgagaagggagcccttgatcttgaaagccgtaaaggaaaggctcaaggcggtttttgtgagtatttaccaatttcagagctttcgtttatttttatgaacagtacaaagtcacaggatgactttattacgcttcttcatgagatgggtcactgcattcataatgattttaagcgaaatcagatgctatccgcttatcaagagacgccgatggagtctgctgaacttgcaagtatgacaatggaacttcttacaatggactattggaatcttatgtatacggatgaaaaagaactactcagagctaaaaaagatcagcttgaaggcttgattctctttctaccaaatgggatcgtggtggatcagttccaacactggatgtatgagaacccgaatcatacgagcaaagaacgaagtgaaaaatacatggagctatcacgcacgtatgattcctcctatgtggattggacaggacaagaagaatggattcaaaataattggcagttaatccttcatatttttgaagtgcctttctattatattgaatatgtgatcgcccaacttggtgccattcagatgtatcgtcagtatcgtgaaaatcctgagcaggcacttgagaattacaaccgtgctctatcacttggaagctctgtttcattaactgaagtatatgcagcagctgggatccactttgacttctctgaaacaatgatcaaaggattaatggatttcatttcgattgagctcgattctttagctgaataaagaggaaagcctctctcccaaaataatcggagagaggctttttgatgactataccagattgaaatgaagcgatctactaattgtcattaattgtccataccttacagcttgggcactgaatgatttcaaatcgatcttttttaagttcatccatccactcttcccaggagtcatgctctggtgacatttcaagcgttttaactgtctgcaactcgtctccatcgctatttgtacaggtacattctacgatcgcgaggttagaatcttgatagtcatgttcttttgtattttcaacggaccagttaattaatctctggtccgttggacggcgctctttataatgggtacgggttaacattaaatcactcctttttgtgaaagatcaggttctttacctctttagcgaaatagcctatgatggaagtaacatttttcactattctgcatgttcgaatttgacatggagcatccttttcctagtccgttaaaatttatattcatttaaggagggatacacttgtcggaaaaagagctttacaatgcagtcgttctctcggagtcgctatattttagcgaaatctttcaaaaggtgctcgctcagcacaacattgttcaagaagagcatactagactgacagattatacgtataagagcacgtttcgaaaaggggagtccgtgcttacctcttactattttgccaactatgaagtgatgtttgttcaggcaagtgaactctattccttatttgtcattgcgctggaatctgtgattgaaggcattactggaatggagatttatttggaagaatcccagcaagacagcagcctcattcgaatggaaaaccgtatcgtaaatgaaaaaggaaaatgtgaaaagttcccctatatgcaactctatggacaggaactatggcattctcccgcgtttttgttagcgaatcgggaaggattgcttcagcttcgcgaagcaattgatgtcgctctgcaaaacggtgagtatcgacacgtgacaagttcttcagaaggtgatggatatgatctcttgattaaaagaatcgaagaagatgtcgaatggtctcgtgtggagacaccatatacgggactttctaataaagaagaaggcacgataaaaccttccgatctatttagtcagtatcgaaccattcttgaagaagaatagttgttcctaacacagagcactcttgccccgggtgcttctgcgcttttttgtccagttcattttgcgctcttcctcctttactaactactcctactcaatccttctcttaatgatgttacccgcttttacaaaaaaaattcctcaaaggatcataggctcgtataagagaatggtatatactgtcatcatagtacaaagttgatcttcatagagggggataaaatgacaaaaatcaatgcaacattactatccatggttatcttacataatgaagaaacggacgaggttttattgttaaatcgccctcctgaagctgggtttcccggctatattggaccaggaggtaaaatcgagcttacagaaagctttactgaaggagcggtgagagaactttatgaagaaacgggtttcattgttcttccagctgatcttatttttaaaggaatcgatgaatttatcattccagaagagaactaccgctatattgttttcaattatgtcgcccgttcgttctcaggcgctcctcataaaagccctcctgaagggaaagtgcattgggtaaagagaagcgctgctaccgaacttccaatgcaaaattggtttcgggaaagatttccgaagttctttgaagaggggacttttgaggtttcaattgaatacgagacgcgttgtgaaaccccaataaaacaaacgagaagaacgcttggataaggaggaaaacaattgattcaaagaaatgataatgcacgagagtttattcaacagaaagtcgttgaatataacggagaaagcctttctgaaagtgtaaaatctcctcttgaaaaagtagcctatgtaatagaagagggtgaagtgattggcggaatctctggtacactgttctggcaacaccttcatattgatttcttatgggtagaagaaaaaatgagaggatttggtcacggtaggaaactacttcaacaaattgaaagcctagcagaagaaaagggctgcagactgatattacttgattcttatagttttcaggcaccgggcttttatttaaaagaaggatacgaaatttgcgggaaagttgaaaatcaccctgaaggacatacccagtactttttacaaaaaagacttcggtgagtacagacggattaagaagtgaacgcttagcggtgccttttcaaaaggagaaggcagcaatagcttacgagaaagaatcctgcaccgatgctgacaggaagcgtataggttcttgcaacagaatggatatgtatccaattttcaccgagttgcaagcccatatagataaaaagaacggaccagggaatcatggctaaaatcgtataaatcgagaatcgcagtagtgacattttggcaatacctgcaggaatcgagatcgcgtggcgaacgacgggaataaatcgggctgtaaaaatgacaccgacgccattccgttcaaaccaggtttcggcgagcgtaaggtgtttttgagaaatgaagagaaacttaccgtagcgctctaagaatgaccgcccaccatagcgcccgatccagtacaaaaaaagttgtgcgattgtaccaccaatcgttcctgctataacggcaccgatgaagtgaatggttccttcagaaaccatatacccaccatacgcaagcacaagctcactcggaataatttcgatcataagtgctagcgctattccaagataaccaagctggagtagccagtctaaacattgataaataaacgctgccatacccaaaaactcctttcatggacaaactgttcaccttaagcttattttttattgtgagaagttagacctgaaaaccacttaccgtcgtataataaagtttggttccgaatagatatagaacccggaatgtaagcactccgggtaaagttcgttcttatgaaagaatgacaatcgattagagaggtgaaaggtaaggatgttaacatccatgaagaaatttctagcgacattagatcagccaatgcaagcgaaaacggggaaagaaaaagctttaaccgtcctttccattattggatttatcttattattatatcttgtagctttctctccgtttatgttcagactatttatcacttgtcttagcgttggcgtatcgttatatgtgataaaaaaaattcatgattttgatcgagtgctaaaaggtgaaaaagcagaacagcctgctccttcatctaacgaggctaatcagctttcgttttctcttgagcagccagaggtggaggcagaatccatcgaggaagcagaaaaggaacgtgagcttgaacagatcaatagtgataaaacgatgctttttgaagaacttttgtcaaaagcagacctggatgagatcgagaaagaatcgtaccgaaatcgcatgcagcaaaaggaatcagaaagtaaccgcattaagcaagaagtgctactcttcaaagataaaatccaaaaagctgtcattgataagaagggtcttttcattaaggaaacgcccgatatgaaaatggtcgctgaattgattggtgtagagtcagttgaaacgagttcttttgtagagttaaataaagagcttcgtcttatttataacgacatcccagaagcgaagcgaacgattctaatcgaatatgaaatggttaacgaagacttcgagttaacacgattaggatataaagagctcatgaaagaagtaagaaagctcgaaaagaagacgagacaagtagtggaacagtaagcaaaaacgtgtatgagcgctcatacacgtttttcttatgataagctttagaagatgaatggattttacaagaaatgaggaaatgcatatgtacattagacaaataagtcctgatgatgcggcagcgtttgtagatctgttgcgagaagttgaacaggatgcgtcgtttatgctatttgagcgtggcgaaagaaagacgacggtagaggaacagcgggagcgcattgaaaaaatggagcgagaccgtcattcgagaatttttgtagctgaacgttctggtgaattaattggttacttaatcgcgattggtggacaggcgaagcgaaacaaccattcggtttacctggtgattggaatccgaaaagaggatcaggggcagggcgttggttccgctttatttatcgaactagaaaaatgggcgaatgatcatcacattcatcgtctcgaactcaatgtggtgacgcgaaatgaagccggcttagctctttatcgaaaagctggatttgaagtagagggattgaagcgtcattcattggtaattgatgatgagtttgttgatgaatattatatgtcaaagctattagctcataattaaatcgttcttcatccatactacaaatggaaggaggcgatgatatgtttgatcatacgaagcatattccgcttgaaggcgttccgggggaatttacgatgagcgatgaatctcaagaaaatgaagaagtagctgagatgagttttccctttgattacagcttgatgattccgctggatcacacaatgagaaaagagtaaaaaaagcgcatatgcgctttttttggttgattaaaactgttcggcagcttgacgggcttcatccattgcctttttctttatttcttccgctttctcaggcatttgcgccattccttctgcaatcacggattcaacagacgggatgccaaggaatccaagtacggcatgtaaataacgatctccaaattccatctcttttgctggaccttctgaatagatgccgccacgagcctgaatgtgtaaggcttttttatcggttaataaaccgactggtccttcatctgtatacttaaatgtctttccagcaatggctacggtatcaatatatgcttttaattttggtggaaagctaaaattccagaatggcgttacaaagacatatttatctgctgcgataaattgatccgtaaggtcgttaattttactcacttttaactgttcgtcacccgatagctgatcgaaaccatttccctgctggagcttgccccagccgttaaaaacgtctgtatcaatataagggagatcaatgttatagagatctagctttagaacatcatcacccggatggttttccttgtaggcttcaaggaaaacttcccctatacttaaactaaaggattcttttactggtttcgggtttacggtaatataaagcactttgggcattacgctcatctcctttgttttcgccacttagtatggcttgcgtaagaaaaaatattcaaaacgatgaggcattaactggaggtggaaaaatggtaaaccgatgcgcatgggttagtgaagaagagatttataaagcgtatcatgatcacgaatggggtgtgcctgttcgtgatgatcaaaaactttttgaaatgctaaatttagaaggtgcccaggcaggattaagttggattacgattttgaaaagaagagagaattatcgagaggcatttgatcaatttaatgtacagaaagtagccgcttatggtgaggataaaatacaagaattgctcatgaatgaagggatcattcgtaacaagctgaaagtgcgtggaacggtaaagaatgcaaaagcctttctcaagatccaagaggagtttgggagcttttcaacatacatatgggcgtttacagaaaacactccagtccttaataattggaaaagcatccaagaggttcctgctgaaaccgaacttagtaagaaaataagtaaagatttaaaaaaacgcggttttacgtttgtaggtcccgttatcctgtatagtttcatgcaagcagttggcatcgtgaatgatcatacgacagactgtttcaggcatccggaccaagggaatcgataagaatgatcattaaaaaggtcatctgtcatgtgaaggatgggatggaccaaaccttttctaccggacaagaacgatgggctgatttgcgagaatgcaaagggtttatagctcaatacggtggttggtcaaaagataatgtggccaatataatagcattttggaacgattaccaatcttatgataatttcaagaatcttgaccacgatttgatttacaaaagaacaaatcagaaggaaagtattgaatcaattaacgtccgggtcgaggatatcaatgtacgggatatttatcaatttgcaacagagtggctaaatcatgtagacagtgtggtaaatgagaaatggacattacacaacgcgggaggaagaaaatgaatcagaagtgtttgttcattggtgatagtattacggattctggtagaagacaggactctgaaggaattggtcatggatatgtgagaatgattaagaaagcgattgttacttacggaaacgttgaagttataaataagggcgtgagcggtgatcgcattacagatcttgaagaaagatggaatcgagatgttctcgcgcttcaacctgacgttgtgtcgatttcaattggcatcaatgatgtatggagacagcttgatcaccctgaaatggatcaggtgacgccagaggattataaaaaaatctatgaagagttagtagagaaagttaaactgttaggagcaaaatgtattttaatggagccaacaattatagaagaaagaatcgattcgattggcaatcagaagcttttcccatatgtgaaaattgttcgtcagttagctgaaaaatacgatgcgctattggtgccaactcatactgcttttttagaagaactccaaaaagggaagaagtcatcattaacgacagatggggtgcatatgactgaggcgggcaatcagttaatggcgaaaacctggctagatacgtgtgtagataagttactttaacagctaacaattataattccaggaagtttaaaaggctctgttcaagatgaacagagcctttttgagaaagcatcgtacttaatcgaaaacaggagcaagtcctggatcgttatgtaacgcaaaaagcatttcgatttgtgattctgtgattcttcctgttgataaaggaggaagttcattttgagtaaaaaagccacagtcactagtttcaatgcttgcagctgcgtttccaccgattagctcacattcaatcatcaccttatatatatggtaaggcgatggcgggtgggggtgttttttgtgatccagtacagcaagaagtcgtctagcttctactaaatagcctgactcttcttgaacttctttcaccgctacttctccgggtgtgaagccgacgtcaccccatccgccgggaagagaccacttgccatctgctttctcctttacaaacagcagttttccttcatgaaaaacgacggctcgcacgtctactttaggcgtctgatagcccgtttcatttgtgaagagttgctgaatggttttcatatcgtagtctgtataagtttccatcatttcagcactaagttgtcgaagttcaatatagcgttcgtaatcatagttatcctgtgtataggttaatccagcttgagcaatcgattgaatttgttttgcccacgtaagccatttttcctccatcttccatgcatcctttcaaacgtagcctcttttcattctatcaaataaaataaccttaaggctattcaaaacgaggctctgaataacgaccaaaccagtcatagcgattttttgaaaaccaaatatagaatggtgaaccaagcttatcaacgaaaggcaagtataaaaatagtgagagtggcacggttacaggaagtgccattaatagtcgtctcacagtataaaagccagcgtgaagatttccggacgttgttaacatatgaatttcatcatacattcgtttgtgtcgaaactgcatataaggatagtcttctgggtgtttttcaatttcctggaccggtatccattcaattttgttaaaccagtcaagtttgcgaagtgatttctttacataaaaacaaaatgggcattcagcatcataaaatacgagatgtttcatcgcgatagcctccaatattaatttcattctttatacccttttcacttattcgcactgttttaaacagaatgacaatagttgacagaaaattgtaatattattatagtctaattagattaaaaagaaaacgcttacgggagtggtgattggtgaaaagacttgaaggaagagtggcttacataacaggtggaagtagggggattggggcaagtattgcagaaaaatttgcaagtgaaggggcaaaggtttaccttgcagatgtaaatgaagaagcgctatccataacgggaaaggatttagaagagaaaggttattcagtcatgacaggcattgtggacgttacgaagcgagaccaggtagaatccagtatgaaagaagcagcggaagcttatggctcaattgatattcttgtaaacaacgcaggagttattcgagataatctattatttaagatgaccgatgaggactggatgatggtcatgcaggtgcaccttactggaagtttctatgcatccagggcggcccaaaaatatatggtcgatcaaggttatgggcggattataagtctttcctcaacgtctgcgctcggaaatcgtggacaaacaaattatgcagctgcaaaagcaggcattcagggattaaccaaaacgctctcacttgagcttggtaaatatggcattacggctaatgcgattgcaccaggattcattgaaagtgatatgacaaaagcaacggccgagcgtctcggggttgagtttgaccagtttattgaatacaacaaaaaacagattccggtagctagaacgggaaagcctgaagatattgcaaatgctgccctcttttttgcagaggagaactcgtcctttgttagtggacaagttctttacgtagcgggtggaccaagaacataaactagtctgccgctttattttttcctgctgacgtttcactgattctatagaggggtactttcccattatggataaggaaacgaaggaggagtcatgatgtttgataaaaatgctggtgagatattattaaatacactttctgaatggggagtagaccatgtgtatggtttgccgggagattcaattaaccattttgtagagaatttacgaaatgctcaagatcgtatgaagttcattcaggtgcgtcatgaagaggtaggtgcacttgcagcagcgtcgtatgcgaaaataaccggtaaaattggtgtctgtctttccattgcaggacctggagctgttcatttgatgaatggtctttatgatgcgaaggctgatggtgctccagttcttgttattgctgggcaggttgcaagcgatcagattggaatggatcaattccaggaaattaaccttgaacgcatgtttgatgatgtatcggtgtttaatcgcagagtagaaacagcagcgtctctaccagaccttactcatcaagccattcgaacagcggttgaaaaaaaaggtgtggcgattctaacgattccagatgatcttgcaggggaaaaggttaaacaaaaagtagagaatacgtctctcattcgttcgaaagcagtcgtacatcctcatgactccaatttaaatgaagctgttgccctattaaatgaagcaaagagaccggttattttagccggcaaaggttcgaagcatgctagggaagaactactaggttttgctgaaaaagctggagctccagttattttaagtttacctggtaaaggcgcaattccagatgttcatccatataacctcggacagcttggacagattggcacgaaacctgcttatgaagcaatggaagaaaccgatttgcttattatggtcgggacttctttcccgtatcgtgattatttgccagataaagcaaaagcagtccaaattgacatcgatccaactcaaataggaaaacggtatcctgttacagtcgggttaattggtgatgcgaaatggacgctatcctatttaacgcagcatacaaactaccaggaagatcgtgagtttattgagaaatgtcaggataatatgaaaaactggtgggctcatcttgaaaaaatcgaaggtgagcagtcaacgccaattaagccacagcaaattatgccacagctacaaaaagtattggatgatgatgccgtcctttctattgacgtagggaacgtgacagtatggtcagcaaggtatttacgcgtcacgaatcagaagtttatcatttcctcatggatggcaacgatgggctgtggactcccaggagcgattgctggtaaacttgctcatccagatcgtcaggctgttgcgatttgtggagacggcgggtttacgatggtgatgcaagatttcttaaccgctgtaaaatacaaattaccgatgattgtcgttgttttaaacaatgagcgcctaggtatgattaaatatgagcagcaggaaatcggtaatatcgactatgagactgaattaaaagactttaactttgccgcatttgctgaaacggctggtggtgaaggttatcgcgttgagaagtatgaagaattattgccagcatttgaacgagctgctaaatcgacaaaaccagttattgtggacgtggtgattgaagagcagccaccacttcctgggaagatcacctatgaacaagcagcaagttattcaaaatacatgttgaaaaaagcattcgaagaacaggaaattgatatgccaccgttgaaaaaggcattaaagcgaattttttaatagaacatactagtgagcccgctgattggcgggctttttgttgttataaataaaaggagtgagaatgatgtatctcgttttttgctatggaaccttacgatctggcgaaagcaatcatgaggtgataaaaggggcgactttaatagagagcttcagttggacaaatggacaactgtatgacacaagggatggttatcctgctttgatacagaataaggacgctaatgtatatggagaagtctatgaagtgaatgctcagttactagagaaaatgaatatacttgaaggttatcaggaagggcgagatcacaatttgtatgagcgtgtcatgcagaaaattgaaagtgatcgaggaagttatgaggcgattacgtatattatgaggaagcccgagaagcggtttatggaaataccaggtggggactgggtaacgtatcgcaatagtaaaaagtgacgaatcgcaacctaaaaaagcacacctccaaaactggagcgtatgctttcaaaagagctaatcggttaatatcctatattcttcaggaatgtgaagcgttgtttcataatagaattgatcagaatatcggtctgaaatgggtttttcgatcattttgtaggtaaggtaggcctgttgaattggttcttttacaatcgttgattctacgattttttgctgtttttcacctgtatccgtaatcgtgtctagctttacccagatgggatgatgatcatcgcttacatagtgagaatcaatgccttctttttcctcaggtgcttgcagcagttgtgaaaactcttctaccttttcgttatgctcatctagtgaattaagataaggagaaagcgtgttttctttccagtgagtttcatccaccgaaaaatcatagctgttgatggtgaaagataagtagcctatgatgatcaaaataagtgcaagtgaggctccttgatagataaaatttaaatgcgatagtgattttcgattttgtataagatgaaccatgaatattaacccaacaatgatccacaatacgtcagatatgattgtgaggggtgcatcagatagtttttcgacttcgttgtatttttcaatgacttggttgattgtaggcataatcattttcctccagaatataaaatagctaatcgatgggaacacattgtcgcttcaatgacgacttgctcattgtaacagtaatttggcggtttcatccatataaattggaaaatctcgtaaaaggaggctttattgtttcctagttcttctcaagtgaataggtgaagaagcagaaaagagcgctaaacataagaagacgtttagcgctctttattactaattcaattaatgagatgtttgcagttctctctttttaaccttttttgcctcacgattgttacgtagaaacatataaaatgaggcagagaaaataatgatatagccaacaatactccatgcatcaggaatttgtccgaatagaacgatgctgattaaagcagagtaaacgacagtcgagtaaaagaaaatcgaaatctctcgagctggcgcaaacttataggcaaccgtaagcccaaattgcccaagcgtagcgaacacgcctgctagtaaaagatagatcagctgctccgtttccattggttcatagaacataatcacgaatggtaacaaaacaacggttgagaagaatgagaaatagaagacaaccgtatagaatttttcacgctgtccaagcacccttagaacagtataagcgccggcagcgaaaatagcagaaagtagtccagaaatatacggaatagtttcgaccgagaattgcggcttgataatcaatagcgttccgatgaaagcaatgatgatggcaacgatctggaaacgtcttgctttttcttttaagaaaagagcagagaagataattaataaaaaaggacttagcttattgagcatgtcggcatcagatagaacgagattatcgatcgcgtaaaaatagaagatgattcctagtgttccaagagcggagcgaagtaaaaggaacttctgattttcttttttaccgaataacctttctttgtagtacatcacaaagccaaatgaaatgacggcagagacaccatttcgaaacatggttttttgtatcgttggtacgtcgcctgataactttacaaaagcagccatcatggcaaaaccaaaagatgatattagtaataggataattcctttatttcgatcactcatctaattcctccagtgtgtgtaaatcacttctatcactttactgcaaaccgatcgtctttttcaactgccaggctttaattagaaaatgtcacaaaattgattcatccgtttgggaaggagatgtggcatagtaaattatagcgaacattttttcgcgcaatagaagaacgttcggttaacaaaaggcgagatatgggtaaagtaggtactagacagatagcaaaaggagaaaagtgaacatgtttgtgtggcgaaatatttaccgaggtttattaatgggtgttagtgacctgatccctggtgttagtggtggaacgatcgcgatggtgcttggcatttatcgtaggttgattagtgggatcaatgggttaatgagcaaaaattggaaaaaagaactcggtttttttattccccttttactaggagtgggactcgctttactgctcgtaagtcagcttatggaaaagcttcttgaacattatcctcagccaacgttctttttctttattggcctaatcattggggtagtgccgtttctattaagaaaagtggattacaagaaaaatttcgagtctctccattatggattgttaattgtggcggcaatcctaattgcttccacgctgtttctaaaaagcgatggatcaggagaggtaatgaaatcattagacatggttgattatatcattctgtttttctcaggatggttagctagtacagcgatgattcttcctggagtaagcggttcttttgtccttttattattaggatcgtatcaaaccgttatacacggtctttcttctttcaatattcctcttctgttaacagtgggagctggaattattattggattaagcttaacggggaaggtaattgctcatttactctccaaatataccgtctccacttatgcggttatgattggattagtgattggatccgttgtcgtcttatacccaggatttcagtcagatgtaggacttgccatagcaagtgtggcaacgttactccttggattaggggcagctattgctcttgggaaaattgaacataaggaagcataataaaaaccgcaggagttccctgcggttttttgtgaaccttattgtttctcctgctttggcttcgtacgcggaaacacgagatgtttcatcataaagaagcttgaagcagaagaaagcagcatagcgagtcccttagaaatgtttcgttcaatgtagcgaggaagtgaaatccattcgaaaatgagaagcgccccataaaagaccaggttactaatcccaagagcgatcacagcctggatgagaaacagaagcacttgttttcgatcatgaattgctttggaaggaaacgtcagcttcgcattccaaaaatagctgttgatgatcgcaagcacatatgacattgtgttatacataataagttggattcgatcatctgtaggaaagaacagcatgagcaggtttaaagccccaatgtcaacaagtgcattcattacaccgattgcactaaagctcattacctgttttgaaccccttccaattcgccattgcttcatagactcaaccttctatcatttctattggatcgcttgttgctgcttttcttgtttttgttcaatagcagactcatagaaatcaagtagctgctgtgctggcccacgccatccataatctctagagtgctcgtacgcttctttcgacattttttctagtagtccagactcttgaaggcgattaatgacttcagtaagattaccgttagttcctgaacggtagagaagaccagttgaaccatcttcaacttgttcgttcgttggacctgattctgcggctatgactggaaggccgcttgccatcgcttcaagaataacgagacctagtgtttccgttgttgaaggaaacataaaggcgtctgcagaagcataggccctagctagctcttccccatgtagaaaaccagtgaaggtcacgttctctagatgaccaaaattcttttcaagttcacttcgataagggccatccccaacaatcgcaagatgagcatctggcttttgctcaagcatcggtacaagtgaattaatttctttttcgaacgctaatcttccgacaaaaagaagaagcgttttatctggatgatcatttgataaacggcgtcgcatgtcgctgtcacgcagttcagggttgaatcgctcggtatccacgccacgcttccataagtgcatattatagaaattttgatcatttaactcttctaagatggcttgtgatgtacaaaggttaatatccgctttattgtgcattctcctgaagtgccaccagagaagaggttccgaccatgacatattgtagtaatcagcgtattttggcacgtgagtatggtaagaggcgataagggggacgccaagtttcttaccatacttaatacctgaataacccataaaagccggattaacgacgtgaacgagatcaggatcaaactcttctagataagttttaatcgtacgagtcggcatgccgaatttccgatgtttatagagaaagaatgtacgaggctgaactccatcaaagcgaatattccgatagctacgcactcctaaatctggcgcaatgacctggatttcgtgtccttgatcaattaaataatcgatcgatgcacgaagcctcgtcacgacaccatccgttgaaggtaggaatgtctcggttacgatggatattttcataagaacacctcaattagtaatttgcatccccttacttccacgtaatattcggaagaacgttttctttcaggacgcgatctttgtatttaagtgctgtatcaagtgttctcgaaatgtgctcatctgttagaagagatggctcaagcccaagatcaattaagctcgtgttcactgcatgatagtagtgctcttctttctccacgcgaggattttcaaggtgatcaatgctcactttaagcccttttgcttccgctacgcgctgaactttctctgcaagttcgagaacagaaaattcctctgtaaactgattgaaaacgcggaattctcctttgtcagctggattttcagctgcgatttcaacacagcggatcgtatctttaatgtttaaaaacgcacgtgtttgcttacctgatccatacacggttaagttatgaccaatcgcagcctggataatgaagcgattgagcgctgtaccgaatacaccgtcataatcaaggcgattgattagaccttcgtcatgctcatcttcgtccgtatgaagaccataaacaattccttgatttaagtctgtagcgcgaatgccccaaattttgcaggcaaactgaatgttatggctatcatgaacttttgataaatggtagaacgatcccggctgtttcgggaatggaaggacatcttcccgtcctttatgttcgatttttatgtatccttcttcgatatctatgttaggctgtccgtattcacccattgtgcccaatttaatcaggtgacaatcaggtgttacttctttaatcgcatagagaacgtttaagttaccaacaacgttgtttgtttgtgtaaacacggcatgttcacgatcaatcatcgaatagggagctgagcgttgttccgcgaaatggacaaaagcttctggctgcacttgtttgaagatctcttttaagaagtcatagtgcattagatcacaatcgtacactgcgatatgctttccggttttttcttcccatcgtttaacacgctcttctagcggtaagatcggtgttagtgaattggaacgtagttcgtcatcccactttcgtcgaaccatgttatcaacgattgttacatcatggccctgttttgataagtaaagtgcggttggccacccacagaaaccatctccgcctgctacaataattctcatagattctacctccatcacaatggtcgatttagttgtgaaatccttgctttatcaagtatttacgatagcattcatcaagattgcattcaacttaggacatcctaatttacgaaaactttaaatgaatctgtgaacttatacctatttcattccctaaacaaagtgcgggtacacctttaagtttgcctgaaacgctttataaaaacaattaattaatttagaaaattaaaaagaataaaattggaatatgttagaataaaaaaagaaatgtataaattacttattgatctcatcataaccctcatacaaattgtgctagtacataccgattacggcttgctttattttgtgaataacttggagaaatggagtgattgttccaatgtaaactgactacccttactttgtggaagaacaaaaataaaaaggggtagttatgatgagatttcgttcatttcgtttcctatgggttgggcaggggtttgccaacacgggggacgttctctatattgtggcgcttattgctgttctttaccaggcaacgggttctgcactttatctttcgctgttaccgttcacaattacaatggctcgttttgtgagcggaatgtgtgcaccgctcgtattaaaccgtgtgtcgttaaaaggattgctcgtcggttcacaaagtttaaagacggtgttgctaggatggcttggtctgtctttatggattttcactccttccgtgctgttcatattaatgattgcttttctaattgcatttttggatggatgggcggcgcctgctcggaatgtcatgcttcctcaactcgtttcggaaaatgaacttgcgaaagcgaatagttttgtagcggttgttgatcaatcgattcaatttggaggttgggcgattggcggtataattgttgcggctacgtctggctttattgtgatttggattacttttttaatgtatgtcatttctacgcttttgatggggttcatcgtcgtaaaaggttatcaagatcggcaaacgaaaattcaaatgatgagcggttggaaaatcatctggaagcatccagttctacgtgttgttcatattatgatcgttattgaagctatcgcaaatgtcgtctggattgctgcgattctttatatctttgtggaagaagtgctcatgagatcagaagcatggtggggatatttaaatgcaagctttttcatcggtttgattgctggtggtatggcagtatcaagatatacgcgttggtttgaacagtatatgaaggaaacgctactaatgacgtgcttttcgattagtattctcacgtttatctttggccttacaagtgtcccggtgatagcccttctgttaactgtactttctggagtagttgaacaaatcaaatccatagcgatggtaacgatgattcaaaaaagatgtccgaatgagtctcttcctgaggtgtttagtgcacagagtgctctgatctcaatcacgtttggtcttggatctttgttttatggctttcttgctgagcttgttaatgtgccatttgtttttggtttgtcaggagtcttattgttaggatcagcgctttatttacaaaagaacattcacgtctttaatgagtagtaagaaacagccctcatgctagcaagagggctgtttctcgtgtttatcgattttgatctttatttccagtgacatcgatagcgggcgtattgttgccgagatagctagtaggatgagttggttcctctccatagaaatcttcattgattttttcgtcaacatttacaggggctttccctttgtaaaaggaatcgttgatctttttgttggcgcgcatggcttcgctcggatcttgtttcattttcgacctccttatttcgtctggccctatttagcatgtgtagtttagtggaagttcatgtttttgtaaagctaactttacgtaaagttagctttacgttaaaataatgatgaagaagttaggaggccttttagttgaaaaatgtactacgtgaaaaaagaagagaaaaaggcttttcacaagatcgtctggcagaaatactgggcgtatcaagacaaacgattatttcaatagaaaaaggaaaatacaatccgtctttaccgctagcactcgaaatggcgaaattgtttggaacgattgttgaggaaattttttatttagattcagagggggagtaggtgtgggaattaataaagcgtatcttgtttttggcgtcttttttgctttaaatgctttattactactgagcgttgggattggtacaggtaatgaaccgattcctgccagttatatgctgatgtcaatgtccatcatgaccttttgcttaagttatcttcaaccgcaatttaaggcgaaggatgagcgaagtcgcatgattcgagagaaagggatgttttattcctattttgctgtgctcgggtatatcatggtgtttcttttccttctccaattcaacattgtgactattagtgcagtaacggtgctgagtgtgttagccgccatgctgattagtaccgtttttgtttcaatggtgatcgtcgctaagcagcattaaatttcatcacgatgattagaacggaggagaatcgggaaaccctttttgtgagatcatcaaaaaggagttggattgacatgagtaaatcattacaagcctattttacaacagagaacgatgcagaaagtgcaaaagctgatttgcagacttattcggtaagtcaattgtcagttgaacatattccagaagataaaaagcttaacattgatgcacctattccaggacagggaacagctacaccagctggagcgaacaacgatttgttcttctcaaacgaaacgcctactggaaaacaagaagaaaatgcagatccttctgagaaggcagatagagagtttcgctatttgttagcatttgaaacagatgaatcagatgatacagatttacgtgaagttgtttcaaaacataatggtgccatggagaaataaggtgaagagctgcgcaaatgtgcgcagctttttcttttgagtcgcgggggtcaggtacgtacctgacccccgcttcactaccgcgctactccgcagcagtatgaaaacaatcgttggtgggcaggcttgagattgaagtagaagaagagaaagacagaacggacgatgtccgctatactagtgaaggaagcgcatcggaagtggcgatctacataaagatttggttcaatgagtatgacacaaaacgttgcgaaattaagatcagattcctttgattcaggggagaaaaaaaggtatactgatatctagatgataataattacaaaaagatagtgtgtttaattaataactggacgagaggggaacacattcatggctaaaaaaacaatgggattactcgtaatggcgtatggaacgccgtataaagaagaggatatcgaacgatattacacacatatacgacgaggtcgtaagccgtctgatgaacaattaaaagacctccaggatcgttacaaagccattggtggcatttcgccactcgcaaaaataacagaagaccaggcgaaagggctagaagctcatcttaatgaggttcaagatgaaattgagtttaagctttatatcggattaaagcatattgaaccttttgttgaagatgccgttcaagaaatgcacaatgatggaattgaagaagcggtaagcatcgtcctcgctcctcatttctcaacatttagcattaaatcttacaatggacgagcaaaacaagaagcggagaaaatcggaggaccggttattcattcggtagaaagctggtatgatgagccaaagtttatctcatattgggctaaaagaataaaagctatctttgacgacatggctgaccaagagcgtgaaaaagcagtactgattgtttctgcgcatagcttacctgagaaaatcatcgcaaatggagacccttaccctgatcaactgaaagaaacagccgacctcatcgttgaagagtcaggcgtgaagaatgtggcaatcggttggcaaagtgaaggtaacacacctgatccatggatcggtcctgacgtacaggatttaacgagagatcttcacgaaaagcaaggttttacttcgttcgtttatgcaccagttggttttgtcgctgatcatctagaagtattgttcgataatgactacgaatgtaaagttgtgactgatgaagttggcgcaaactattatcgaccagaaatgccgaacgcacaggatgaatttattgagattctttcaacagtcgttttgaaggaactgaatcataagtaatagtaacgcagtctgtctttttcgcaggctgcttttttataacttgcagatcgaagtatgaaagatcaattgacaactaaagtaaaagaagataaagtaatgagaaattcatgtatcgcaataatcaaaagctgtgaagaggaagcagtagcgcgttatgatcagtagtggcagagaaccagtgggtggtgtgaactggtacagcatagccgtgaattacccctcagagctttcttgacgaacggagtgatcttattagtcaggaacgggagaaccgttatccaaatcgagccggaagaatttatttcttcaatcagggtggtatcgcgtgttaagccacgtccctatttataataggggcgtggctttttatattatgaaattttacttattaggaggtcgacaggaatgaacagtagcatggatcacttatcagcacaacaaagaaaggaaatggaaaggcaatatgcggtttatacccatggaacgagtcaagtcattcctggagaggagcttaaggagaaaatcgcaacttcacttctaaaaaataaaccgcttaaagttaaattgggtcttgatccttcagcgcctgatgttcatattggacacaccgttgtgttaaataaattaagacagtttcaagaaaatggtcacattatccaactgattattggagatttcaccggaaaaattggtgacccgacaggaaagtctacggcaagagtgcagcttactgacgaagaagtggaacgaaatgcaaagacttaccttgagcagtttggaaaagttctggatcaaagcaaggtagaacttcactataattcaaagtggctttctgaactaaagtttgaagatgtgattgaactcgccggaaaaattacggttgctcgtctacttgagcgtgacgactttgaaaatcgaatgaaggcgaataaacctgtttctcttcatgaattcttttacccactcatgcagggctatgactctgttcatttagaaagtgatattgaactcggtgggaacgatcaatatttcaacgttctcatgggacgtcaccttcaggaacagtttgggaaggagacgcaagttgtgttaatgatgccgctgcttgaagggttggatggaattgaaaaaatgtctaaatcaaaagggaactacatcggcattacggagaagccatcccaaatgtatggaaaagcgatgtcaatcccggatgaactggtcataaaatacacggaactcattaccgatttatcgcttgatgaaaagctaggggttcgacaggaaatagaacaaggacgtattcacccaagaacggctaaaatgaatctcgccaaaaccattgtacgcatgtttcatggagaagcagcttctcaagatgcggaagggcaatttcagcaagtgtttcaacaaaagcagcttccaaccgatattgaggaagttctatgggaaggtgagcgctcgatctcagtaccgaatttagttgtttcgctcgacatgttaccgtcaacgagtgaagcgagacgaatggtgaaaaatggtggcattaaactgaatgagatcaaagtcacgaatgttaacgaggacgtgacactagaagatggactcgtggttcaagtaggaaaacgaaaatttaagaagatcaaattaaattaataaaaggctctcccttcgagttaagggagagccttttcgttattctgtgatagtcaggttttcttctgtatgttcatgaagtccttcgtcattctcgacatgaatggtaactgtgtaatcaccagcttctttaaaagacgttgtgccttcgtaatcaccagctttcatttcttctgcgtcaacccactcaactttttcttcatccactttcgaaatttcataacgaacgtcagcgcctgttaaagcggcagcgtttttttgcaggtgtgccattaacgtaacctcttcatttgctttcatttcttcaggcttcatcaaatgaatggatacggcgctttcatgttcgtgctcgtgttcgtgacttgcagagtcagcttcttcttcagaaccgaccatgatttcgtttttcggcatcgtatgtaaatcgcgagctgtcacatgagattgaacaaaatgttttcccgcttcatcaagttgcttttcagccgaatacacgccatcgccatcatgagaagcttcgatcatttcgctctcttctttggatccttctttccatacttcaaacatcacttcatctgcatcgtctaccttttcatctccctgagtaacggttgcagagaatgtaaccttttctcctttttcaactttttcaggagtatctagtgcaacatcaagcgtttccacttgcgtttcttctgcggctgaattgttttcagtttcatttgcattatcctgtccgcaagcagcaagggcgacagcaacactaaggatagatacacacgagccaatttttttcattttactcttcctttcattatccactaaacgattttctaattttacagtatggccataaataaaatcttgtaaccttgatcaacactttaatagtaagaaagttaggcggtgatctcaagtgaatattagatagacatgtgactagctcatgacataatcgtataactcctaacttttaataaggaattaagcagtgggtgagcaaaaagattaaccactgacatgaagaaaacggtccgcttgaagagggaccgttttctttaaatcataggtgtgtcggtttcaaaatgaatcatcatccatttctcaatatcctgaaatcctatccgtttataaatcgtacctgcgtcaggattatcatagaaaagacacagcactttcccttcacttagaacgtcataacatagtttactcgaacatgttgtagcataaccgtttcgtttatagtctggtaaggtgcacacgcccacaaccatggcggattgagaattttctgctgctgtagaggccgctgaaacaggctggccgtccatttcaatatagtaggttctcgatacgcctttctcttgattacgttgtttttcctctactgtttcagtggcttcaaactcatcaatcatattatgtaggaaatgaattttattcagatcatctaaatctgcttttttcacttcttctatgttctttaggacaagctgatccacgctttcacactttgcatagaacagttcccgacttgaacgaggggggtgtgagatgtgtggctgaatttgattggttactcgctttagaccagacatcatcaggaaggctgtatcacttgaaatcacctttgcaaatccttctgcatcaaattctgcaggagcaaaggggatatagtttctttcatattttaatagaacagctcgtaatgtcccgtcctcagagaaatctccccacagcttttggaatggttgatcatacccatacgcttcaatgtctcctaatataaataaattttctgctgcatgcggagttagcaaggaaaggcattggtaatggtcttcttcagttaatcttctaatcaattgacatactcctcctcttggatactaatagtcaattttacataaggaagtgtaaaagtaaatagattcggaaaatttatcctaattttacaattcgaaaataaagcattaatagtttaactctactataagagtgggggtccactatgaacgaattagggggatgagatgaaaaggaataaaggttttaaactggtcaatgtaggaatgattggatgtatgttactttcgatgatgttttcaactatcattgaaaactcagcacaagcagaggaagttgggttctatccgcttcttattacagaaatatcaccgaatattaaaggagcggaagattatgagtatgtggagctttacaacaataccaatcagccactctatgtaaatgattatggattcctttatcgttatacagatggcagtgctgaagataaacaaatcacagtcgaaccagccgtcatcgatccaggcgaaacaaaggtgttatggtataacaaaagcggcaaaacgattgttgactttgaaaatcactatggagtgaccgaccttcaagatcatgtgattagtcttggtggagaagaatttagtggtttttcaaacggaggtaatcgaggggttgttatcctagatcgagaaggaaatgaaatgcttcgtgcagcttatgctggtgatgaggctgcagaggatttaagcgttcattatcaatatcccactggtgataaagagatggtcgtttatcaaacaaaacaagcaccaactccaggagttgtcgaggaatcccaagttcccctcagtcctcaaccattatcgaatgttgccattactcatgatggacttgcgacccaaagtgcgaacgaagatatgaaaatcacagctggcataacggctgaaactgaattacaacaagtttcgattgtttatcagcctgctcaattagagcagcctgttgaaattcaaatggagaaagtggaagatccttcagaacctttcggaggtgtttacgaaggaacgatttcgaaagaagattttgccttttcaaaggaaatgacatactacataaaggtagaaacggctaaatatacaaaaaatcatccaattcacgcaggtgagccgttcacagtcaagatagaagaagctttaaaaaacaagccaccggcaatcaatcatgaagttcccacacctattgaaaatcaagatctgacaatttccgcggaaataaaagacgatactggcgtgcaatctgccgtattattctatcgtcaggatgaggagatggaaccagtctccattcctatggagcttgaagagggagatgtgtacacagccgtcattccatctaaaaagctttggtctaatacgattttctatacgattgaagcgaatgatggcaagcacgcggttacttctgaagaatatcaaattaacgttgatcgccaggaaattgatccaactaaattgccagagttactcgttacggaagttgttcctgattcaacgaatgttaacggagcggatggttatgaatttattgaagtttacaatacgacgaatcaagcaattaattttcaggactataaaattcaatatcgttacccgatggatgggcctgaagcggatttaatttgggcagctcaaaaagaagatatcaccatttcttcaggtcagtcgatggttttttggattatcaattcagcaaatcaaaatgaaacgattgctgattttaacaagaattacggatcagagctagttgaaaatgaatccattgtaaaagtagagtcaaatgggatgtcgaatagcagtaatcgaggaattcttgttgcaactaatacagggaaagagatttcgattggtaattacaacgatcaggtcggtattgatgataccgctgcaaacaaaggtattctttatacgtatccaacagacggtactcaaattcttaagaaaatcagcagtgcgactgagccagcttctcccggtgatgttttaccaagtcaggtaccagctgatttaattgaagtagaagaagatagcgaaccacctactattgaagcactacatgattttggggaagtgaagcaaacggaaaatatcgagctgatttttgatgcagaggataatcatctcattaagacagtagcgcttttctataagcatgaaagtgaagagaacttccgcaaagtatatttaaaggaggattttgatgatacgttctaccatcacaccatatactcaccagatttgatcggtagaaaaggaattgagtattacacggaagtgtctgatgggactaaccgcatcaaaagtgatgtaaagaagattgagatcgaacaaccggttaataatcctgttcgattgaatgtagaagatggagatgttctctctggagaggccatcattaaaggtgcggcagatggagcaactgcagatgatctccttctcaaaattgatgggaaagagccaacaaacacgtttaaagcactagaaaacgaagcattttttgcattcgatgcgaagaaaacgaatctctttttccaaaatggcgtgacgatgggagaagaagcgcttttcattttcgatgatacaatcaatcgctacatgacgctatctgttccgattgaatccaatcagctgaaacaaggaaaccaaaacaccattagcattcgttctggaacgaaagtatcaccatttgatgacaattcagaagaaaatcgtgatgatttttacgtgaaaaatatccgccttgtcatgggtgatggaacgattattcaagatgagaaatatatggatgtagagcaggaattaacgattggagatgggggcggagctgctccggttgtcgattttaactttactctttcagaagacctcttttcttctcttgcttatcaatgggatacaagaaaggcgactgacggtcttcatacaattcaggttagcgatacaaataaaggtagcatggagaaaacagtcctcgttgataatacagctccaacgatcctgccgacgattgaaacaaaggaatataaagggaagtttaccattgatgcaaagcttgttgataaaacatcaggtatggaagagctaaccgcaacacttgatgacgaaaacattcaattacctttcgccacatcctctgtcgagcttgaagctggtgagcatgtcgcggtatttacaggatatgatgtagctggaaacaaagcggaagaagaggtttcatttacagtggtagaagaacagcctgaaaaacctgaagtaatctcacctgaaaatggggaaggaaacgttactggaaatccaaagttaagtgtacttgtgaaagatccgactaaagatgatctggatgttgggttctataaagggtatcagtatacagctagagataaaaatgtaagtgttcatgcgaatacggttgatacagaaccacctggtatgtttaaacctgaaggggaaaaagcatttgcagataacgaggtacagctggtttctatagaagatcagcagtatatgatcactgattcaacaacacaattcccttatcatcgttttgatattgaggtagatgagtctgtacaggatagcgatcgtatcgctcttaattggaaagggaaatcattagagggaagaaaagtatcgatgtatgcctggaaccataatacttctaactgggatatggttgtgcaacaaatcgcacctgagggagattttactcttgaagggtctgtcaccgcgaaaagttatgtgaaagatcaaatggtgaccattcttgttcaagatgaaattcctgaaaaccgcgatcagtatgattacacatttgtgtggatgagcgatacgcaatattattctgagagctatccatatatttatcaacagcaaaccgagtggattaaagatcagcaagaagagatgaaaattaaatacgttttccataccggagatttagttgatgaagccgataaagtctaccagtggaataatgcagattctagtatgaacgtgcttgatgatgcaggtattcgttacggtgtcctggcaggcaatcatgatgttgataataaaaccggtgactatactgccttttcgaagtatttcggtgaagcgcgttttacagatcgagattattatggggagtcttatcaagataacaagggacattacgatcttatctcagagaacggcaatgactacattatgctttatatgggctggggaattgagcaagaagaaattgattggatgaatgctgttttagctcagtaccctgatcgaatggcgattctatctttccatgaatatttgcttgtttcaggaaatcgaagcccacttgcggatgaaatctatgaaaaagttgttgttccaaataagaacgtcgttgcaactctatctggccattatcacgatagtgagctattagtggatgaaattgacgatgatggtgatggcacagcagatcgcaacgtgtatcaaattcttgcagattaccagggcggaccagaaggtgggcaaggctatttacgattgctacatgtagatgttgcgaacaataggatctatatgaacacgtactctccttatctagatgactacaatttctatgacaatgatcaatacccaggtaaagatgaatttacgattgaccttaatctagagccacaagagaaacgtgttgcgactgattattttgaagtaaatgtatatactgacgaaaagatcggtttagacaccggggtgaaaagtggagccactgctgaagcaaaatggaagaagcttactaaaggtgaaacgtatttctggtatgcgactgcttctgatcagtttggtggaaaaacaacctctgatatttggcactttacaatgaaagattcaaaaaatgaaaaagcagaggacaaagaagaaaaagaaaatgacaaagacaaagacaaagacaaagacaaagaacttcttcagaaagaggagctaaaacaagaggatgaagcggtaaaagaagaaaggaaaggtgaggcgaatgggaataaggaagttctaacaaaagacataaaagaacctaaaccgaacgaagagcttgtagatgaagagaattcaagccatgaaaaggtgaacgacgaagatttgcaacaaaattaaaatgccttcttggagatcgtgagtctgactcacgatcttttgttttggaaggaagtacacaatgttgagcagaaatgatgtagagagaagttgagttgaaaatgaaaggaagtaagaatgatgataaaaggaattctctttgaccttgatgaaacacttttaaatcgaaaaaaatcggtagaatcatttattcgcgatcaatataaacgatatcaaccttatttggcaggagtagaagaaggtaaatattgctctcgtttcattgaacttgataacaacggatacacgtggaaagatcgtgtttatgagaagttagtagatgaatataaattaccgttatcttctgtagagcttttagatgattatcttcttcattttaaacagcattgtcaaccttttccgggcatgctagaaatgcttaaggagttgaaaaaacgcggctacaaacttggtatcatcacaaatggaagaacggcatttcaattaagcaatattcgtgctcttggaattgaagcatattttaatacgattgttatttcggagcaagaaggagtgaaaaaaccagagagtacgatatttcaacgagcacttgaacgtatcggtttagaagctcatgaagcagtttttgtaggagatcatctcatcaacgacataaaaggtgcgaaagacgtagggatgaaagcgatatggaaaaaacgagataaggaaatcgtagagacaggggaagactacgtctattcgttgatcgaccttttatccgttgtagagaaatggaatgctaatagaaacaaaactaatcaacattgaacctagcgaagcctgtctacaaattgatcagttgagatggtgtttgcaaaccattgaagcgtatgattatgatgttgaatcatttgtgaagcctttaaaatcggcgtatcccaggtactatgtgcatcttcaattaaatgtgtaaaaaagcctttatagtgggcacttcggcatgttgtatcgatacaaatttctgtttgaatgccggcgatgagtaagtttttgatccctttgtcatgtagttgtttttcaagagttgtttcgtaaaaggaatcgggtgtcgttttctgaatcacgagatcgtctttttcaacagttagaaaaggatgaagcttccagttttcgctatgccgctttagatctagtcctttggactcgtgttgaatgtagaagatgggcatgtgtttcgatttagcagatgcgatcagtttttttagattatataaaagttttgcatcatgatagacggatgctccgcgttgaaacatacggttttgaacatcgataatgagaagtgcagttgcttgcaaaaatatctccccctctaaaatgagaacaaacgttctataatttataatacgcttattaaaaggaaaattcaatctgtatttgaaaaaaacattcattggtactatgtatgtttaaaacaggtaaaaaaaggggacatttcagttgtatgcaaattagaaggagctgatattcaatgagtaatgtaatgtttacttcacaagcaactgcagaaggcggacgtaatggacaagttaaatcttcggatggtttaattgacttaaatcttgttatgccaacagaaaaatcaagcgaaacaggctcaaaccctgagcaactgtttgctgctgcttatgccgcttgctatgatggtgcattaaaccttgtggcatcgaagaaaaaaatggacattgattcgaaaatcacagcagacgttagcttgttgaaagatgaagcagataatggcttcaaaattggcgtagcccttaccgtagaaattaaaggtgttagccaggaagacgctgaaatgttagcagaagaagctcacaaagtatgtccttactctaaggcaacacgaggcaatattgacgtagaaattaacgcaaaagctgtttaatagctaaaagccgttctcctaatattaggagaacggcttttttcatcaaaagtcttaaacgaagaaaagagcggttaagttatttctgaaattcaatatcttccggaagttctgttacatctgcatcgttaaagaatgtctttgagaggtcgcggattgtgccgtcttcgagcatttcttcaataacgccattaacctttgaaatgagttcttcgttttctttattcatcaatagtccaccttcactcggcatgtactgaatatcagggtgaatggtaaggttaagttctgggaaggctgctagagccaatcgttgcaaatagacatcatttaaaataacatccgttcttccgttatcaacgtcacgaaggtactgttcatttgtagcgttatcgtagatgacttcttcagcgcctttttcttttgcaagtttcataaagtttgttgtcgctgcaccagctgctttttttccttccaaatcgttgattgagtcaatcccagaaaggtcatcagcgcgtacgatcgctgttccgtaagaatgtttgtatggggtagacagggcgaatttttctttacgctcttctgtaataccaatatcgttagcggccatgtcaacttttccagtttgtacagccgtcaacattccatcaaagcccatttcaacaaattcaacttttaaatccagacggttagccatttctttcacgatttcaacgtcgaaacctgttaagtcattcgtttcttgctcgtgataagaagttgggtacagggtgccagatgtcgccacttcaattgttcccttatcctggatatctccccatgttgtttgttcctcttctttcgcattattgttaccacatgctgctagtactccaattaagactagcaataaaagcgtctgctttaacttcatctagtatttccccctttttagtcagaacattaccatagcaaatcttctcaccttctagcaaacgatttagactaaattttgttaatgagattgtaagaggaagtcctttttaatgatgcattcaagtaccgagataaatcaatattaaaaataggctagataaaaaatgtgcaagcgtcggccataagacccagtttagtttataaatgagagggtaacaggaccatatcgaaccccctgagatttctctgggttattcaataacggaaggggtatggagctttgaaacaatcgatcggaagttgtacgcaccgatactcggtggtgcaacaccaaacaaaaatggcaattgaacattccaagcgcttgtctaagaagaaagtagatgttcggagaatatctcaaatgactgggttttcagaagaacaaattcttgaatcgatggaatttggagatgccgattttaaaatcgaacgtccaacacttccaaaacgccatatccatttagagctgtaatgtaaacgtccagcaaatgaacgagcctgcttaggtgataaaagtaggcttttttcttgtgaagcggataaaagggaaaagttggttagtttcatagctagttgggtacaagatagacatagaaaaatggattaatattgattgaaagcggatgaaatatgactttcaatctgaaaggagaagtgtatgaaagaaaagaaaaatcaaaaaggaaattcagtattttggatatcgggcttagtcatattagtgctcgtgatatggggagctcttgttcctcaatccttttcatctgttgcaagtttagtctattcttttacaacaaatgcgtttggctggttctatttattagccgtaatcttttttgtgttgttttgtttttatcttgcgattagtaagtatggaaaaattcgcttaggtgatgatgaggagaaaccagaatatcccttttttacatggattggcatgttgtttagtgctggttttggtgttggtcttgttttctgggggatcgcagagcccatgacgcatttcgcaaaccctccaactggttttggggttgaaggtgagacggagcaagcagcaaagcttgcgatgcgatattcatttttccattggggcattcaccagtggtctgtatttacaattgtcggtcttgtgatggcatatttccagtatcggaaaggtcgcagaagtttgatcagtgaaacgatttcgagtggctcgaatgcgaataaaaaatcatcatggaaaaaagtgattaatatccttgctgttattgcaaccgtaatgggtgtagccacatcgcttggctttggcatcttgcaaattaacggcggtttagattatatgtatggacttcctcaaaatggtatggtccaaatcggtattactgctattctctttcttttatatatggcttcatctactacgggacttaacaaaggcatcaagtatttgagtaatttaaaccttgcccttgctcttctactgatgctgtttattcttttccttggtccaacagtatttattcttgaaagctttacgcttgcactcggaggttacattcagaagtttattgaaatgagcttctttatgactccttatcaaggcggatcatgggtgaaagaatggaccgtcttctattgggcatgggtcattgcttggtcaccctttattggcgctttcgttgcccgagtttcaaaaggacgaaccattcgtgaaatgatttttggcgtattgattgttcctccattcattgccatggtgtggatagccgtatttggtggagctgcttttcatctcgacctttttcaagggacagccattgcagacgctgtaaataacgatgtaaccagtgctttatttgtgacattagagcaatttccgctcactcaggtgctatccatcttgtcactgtttctaatctgtgtctttcttgttacttccgctgattcagctacctttgttctcgggatgatgacttcagatggtgacttaaatccttctcttttctcaaagcttgtatggggcaccttgattgccgccattactgcggtattaattattagtagcgggctacaggggcttcagacggcttcacttgtggcagctttaccgtttacggtgatcttactcatcatgtgcgtgaacctttttaaatcgctacgaaaagaagtaagagtagcaaataggaagcgagagcaaacattattgaaaaaagtagccgaagcaacgaaagagaagaaagaacgtcgacaaaaacaatcttcttaacaagttattcaatagaaaagtttttttcatgtatctatcttgtctcttattcttgtagactattagtaaaggtgtgcttgaaaaatagtgagatagagttaatttcacgaagttgtgaaagaaagaggattgagaatgtcagatatattatggattacttatcttggaatactaggagcgccagcgatagggtttttattaaaagggaaatataaaacaataccaatgaaagttgattttatcgtctcatgtatgacatggactggtttatttggatatgtaacgagtataagtatcggaccagctctactatggaaaattgttttcgtcgtcggaatcgtgtgggatctactatttgtgatttatatcgaccaaagtgatgaagcgattgagggatggagtgagaaaacggtgaaagctacaacagtcgtattctcgattttgatgctcctaccactttattatgggctctttcgctatgcattttaaactcaatcttgtataaaaagaaaaaggcgcgtcgcccgggggggaacgcgcctttttgaggtttaaccaagtgctacatcgagaaccatcatgacggaaaaaccaatcataagtgacatggaagcaatttgaacattccctttctcttgagaaccaggaatgatttcttttgctactacaaaaatcatcgcaccagcagcaaagctcagggcatacggtaaaaggggctgaatgtaaataacagcaagcgccccaacaacagctgaaataggctcaacaactcctgatagctgtccgtagaaaaagcttttcgctttagacataccgtcacctcgaagtggtacagagacagcggtaccttcaggaatgttttgaatgccaattccgatcgcaagtgcaatcgcaccggcaagtgttgagctcgaaaactctgcggctacagcaccgaatgcgacaccaatagcaagaccttcaggaatgttgtgcatcgtaatggagaaaacaagcattgcggtacggtgttttgcttttttatctttaatgtctttaaaatacaaatcttcattaatatgtggcaagatacgatcaacgagaagaaggaaaaatcctcctaatagaaatccaacaactgctgggatatatccaggtactccctgttgttcagccatctctatcccagggctaagtagggaccaaaagcttgctgcaatcataacgcctcccgcaaatgcaagcatgccatcaaagactttttgattaacagttcttgtaaagaacacaaatgatgccccaagtgcagtggcgccccatgtaaacatcgtaaaaaggaatgcctgtgagacagggcttaatccaacaatccaatcacccatgagtaaactctccttctaagaatctatctatattttcctatcatcatattttttgcctttaggaaaaatctatacactcaagtctaatccgactgttgttaactgtcaacattcgtgaatcataggaagtgttttatcattaatctaaaaaagcccggcatttgtgccggactttgtacattattttgtaacggtaaccgcttgacttagcatagctagcatgtcgtccttgatgtgcttccacatgtcatgatccgttgtaaatcgttcagtggtttcactaataaatgagaggaacgccttcttaaagtttggatctccctttggaggaagcgactgttttgctcgatcaacatacgcttgcacttctggagcacgaggcccccactttccaacttcacgtccttctgaatcaaccaatacaataattggaatcgatctcgccgttccatttgttaagtattgatccatcagttcaaggtgattgtcacgaataaaataggcactttcgattaaggcttcatcagccattcgcataaaaatagggaggttaaccattgcatcaccgcaccagtcagctgtgatgacaagagcacggagcttttctgattgaagagaatgaagaaattcaaggtcatctttttcgagagtaacatgattataaatggttaataaatcatctcgatgttcgtccatactatgaatgtattgttgcatggacatgcccctatcaaaccaattcgttagatccattgatggccctcctatattcgatttcttccttaattaattatactacgaaaaagcctagaaatccttttttcatagaatagccttttcgtatcaaagcatatcgatagtgacataacctaggctatgatataattgagtcacataaaggacgtgataagagtgaattctgtcggagccattcaaagtacgaagcagattgaggtgttaaaaagagccttattaaagcgatcgaaacgagactatttgctgtttattttcagtattaatacaggcttgcgtttaactcctcttttgcatctgactcttaatcatgtgataaagaatgaatcttttaatgaattccttgaatcgtctactactgaaacaacagatatctacctcaattcagaagtgaaacgcgctcttacgctttatgtgaatgagcatccctcaaatgataacttttacctttttcatacgaaaaaagaccctactcatccaattacaagacagcaggttcatcgcatcttatctcaagcaggaaaagatgccggacttgagcacccaatcagctttcatagtttaagaaaaacgtttggttatcatgcgtttcagcagggagtagccgtgtcactcattcaaaaaatttatggacatgcgacgagaagtgaaacattaaaatatatcggtataaattctgagcaaattccgaaactgaagattgatgtacatttatagaagggaggaagatcaatggagacgaatgcagtaatattattcagcgccatctttttaattggtggtgtcctgatggccaaattttcttcccggttaggtgtcccggcacttgtcttgtttattatcgtgggtatgattacaggaagcgatggactcggatatatttattttgataatgcttcacttacacagtcacttggtattttagctctcgtgttaatcttgtttgatggtggcttacaaacagaatggcgccgcaccaaagctgttcttcctatttcattgtctctcgcaacagtgggcgttcttattacttctggattagttggtattactgccaaaatgattttagatgtgacttggaatgaagcgctactcttaggtgcgattgtagggtcaacagatgcagcagcggtctttgccgtgttgaaagggaagaacattaagcggaagttgcaatcgacccttgaagcagaatcaggctcgaatgacccaatggctatgtttttaacgcttactttattacagctcgccattggcgagactgcctttggtgcatccgtaatcctgtcgttcttctggcaaatgggcgctggactactcctaggtgtcttgcttggatatgcggcctcatgggcgatgaagaatatcgagttaggttcaaacgggttataccctgttttttcaattgcgattgccttaattacatatagcgcaactgatttggtcaacgcaagcggactgcttgccgtgtatgctgcagcccttgtacttggtaatacgaaaagtcttccatatggccaaacgattttccgcttccatgatggaattgcttggatgatgcaaatcttaatgtttattatgctaggcctccttgttaatccttctgaactattctcaacctggattgtattaaaagggctagctctctcgtttattttgattgtgatcgctcgtccaattgctgtttttctttcaagtatcccgtttaagttcacacttaaagaaaaaacctttctttcttgggccggattacgaggcgccgtgccaattgtgttagcgactttcccgctgttagaaggactagaaaatagccagcttttctttaaccttattttctttattgtcctcacttctgcacttgtacaaggagctactattcctcttatagggaaaaaattagggctaactggccctgaagttcatgtgccttctcattcattagaactcgtatcatcaacaacggttaacgccgagatgattccttataccattaggccatcttctaaattaattggaaaagagttatccgatatatcatttccagataaagtgctcgttagtgcaattattcgccgagatgaattgatcgcaccttctggagatacgaaaataaaagtgaacgatgtcctctatattcttgttgaaaatcaaaagaaatcagaacttgaaaaggtactggggattcgaaagacaatcggtggataacaaaaaagttttgaacgaaggggctctgcactgcagagccccttcgttcgtttcattcacataaaattagggaaaatccttcctaaattactagcatcatttttcgttgatatacgcaacaaaacgatcatctaacaatgaagaaagaaggtcatagataatgcctgaaggtcctgaaattagaagagctgcagaccaggtagagaaagcattacaaaaaggacacgtaatggacgttttctttgcttttgaacagctaaaaggatatgaatctctcttaagcggtgcacaggtaaagagggtagatacgaaaggaaaggcgatgctgattcgatttgataatggatataccatctactcgcataatcagctttatgggaaatgggtgatacggaacgcctacaattatccgaaaacaaatcgtcagctacgtctagcccttcataatgagaagaagtctgcccttctatatagcgcatcagatattgaagtgcttcgtgatgaagaagtgcctctccacccgtttattgcgaaagtaggacctgatttactgagtgaagaagtaagtgcggaacaattgaaggagcgctttgaatcaaaagccttccataagaaaaagtggacttctcttttactagatcagtcatttattggtggtattggcaactatttaagaagtgaaattctctttctagcaggtattcatccggatttacgtccaattgattgctcggagcggcagttaacgaaagcggctgaagctaccgtgaagctcgtacaccaatcctatgaacataacgggattacaaatgatcttgagttagcgatgaagttgaaggagaaaggacaaaaacgcctccaatatagacattgggtttttaaccgagaaggggaagcttgccgaatcgatggaacagaaattcaaaaagtgaaagctggatcaaggagattgtatttttgtccaacgtgtcaggcgaagtaagaaaaaaacttgcaaacgcattcagtggtgtggtaaattgtatgtaaccggttacatgatgacgaaggagtgaagcagatggctacaattcgagatgtagcagaacaagcgggagtatctgttgcgaccgtttctcgtgttttaaatgataatggttatgtaggagccgaaacgagaaaacgcgtgatgggtgcgatcgaaagtttgaactacagtccaaatgaagtagcgcgctcactctataagcgagaatcaaggttaattggactgcttcttcctgacattacgaaccccttttttcctcagttagcacgtgggattgaggatgaagtcaatcgagctggattcaggttgttacttggaaacagtgatgaagaggcaacgaaagagttagagtacattcaaacctttttacaaaatcaagttgttggccttatttcagcaacaaataatacagataacgagaattatacaaatcttgatttgcccgttgtctttctagatcgtgtgtcaaaacaacatccttctgtttatgctgatggaatcgaaggaggacgacttgcagcgaaagcgttagttgagagagggtcaaaaagaattacactgattaaaggacctgggcatgtaaagccagctatggatcgatttcaaggagcactcgctgaattaagtgaagctgaagttgatttttcggttctctcgacttcgtcttatgcgtttgatgatgcacgtacatgggctgaagagctgtttgcaaagcatcctgatacagacggagtgattgcaagtaacgatattgtagcaattgccattttacatgaggcacttcgtcttggcagaaggattccggaggacttacagctgattggttacgatgatattccgtttagtagtttgtcctatccttctttatcaacgatcaggcaacccgcttatgaaatggggaaggaagcagcaaagttactcattcgcatgattcgaaaagaaaaggaaattgatcaaacgattcaattgccagttacgctaattgaacgaaatacgacaagaaaggttgatccaaatgcgtaaagcgaaaatagctgttatcggaagttcctcaatggatcttgtagtaacttccaagaaacgtccaggagcaggagaaacggtattaggagaatcatttaaaaccgttcctggcggcaaaggggcaaatcaagctgttgcagctgcacggcttggtgcagaagtgcatatgattggctgtgtcggtgacgaccatcacggcgatgccatcttaagaaattttaaaaacaatggtgttaaaaccgaccatgtggaaccggttacaggtgttgaaagtggaacggctcacatcattcttgcagagggcgataacagtattgtggttgttaaaggagcgaatgattacattacgccttcttacattaataagaaggctgagctcattgaaagttgcgacctggtcatgattcagcaagaaataccggaagaaacggtagcgtttgtagctgagttatgtcagaaagtgaatgtgccgttgttacttaacccagcgcctgcaagacccatctcacagcaggtaattgatttagctacgtatatgacacctaatgaacatgaggcagacgttctatttagtgggcaagcaatgaatgagtcattaagaatgtatcctgaaaaagtatttattacggaaggcgcagcaggcgtacgttattataatggacaggaagaagtgttgattccctcctttaaagtagaagccgttgatacaacaggagcaggtgatacgtttaacgctgcatttggtacagcgattgcggaaggaaaaacgctagcggaaagcatcagatttggtaatcgggcagcttctctttctgttactggttttggggcacagggtggcatgccgacacgcgaagaagtggaaaggatgctgtcacaatgaaaaaaagaggaatcttaaatagtcatatttcaaaaattcttgcagatctcggtcatacagatcagattgttatcgcagatgctggactcccggtacctgacggagtgaaaaaaattgatcttgccttacgaccgggaatgccggggtttagtgatgttgtgagagaacttcttcatgaaatggttgtcgaacgtgtgacgcttgcaaatgaaattgaaggtaaccaaaaggtacatgattggctaaagcaggagcttcaagaaactgaacggaattatgtcgatcatgaagcatttaaagagcaaacgaggcaggcgaaagttgtgatccgtacaggtgagacgacgccatatgccaattgcattcttcattcaggagtaatcttttaaacgaggtgaacagcatgcaaattagcatgagagacattcataaagcatttggagcgaacaaagtgcttgaaggcgtgaatatcgacattcaaaatgccgaagttcatgcccttatgggagagaatggagcggggaagtcaacgctcatgaacattctaactggtcttcataagaaagatcatggaacaattgtgatcgatggaaaagaaagggtttttgataatccgaaagaagctgaagaaaatggtgttgcttttattcatcaagagctgaacatctggccagaattaacggtattagagaatttattcattaataaggaaccggttacatcttttggacttattcatacgaaaaaaatgaaagcgattgcgaatgagcagtttaataaactagcaatctccattcctctttaccaggaagcaggaaaatgttccgttggagagcagcagatgattgaaattgcaaaggcattaatgacagatgcgaaagtgattattatggatgagcccacagcagcactaacggaacgtgagattcaaacgctgttccaggtgattcgctcactaaagaaaagcggcgtttccattgtctacatttcgcatcgtatggaagagatcttcacaatctgtgacagcattaccgtcatgcgagatggaaaaacagttgatacaaaagcgataccagatacgaattttgatgaagtcgttcgaaaaatggttgggcgagaattaactgatcgctttcctgaacgttctccaaaacctggtgaaacgatgttagaagtaaaaggcctcggtagaaatggcgtgtttgagaatgtcaatttctccgtaaggtccggtgagatcgttggtgtttcggggttaatgggtgctggtcgaactgaagtcatgcggacgatttttggactggatggaaaatacactggcgatattttcattagtggtaaaaaagtagtcattaaaaatccttctcaggcagttcaactaggacttggttttattacagaagatcgaaaagaagagggacttgtgctcgatttctcactgaaagataatatcgcgttaccgagtctttatagctttgctccgaaaggcttaatcaatgaaaaaagcgagctggactttgttgagcttctcattaaaaggctaacgattaaaacagagtctgctcgaacaagtgctaaaaacctttctggaggtaatcaacaaaaagtggttatcgctaaatggattggaatcggacctaaagtattgattttagatgagcctactcgtggtgttgatgttggagcaaagcgtgagatttatcagttaatgaatgagttaacggatcgcggggttgctattatcatggtttcctctgaactaccggaagtgcttggtatgagtgatcggattcttgtttttcgtgaaggtcaactgactggagaagtatccaagaaggaagcaacgcaagagaaaataatgacgctggcaacaggaggtcaagaagatgaataatgcgatgaaaacaaatcatgttgggaatgtgatgcaaaagctaggaccactattaggtttactagtgcttgttgcaaccgtttccatcttaaatccaagttttttagaaccacttaatttattgaatttacttcgacaagtggcaatcaatgcgcttatcgcttacgggatgacatttgttattttaacaggcggaattgacttatcggttggttcgattttagcactctcaagtgcactgatggctggcatgatggtgtcaggaattgacccgattttggcaatactcattggttcattgcttggagctgtcatgggtatggtgaatggactgttgattacgaaaggaaaaatggctccgtttatcgcgacgcttgcaacgatgactttattccggggattaacgctcgtctatacagatgggaacccgattacggggcttggcgatagctatgctttccagcttttcggaagaggctatttccttggtattccagtgccggcgatcacgatgttactatcattcgctgttctctgggtgattttgcataaaacaccgtttggtcgaaaaacgtatgccatcggtggaaatgagaaagctgctcttatctcaggtattaaagtgaatcgcatgaaagtgatgatttattctctagctggactactttcagctttagcaggagcgattttaacgtcgagactgaactcagcacaaccaactgcagggacatcgtacgagcttgatgcaatcgcggcagtcgtgcttggcggaacaagcctttccggaggtcgaggtttaattattggaacattaatcggtgcactaattattggtacgttaaataacggcttaaatttgcttggtgtatcttctttcttccagatggttgtcaaaggtgttgttattatcattgctgtcttgattgatcgtaaaaaagcagcgtaggaggattactatgaaaaagttattgccattcctgctcagtttgtcattgcttgtgcttggagcgtgttcgcttcagccgcctgaatgggcaaagccgagtcaggaaacagacataaaagatattaaaatcggtttatccgtatcaacgttaaataatccctttttcgtatcgatgaaagatggagtagaagctgaagcgaaagaaaaaggcatggacattgttgtcgtagatgcgcaaaatgatgcggcaaaacaaattagcgatgtagaagatctgattcagcagggtgtcgatgtcttattgattaatccaactgattcagcagcgatttcgacggctgttcaatcagcgaatagcctgggtattcctgttgttacactcgatcgctctgccgagaaaggcgatgtagccactcttgtttcttcggataatgaaaaaggcggagagatggctggcgagtttttagttgagcagttaggagaaggggcaaaaatagctgagcttgaaggtgtaccaggcgcatccgctactcgtgaacgtggtcagggattccataacattgctgacgagaagcttgatgttgttgctaagcaaacggctaacttcgatcgtacagaaggattgaatacaatggaaaatttgcttcaagggaacccagatattgaagctgtgtttgcccacaatgatgaaatggcacttggtgctcttcaagccatacaaagctctggaaaagacattctcgttgttggttttgatggaaatgaagatgcgattaatagtattcaagatgggaagctatcagcgactgttgcacagcaacctgaagaaattggttcactcgccgttcaagctggtgtcgatgtgcttaaaggaaatgaagtggatgaaacgatcccagttccgctaaaactagtaacagaataggaagtaacgctcccacgtttgggggcgtttttccgtataaaaggagtttggagagaaaaagtcgaaatcactttataaagaaggaggtggcgaagatggaagcatggattgatgcaatgttctcccaaacgcttgtcgatgaagcgagcaagcgatttggtattcaggtgactcggataaaaaagataggcgattttgagaactatgtgtttgaagtgaaagacaagaacagggcttggattcttcgttttactcatagctcacatcgctcgttagaagaagtgaaagcagaactcgactggattgatcgattatataatggtagtgttcacgtagcacgatcccatccttcagtaaacgataaaatggtggaggaattctcattagaggacggatatttctttgcttgtctatttgagaaagttcctggtgaggcagtcaaagtaaatgattcgttattcgatgctcctttgttcgaggcatggggaaaagagattgggaaaatgcaccgtatttcaatggtaaagcatgtttcagtccagcgaaaaaggtgggatgaaggtgacctgcttcaatttgatcgttacctttccaagagcgaagatgccaaaatcatagttgaaggaaaaaggctaattgaagaaatacagacgtttcatgaaactggaaaaacgttcggactcattcactcggatgttcatcacggtaactttcactatgatggaaatgcgattcatctctttgatttcgacgatgccatgtatcattattatgtgagtgatattgccattcctgtctattatgcggtttggcataaatgtggaaccgcgtctcttacagaacgatcaagctttgctacagcatttttacgttcatttttgaaaggttaccatgaagaagtaaatgtctcttatgaatggcttaaaacgcttccttattttcttcgattaagagattttgaactctatactgtagttcataaaaaatacgatgttactaagatgaatccaaaagagaaagccatgttaaacggcatccgtgaacgattgattcactctgaattaattgcagagcctgcattagaagatcgagagaagtggattgaaagcacgtaacgatgtttcccgattactaagaagtggtaatgtactttgggtagcttttaatagaaaggatgattgaaagtggcaaaagtacaaattggtaattcgggcttacaggcaaatccaatcggtttaggtacaaacgccgttggtggacataacatttatccgaatttaaatgaagaaacagggaaagaccttgtaagagcagcattagataatggcataaatcttttggatacagcttatatatatggccctgagcgttctgaagaacttgttggcgaagttgtaaaagaacgtggaagcagagatgatatcgtcttagcaacaaaaggagctcatgaatttaaaggagaagaagttgtttataacaattcaccttcgttcctaaaacaatcggtggagaatagcttaaagcgacttcaaacggattacatcgatctattctatattcatttcccagatgaacatacgaacaaagctgaagcagtaggtgctctaaaagaattgaaagatcaggggaaaattaaatcgattggtgtttctaattttgatttagagcagttaaaagaagcaaacaaggatggctatgtggatgtgcttcaaagtcactataacttgtttcaccgtgatgctgaggaagaccttcttccttatactgcggaacaggggatttcctttatcccatacttccctcttgcttccggacttctagcaggtaaatatgatgagaacacgacgttcgatgatattcgatcgaaggatcctctattccagggagaagcttttaaagcaaacctaaaaaaagtcgatcaggtacgaaatattgcgaatgcgaagggtgttgaggttccacaccttgttcttgcgtggtatttaacgcgtgatagcattgatgtgcttatcccaggggccaagcgtcaagaacaggttgttgataacttgaaaacacttgatgtgaagttaacaagcgaagaaatccagcgtatcgatcagattttcaagtaagagaaggagaaaccagaggattttacgtcctctggttttttgtaggaatttctatctgtttggtccaggattatgcggatatgtacgtaatacataaaaaggaggcctccaacttgaaaaagagcgtgctttttatccttacactttctgttgtgctcattgcaattcttctcattttccttttcgaagatgatcgtgcagcacgtccaggtatgatcatgtcactcggtgcgcttgcggtcgttttccagcgggttgtcttattactgatgagaagaaaaaggaagaatcacaaaaggaggtagtaaatgataaaagtaaaggcacttgggctcctttttagagaactagagatgttagttgaagcttattatggaaagcattcaaaaggatttggaagttattatcgtccccttggcgggaatatagaagttggagagcattctaaagaaacggtagtaagagaatttgaagaagagcttggcattgatgtgaacgtaaatcagtacataacttgccttgaaaatcgatttcaaattggtgaggaatggtcgcatgaaatgattcagctttatacagtatcgttttctgaagcgaaatattatgaaaaagagacctattcatttcttgaacatgatgcggtagctaaatggatatcgattaaggatgtagttgatgggaatatccactgttaccccaatggtttaggaacggtattgaagcgaatgacaacacaagataaataaccatgtctctatgatgacgttactgtcatctaaatgaaatatcaaattcaatccatattcttttaatcaagtggaaagactactataatgaatactggataggaaatacgatgttcctatcttagaataaagggtgaacctaatggaacgtaagtcaaatgaagctgagattgcgagttatgtcggaaaactgttaagagataactttgggaaaggcccatcatcggtttacgtatcgatacaggaaccgtatatgacaatttattttcgggattttcttgcaccgatggaacgtgtacttgtggatcagaaagaagaaatgcgtgttgaagaaacgcgtgatttgctgattcaaggcttattacctgaaatcaaagcatcaattcgagtaatgacaggtgttgaaatcgagtcattttatcatgattggtctcttcaaaatcgctcgggagttattgttggtgtcatgaataacatcaatgaaatggaaggtaaggcacttcctgtatatgataaaaaagaacgcgttcatgaggaaattattagagtcagtatgcttgcagaaaaagcaccagaaaaagtagactcctgcatgctaaatgaccgaacgctcgtcgttcttcgtgaaggtattctcgttcgcatagagaaagagttaattcgcgatggttttgaagaacaattaaaattatcgaaaagacggctggagaaaagtttgcttcacgatcaacaatttgaatcgatcctttctacaaaagtagaagatatctttgtagactgggattttaatctagataaaagctatattacattaattcttaaaccaaacggataataggtggaaataaactgggcgatagaaccagttataagccaaaaagaaccagacttctggttctttttggctttttttatttttttatccttccaatgcagcagtaaacacactatgactatagaaacagacaaggaggaagataatgaaatacctaatcgatcattcaaaacgaattattcatcgaacaccatttgctggtgatcaatgtgaatttcatacgacacctatttcaaagagagaaggaacgcacgatcatctctatcttcaaaagttaattgataaagagttatatgaagtttgtagctattgtaaaggaaatattcgataagggacggtatatttttaggatagtaaaaagaaggaagtccctcttttcgttacgaatgtcttaatgatgttaggcgaataggaggtacgcgatggatcgaaacagagcgggagtgatcatcattcaaggtgatcaaatcgctttaatagagcgaaatcgaaatgatgaaacgtattatgttattccaggcggtggaatggaagaaagtgaaacacccaaacaagctgccaaaagagaagccctcgaagaactaggagtagacgtacgtgtagaagcgttatatacttcttttcaatttaatggggaacatttttactatacggccgaaatcatcagtggtgaatttggaaacggaaccggtagcgagtatcggtcttcttctcataaacgaggaacgtataaagcggtttgggtaccggtagctgaactaaacgaattacgtatctaccctgaagaagtcatttcagtattggtttctgacgcgaggcttaaacttactgaagttaattctaaaataagaaaaaattatcaattaagctgggtaggaagtatgtatccttatttagatgaaccaacctgtactcaggttggaaacgtctcggtcggtcgtttcggagggaacacttcagcaggacagaataagaatgaagatggctgtctcgtctggactggagcggattgggaatttgcaatcctattagatgctcataaaacggcgagtagtgcagcgcttattttagatgaagttgagcgaaatcaatcgatgtttactgacattcttataaaaaagacgcaagaagcagtgagtgaattgcgagaggctgtagttggcctttttcaaaacgcagcatttaaacaaaagtgccgggaagtggaaggggaaacagcctgcttaattgttgttcgaaaagataagtatctatggtggttctcggtgggtgattgtctattgtttttaattcatccagagctagaagcgcttggagaatcgatgcaaaatcatcgaagtttctacgagtggatcggagaagtgaacacatttgagacgattgtcccatgctatagcatcggcacaaaggaattaagaaaaggtgataacctcatcttcttaacgacggatggattacttgaatatcctcatactaattttcatttaccaggtcaagtcgtggcgcgaatgaaaggtaagtcggttaaagaagatgtccaacggttattggaagaagtagagggtaagggtgtaagagatagcacaaccatagtggcatggaagattaacatagtagaagatggtgtaatgccgagtgacctattctaaaagaagacgtcgcgcgtgtgcgacgtcttcttttagaatgaactgatgatctgaatgagatacccgccgatgatgccaataccaacaatcatccaggctgggcacttccaaattgagagtagagcgaataaaatcgcagcaagggcgaaatcttctcctgacataatcgcgcttttaataacagggtcataaaaggccgctaataaaatacctactacactagcgttcacgccaattaaaactttttgaaatgcagcccgctttcgtaattcatttagaaatggaagggcagctgtgatcagtagaaaggacggtaagaatatcgctattgtgacgacgattgctcccgtaatgcctcctagcatcgtaccaagatagcttgcaaacgtaaacagtggaccgggaactgcttgggccattccataacctgcaaggaattgatcgcttgagagaagaccctgcggaacaatttctcgttcaatcatcggtaggacgacgtgccctcctccgaatactagcgcacctactcgaaagaacgtgtcgaataaattgagaagcgcatgatccgttaaacggttaagaattggtagaacgattaatagcgtacttaacagggctagagagccaacaccaactttttttgatatggaaacgggaaagggttttacggttgtttctgttttgtcgttaaacaaacgtaatcctagtagcccagctcctgcgataacaagaagctgcatccatgcagatggatagagtagcatgataagagctgcggctaaggcgatcgcaatcctcgttcgatccggtgttaattttttccctaatccaattattgcatgaagcacgactgctgccgcgacaatttttaagctgtgaataaatgtcccatcaccaagcgaaaaggtttgataaagcatggcaaagatgacaagaatgattatggaaggaactgtgaagccaaaccatgatagaaagccaccaaacatcccaccgcgcatcataccgattgcaattccaacttgactgctggcaggtcccggcaaaaattgacatagtgcaataatgtcagcatacattttgtcatcaagccacttccttcgatcaacatattcatccttaaaataggcaagatgagcaacaggacctccaaatgaggttaaaccgagtcgcgttgatacgagaagaatttcaataaaggttttgaaagagtgtttaccaggcatattaaccctccattagtctttgatttctttaaatagttcgtacgctttagattgagcttctaacaatattcgttcgccttcttcagtggtacgataatattttcgtatctttccatttacattgttttcttcttttgaaagtaaaccatcattttccatgttgtgaaggatgggatataaggtacctgagctcatctcatagccgtgttcacgaagttcttctagcatccaggagccatagatcgcttcttcctttgcatggtgaagaatatgaatttgaataaagcctagaaagagtttccttagtattttattatccaactagtaccacctcttattatttgttttcgatatcggttttcgatattgatgctaagcaaatattaacgggtagatgaatgattcacaagggaatggaagaattttttacaaatccttaacatgattgaggtttcacctttcaatgattcgatcaaccgttaagtgagtaacttcataagcttatttcttttaatagtgctttaggtatagtaagatattgtctgttgtttaaaacgtttttgaacggtaaatcctaagtgaaatcaagatttagaacgcaactgctaaggagagaaggaggggaatcgatgaaggaaaaggaaacgtatgaattcctggctgatgatcccaattttaatgttaaaccagtcatgatctcgcttataatcggagctttttttgccatcttaaatgaaaccctattaaatattgcattaacaacgttaatggagaagtttagcgtaacacctgccactgtccaatggatggcaaccggcttcttgctggtaatggggattttaacaccggtttccgcacttctgctgcagtcctatacgacaagacagatgtttcttggcacaatgacgatttttacaatcggaaccgttatatgcgcgatcgcgccgactttcgctatacttttaagcggtagactgttacaagcagtaggtacaggattattaattccaatcatttttaacacattcttactcattttccctccagagcgacggggaagtgtgatggggacgatcggtctcgtgattatgtttgcgccagccattggaccaaccctttcaggcgtgattgtggacaaccttggttggagatatctgtttattaccgttattcctttcgcgctgttttcgattggattcggctacaagttccttcgcaatgttggtgaggttacgaagcctaaagttgatattctttcaatactcttttccacattaggatttggaggcgttgtacttggatttagctttgcgggtgagggtgaggttggctacttagccccgcaagtctttttacctcttgtgattggggttgtttccctgattatatttgtccttcgtcagttaaaattaaaagagccaatgcttgatgttcgagtatttaaatatccgatgttcacagttgccgtcttgctctttattatcattattatggcgatgttctcatctgaaattattttaccgatgtacatgcagggtccacttggattatcgccacaaacagccggattgattctactgcctggagcactgttaaatggcttaatgtcaccagtaatggggaagttattcgataagtttggaccaaggaaattaattattcctgctgctcttgtattgaccggtgttatgttcgtgtttagtacggtaaaggttgatacatccattgtgttaattgtttccacttatattttgctcatgctttcgatttcagcaatcatgatgccagctcaaacaaatggactaaatggacttcccaaaaatctttatccacacggaacggctatcatgaatacgctccaacctgtttcaggagcaatcggagtctctgttttcattagtattatgacaacacgtcaacagaattatctcgataatgctgctaacccagcagatccaacaacaattagccagtccctcgtgtcgggagtggaacttgtctatcttgttgcattcggttttgctgcagctggttttcttatttcattatttattcgaaaagcaatgcctgaagatcgaaaagatcaaactgaatcaaaagtggttaatgaataacgaaaaaagcgtctcactgtgagacgcttttttgttgtcacaatttcgtaaaagaaatcatgactttatgcttttataaagaaatgataaatgtaatatacttgaaacgattggaacagaaactgggaataaaccaaatataaagaaacaaatggtattacctttctaattattgttattttttttaccgatatttcactgcactttaacagaagagttacgaatcggaagggtacgttactgctgtattaaaagaacgttttcattgaaggaaaatgaactgcaagcaattgtaatggaatttgacattaaattttttagggagtattatactcaagtattaggatttaaaaaaaaataacatttttacatttaaaatatattcaacacattatgtaattctacaaggaggtctacaactgacatgcgaaataaattaagcagtcagattaataagccatggacgttgttctttggtgtcattctattattctggttaaaaacgtatgctgtctatcaaactgaatttgatcttggaattcaaaatggtatgcagtcgtttctattaatcttaaacccgattagttctttgttgctattctttggatttgccctattcttcaaaggacgtaaacgagcatgggcgatactaattatagatttcgtcctatcctttattctttatgcaaatgtcgtgtactatcgtttctttaatgactttattacacttccaacagtaatgcacacaaatgatgctggagagctgaaagacagtgcctttgcattaatgcagttctctgatgcgttttatttcattgatacgttgcttatacttggattaatcttatttaaagttataaagccacaagtcgcgatgaaaaaaaagaaaattgcacttgtatttgcctcagcagctgtcttctttacagtgaatctcggacttgctgaagccgatcgtccagaacttttaacacgtgcttttgatcgcacgtaccttgtgaaatatcttggtcagtttaactatcaaatctttgacgtcgttacaaccgttaagtctagctctcaaagcgcatttgcaagcagtgatgatttaacagatgttcgaaactttgttgaagcaaatcgaacagagccaaatccagagtacttcggtaaggctgagggaatgaacgtcatttatatttctcttgaatcgatgcaaagctttgtaattggaaaagaaatcgatggtcaggaagtaactccgttcttaaacagtcttgttgaagatcaaaatacgttttattttgataatattttccatcaagttggacagggaaaaacgtcggatgctgagtttatgatggcaaactccctctatccactaccaagtgggtcagttgcgatggaaaaagcgcgtaacacgtatcaggcgcagccagccattttggagcaaaaaggctactcaacgtcatccctacacggtaatggtaaaacgttctggaaccgtgatgagatgtataagtcatttggtattcagaaattctttgattcaagctattacgatatgaacgaagaagatgtccataactatgggctaaaagataaaccattctttaaacaatcaatgccatatcttgaaagtctcgaacagccgtttcatgcgaaaatgctaactttatcgaaccattttccgtttacaatggatgaaggggatgttgatttcccaacacctgaaacgaatgatgcagttgtaaatggttacttccagacagcgaagtatatggatgaatccattgagcaattctttaatgatttgaaagaatcaggactttatgacaataccgtgattgttatgtatggtgatcattatggtatttcgaataaccataataaggcgatgtctgaagtgatgggtgaggaagtaggcccgtatgaaaatgcacagctacaacgtgtgcctctgttcattactgcacctggtgtagaaggtaagcaggttcatgaatatggtggacatatggacatccgtgataccgttcttcatctactaggtgttgaaacagatgattatatttcgtttggctctgatctactttcagaagatcatcgtgaaatcgtgccattccgtaatggtgatttcgtaacgccggaagtaacgtctgttaatgagaagtgctacgcgaatccatcaggtgaaaaagtcgatgctgaagaatgtgagcagccaggacagtttgtcgaagagtcacttgaactctcagataaagtagtctacggcgatttactgcgcttctatgagcctgaaggtttcactcctgttgatcgtagtgattacgactataatgttgatcaaacagaaccagtgcaagaagatcctgcacaggaaaaagaacagaaataatccaaaagcatcccattaaaacggggtgcttttttgcgtgctcagaaaatgttctccttctaaagttgtagaagaaaataagtcattagctacagtaattgaatgggtaaataggttataatttccatgaggatgaaaaagagggagagatgatcatgaaacgacctatttgcatcacgtgtggaacgcaatacggcgatatggaggttaatcctgaaacgtgccctatttgtaaagaagaaagacagtatgttaatccagatggacaggaatggacaacgcttatcgacatgcagaaacaacagtttcaaaatcaagttattgaagaagaaaaaggcttatatagcattacaacagctccgacttttgcaattggtcaaacagcgtatctggtccagggtaatggatttaatgtgctatgggattgcatttcttaccttgatgaagcgacaattcaagcggttaaagacctcggtggaattgatgccattgccctgtcacatccgcattattactcttctcaggtagaatgggcagaagcttttaacgttccaatctatattcatgaagatgatgccaaatgggtgatgagagacagtgaaaggattgagttctggaatggtgagtcattggaacttgcccctagcttaaccattcatcgcctgggcggacacttccttggtggcgcagtgcttcatgtgaaggaagcaagcggagggaaagggctactgctgacgggtgacattatacaagttgtagctgatcaggaatgggttagtttcatgtatagctatccaaatttaattccgttacctgcgagcaaggtggaagaaatggctcataaggttaagccactgaagtttgatcgcctttacaacgcctttcatcgcttcgttgaatctggcgcagatgaggcggttcaacggtcggctactcgatatcttcaagctcttgaaggagagctatttcatacgtaaaagtaaaacctcctttactgaaggaggttttacttttaggaccaaggaaaagggaaaactttagatagagcgaatatagtttagaaggggagtggatggaaaagtaaaacaaaacgggtgttgaattggtatacaaaggtttggaaataaggagaggtggaaaaaccattacacaaagtgaaaatagtaggaagatgttagaaagaaaagttgtttaagcatcgattaggttttacggaggaggagtagggatgaaaatttataattttagtcggtcggcaggaaaagaaattacaaaattcggatcgcagtttatgatgtctcgcattactcagacggaatcaagcgtacatataggtgccatgtatctggacaaagaagggctgattggctttcatcaagccgtgacgccgcaattattattaatcgttagtggtgaaggattggtgagaggggaagataatgagttaatgaaggtaaaagaaggggatgctgtcttctggaataaggatgaatggcatgagacgactacggaaaaaggattaacggccattgcaatcgaaggtgaatttgatccggagttgtttttaaatgaaaaagaggaggcagaagagacagaagtataagtggaatacagataacaaatgatctgattacacgaagcaactagataaagataaacaaaaaagctcttccgccggggaagagctttttatatatgatttatgctttaactacgttagtagcttgtggtccgcggttaccttgctcagtgtcaaaagtaactgtttgaccttcttcaagagttttgaaaccttcgccttgaatagctgagaaatgtacgaatacgtcgtctccgccttcaacttcgatgaagccaaaacctttttctgcgttaaaccattttactgtacctttgttcatgtgtgtatcctccaagtgcattttgcacaaatattactattcctgctctacataatcatttgagatgtaagtacttcctaaagtagcctgctctttaataatcagtaccgaacaacaataattaaccttagtataacacgtctcccaaaaaaagcaaacctcttctggaaattccacctaaattgttctgaaaaaggacttaggaatgaagatatttcattctgattggcaatagaaatcactgatgcagtagggcttatagcatttatttggaatataaataaggcagtgagaaagtttttgatgtaaaatgaaatgtgttcctctatgatagagtagagaatcgatttatcagcggaggtaaaagatatgccagttcagaaatcgattattgaccaggaagttcgattaatcggaaaacagctagaagcaagaaagttagatattgcaaaaagcttacttaaaccaggcgcggacaatgcagaagcactgaagttacatactgagcttgttcaactgtgtgccgatactattttaatcggtatagaagaaacaatgccttacgttacaaagtggggaagagagacgggtgaactggcggttagtttcggctcagaactagatgagtcattgaaaaccacgtcagaatttagacaagcaatatggggtgtcattgagctaataacggtcgaagcaaatcagacggttcaaagtgtttttacagccggaaaattggttgatcgtatgcttgatcatgctgtttatgcttatagcacagcttatgttacctcatataaaaataaccttagccatgcccaagaagtatttcttgagctttctgttcccgttgtaccaatccttgagggcgtcgctgtattgccgattatcggtgatatcgacacgcatcgagctagtcttcttatggaaacagcgctaagagaatcaacagcaaaacacttaacgcatttatttattgatctttctggtgtcaccattgttgatacaatggttgccaacaatatttttaacattatttattctctagagctgttaggcgttaaggggatcctatcaggtattaggccagaagtggcacaaacgatgattcatctcgggatcgatttctcttccattcaaacgcatagtacgttaaaacaagcattagcaaggcatatattataggctttatcgtctaggagtaaaaagctgtccaaaacgggcagctttttttgcgagtaaaaacgaaaaaattggaatgttttttaaaagtaaaatccattgacggtgaagacaatgactaataaaatggtctcgaaaaatcttagtaagatcctctcttccacaagcaagaacgctaccatcttaagcgaaaagacggtttgtcttcaaaggtctgactgaccagcagatggaatcaggatgcttaggttttctttatttttttaggaagggaggatgtcgtaatgctttatcgaattacggtttatcttcttggtatgtttattaacttttttggtgttgcgcttgtcattcatgcgacgcttggagctgggttttggacttccttttttattggattatcagatttagcaggacttaccgttggtttttggtatggcttgtttcaaatccttgtcatttttttgaatggaagtttaatgaaaaagaagccagaatatggagcggttctgccgattattctagaaagctttattctcgacttttggttagaaattgtattttcttccgtccagctaacagcagcgccactaatggcaaaagttgcgatcctaattgctggaatggtcgcaattggtttaggcgtagccatctatatattgccacagttcccgcgagcaccatttgatcagctttttcttgtcattagcgcaagattcaatcttagtttgcaaatgggacagacgattgtcgccattgtcatggcaacactagctctaatgattggtggtccagttggtgtaggaacaattgcacttgtatttttactcggaccaattattcaattctggtatgagagagcgtatccaatgtattacatgctgtatccaacgcaagcgccgcacgaggaatatttataaatgagtattaagagacgcttttgtgcaaatgcaaaagcgtcttttttaatagataatggtatcccataactatatttcgacttttgcgaactttaaaacacgggtatacccattctgggagggattaactgatgaagaaaataatcaatcagccagacgacgttgtaagccaaatgctggacggaatggtgaaagcacatcctgaatcctatgaaagactggaaggcacgacggttcttgttagaaagaatctatcggaaaacaaagtaggtattgttagcgggggaggaagtggacatgaacctgcacatgctggtttcgttggagaaggtatgcttgatgcagctgtgagcggagaagtgtttacgtctcctactcctgatcaaatgttagaagcgattaaggcggttgaccaggggaaaggcgttcttctcaccaccaaaaactacacaggtgatgtgatgaattttgaaatggccgccgagatggcagaggacgaaggcatatctgtcgaacaggtgattgtcaatgatgacgttgcggtagaaggtagtactcatacaactggtcggagaggcgtagcgggcactattttcgttcataagattgcaggggcagcggcgcaagaaggtaaaacactgaaagaagtgaaagcgctcgctgatgaagtggttcaaaacgtgagatcaatgggggcagcacttcatccggcccaagttcctggctcaggaaatccggggtttgatattgaagaaaatcaaatggagcttggcattgggattcatggagaacctggaatggaaacaatcggactgatttcggcagatgaattagctgagcgtcttgtagaagaagtgttacccgaactagaacttaaaaaaggcgatgaaacagcggttatcgtgaatggaatgggcgcaacccccttaatggagctatacattctaaataatcgtatacaggatctcttaaatgaaaaaggcatcaaatcggaattaacgttagttggtaactatatgactgctcttgaaatgacaggtgcttctttaacagtccttaagttaacgaatgaactaaataaatacgtgacaaacccatgttatacgattgcatggacgataaacgactaaggaggctaatgtatgtttacggcagagatggctagacaatggattaaagagtctgctagtaagatagaatcgaataaagaacaactaactgatcttgaccaggtgcttggtgatggagatcacggccttaacatgacaaggggctttaacgcagctgtcgaacagctgaatggagagacggatgaaccagggaaagtgttgaagggggctggaacgagcctattgtcaaagataggtggtgctagcgggccactttatggaactcttttcatgaaagcgggaaatcagctagaaggaacagaggttcagctgagcgatctttcttcaggtcttcgagttggcgtggatgccatgaagaaacgaggtaaggctgagcgagaggaaaagacgatgatcgacttacttgaacctgtgattgagttaatggaagagaagggaaatgagcttacacctgatcatttgatcgacaaagcgaaagaagcgcttgagcatgtcaaagagtatgaagctaagaaagggagagcggcttactacaaagaaaaatcaaaagggaaacaggatgcgggggcgcagtcttcttattatgtaatagaatctcttgcgaaagtactcgataaggatggtgaagcgtagtggttagtcttgttcttgtgtcacatagtcctgatatttcaaagggattgaaaaagatgcttgatgaagctcagcctgaagttactgtgctcgatgctgggggaacggatgatggtgaaatgggaacgagtgcgatgaggattcaaaccgctattgaaaaggcggatcatggggatggcgtcgtcattctcgtggattttggaagctcagtcatgaatgcagagatggcgatcgatttaatagagggtgctcattccgtcaagattgcggatgccccattaattgagggcgcctatagtgcggtgatggaagcgggatttggcaagtcactagatgaagtggtggaatcagcagttcatgcaaaagatacgaagaaagtgcagtgaaaagaaaaattgataaaaaacagcgcatccgcctggatgcgctgtttttctatattttaagcgccagcccatacgtctttcgcatatcggccgtctcgctcaagttcttctagccattgaattgcttcttgctctgttgtttcatacatcgattgatagcttgggataatcgtttgctcaacttcgggagccatgtggctaccgtcgccgcaaatgtacaagcgtccaccatcttttagaagtgggataacatcgatagcattctcggatacaagatgttgtacatacgtttttttctgtccagggcaacgtgaaaatgccgtgtgaagggtaacaagtccatctttttcagcctgttcaagctcttcctgatataaataatcatgttcaggattacggcagccgaagtagaggtgagcagcaccaagctcgacgccctgcttacttaattcacgacgggcttgaataaaccctctaaatggtgcaatgcctgttccaggtccaattaagaccattggtgtttctggatcttctggaagctggaagttggactgtggtgtattaatgaagcaggccactttgtcaccaaattcacgcgttgccaggtagttagaagcaacacctttgtactctcccttaccattccatgccgtgtctcgaacgacactaaccgtcatgctcgcttctcgctctttgtgaagcggagaactagaaatggagtagtagcgggctttcaatggtggaagcagtgcaatgaatcgttcaaatggaatttcacaagccagatagagttcaacaagttcaagcatcgtaacgcgtttttcaagaacttcttttttatatgtgtcatcttcaagtagttgctcgagctccacaacatgcggtgggcaaacggtatgtgcagctagagcacgtatttgagaacgagttgctggttcttgaagttctacataagaagaaagaagctcctggagtttcactggtttgtcagtaggaagatgcgcagctttaccagaatctccagtcagtagcacgtgatcatgaccatttaacgagaagcgttcaagaacacgattgaccatttcatcactattttgtggaaggatgccgacatgatcaccttcctgataggtcacaccgtcaggtaacatcaattcaatgtgtcgcgtgcttcttccactctctgtatgctgtaattcaacatttcgattaataatcgcagtgaacgcatgatgtgttctagcgagaggcgtatcacttacgccacttacgaagctcattgaaatggcgctattttctgagttgttttcatttagttcgatattcatcgattctgcgagatttggccatagcgttgcttcccatttctcataatcgccttcaaagtcatcgcttgcatcgccatccccagtttcagaaattcgttgagcacctttctttgatagctgctcatcaattagggacggaatacgttgatacgtgttagcccagttgcggtcaccacaaccaaatacagcataatggacaccgtttactgctccatcttccatctcatcaagccactgtacgaattcatccgcattgtctggaggatttccgttataggaagcggaaacaatcagaacagctccgtcttgaggaagttcattcacataatcattcagaggagcaacttcagagctaaacccctgttggcgaccagtttcagcaaggtctcgagcaattccttcagcggtgccaaggtttgaaccatataggacaagaagaggcgtaccgtgggcattttcgacgggtgccggtgctgttttcttttcttcttcaacaggttcagtttgcgtaacaaaagaaatcgattccttcctttgcttcactttcatttttaggccatctggttttagtgttaaggtttctttaacgtctaactgatagttggaatgatcgattagatcaaagtgctgaataatcataccgagaacgagcgtcgcttcatgtagtgagaattgttgcccaatacatgcgcgctgtccatttccgaacggcttataagcgtgttgtgggatagaagacgggtcttcaaagcgttcaggtacgaattcttccacattctcaccccaaatggatttatcacgatgtagttctgggagtaggagcgtaaactcgtcacctttttctacatcatattcaccattcaatgttgtatcttccttcgcatagagtgaaaaggcaggagcggttggccataagcgaagggattcatttagaatcattcgaacatatttgagttgcttcacctgcttataatcaggaatagcatcgccaacgacacggtctacttcttcttgagctttggcaagcttatctggattgttcataagatagtaaagtgtaaatgaaagcaatccactagtcgtttcgtgtccagcgattaagaatgtgataatttggaaacggatattttcatcatcaagcggttcacccgtttcagggtctttcccttttaacatatgggctaaaagatcatcttcgccttgatcaccattcttcttacggtctgcgattaagccatcgacaagggaaaacatatagtcaatatcatctttaaattgtttttttgagcgtaccatcagtttatcttgaaccccaagacgctgtgattgattcatcgcttcatccaaagcccggaccatcgcatcaacaaattcatggttggattctctgtaaaagctgttaaaacgaaaatcgaatccacaaaggccaatcgtatcaagagttagacgcgtcatatcttcgggaacatcaatttcttcatcagggttaaggcgtgcccatttctgaataagctgtgtggcaaggtcgaccattttattatgatagcctttcatcgcttgttgactaaaacttggaagaaggatgttgtgggcttttttccaattctgttcgttcgtctcacttgtgaataagccatctccaccaaaagcgcgcactttttgaagcactggtcccacttttttgtcgaagcgcttttcatctgttatttccgcaaccagggatgcactagagacaaacgtactggtgcgtccaggaaattgaaactgataaattggccccagttctttagcaagtttcataaacgattgaatgggtttttctttatcaataagaggaagacttcctaaaggtccataagtttttggctgtgggaacgatttcttaatagtcatgatcaatcacctcattagtaatttttggtgcggaatgaacgttcattcattcttttatatgaagagccttgctcttcattgatgggatctaactgaatcccataagctttcttcgatatttgaaaggagctctggatctggatcgagctcacctgctcttacaaggttctgaagttcaagaaatgcgccatatacaatagcgataagggcttcagaaggcaggtttcggataacagcaagttgtttaccagtatcaaagaaatttcttaataagttaagcaattgattaaaatcagtccgactttgttgatccaaaaagtgagaagcactatgtttttttataaaatatagcgcgtgttcattctggtttgtaaacaaaatcatcgctttaaaaatatgatgaaactgattccgaacaggcttatgaaatggaaattgatccttaatcgtgtttgtaaatttttcaacataatcttgaaagagagtgttaacgagaacctctttattctcaaaataccgatagatggtgcctgctccaacatttgcggaagtggcaatcatcggaactgtggttgcattaaaccctcgctccgcaaatagagcaagagcgcttgtcataatgctttctcgtttcgtttgaattgtcacaagcatccccctctctgaataatgcggaatgaatattcattctcttctaattttaaacttggtgcaaaagcttaacaataaagcggaggtcctaaaaagattgaagatcctgttaactatagggcctaatcacctattgtaatgttaataattagaaatattagaggggaagaattgagatatatactttaaagaggaccacctcctgttaaaagggtggtcccatttactttatggttttagaataaccttaatattgccgtcttcttttttatcgaaaatatcatacccttttgcggcgtcttcaatggacatgctatgggtaataatatcttttggatcaaattcttgattttcaatcatatcgtaaagtttaggcatcaggtgaatgactggtgcttggcccattttaagcgacacgtttcttgtaaagaaatctccaagtggaaaacgatttgcttccgttccatatacacctgttaattgtacggtcccaaacttacgaaccgatttagaagcagttaaaatggggctgattgtcccaaattgattatcaaattcagaaccaaacgattcggttggagagacagttccgtccatacctacacaatcaatgacaacatcagcgccgccttttgtctcttcatacaaaagagcaccgatatcatcgtgctgtttaaagttatacgtatcaacgtggttggtgcgcttaccatgctcgagacgatggtctacctgatctacggcaatgacacgtttagctcctttaagtttggcgaatttttgagccattaagccgattggcccacttcctaggatgataacagtatcgccttcttttacgccgctatgttcgacactccaataggctgtagggacaacatcagagagaaaaagaacactttcatcatcaagtgtgcttgattctggaactttaaatgaagtgaaatctgcatatggcacgcgtaagtattcagcttgtccacccgggtaatttccgttgatctcagtaaaaccaaataagccacctacttcaccatgtgggttcgattcatcacattgactttccatttggtttttgcaaaagtggcattccccacaaccgatattaaaaggaatgacgactcgatcacctttttttaaggttttcacgtctggccccacttcttcaacgattcccattggctcatggccaacgatgtaatcttgttctggttcaattcccccatgatataaatgcaaatctgatccacaaattccgctagcggtaattttcacaatcatatcagtacgttcttgaatagatggggcttttacatcctttacgaccattttttccttaccttgataagtaacagctttcatctcttcacacccttttgtgtattggtttattcttcctatttccggaatctctttttataaaacctcatatttcgtcaaaataaaggaggctcttccacagaaaagcctcctttcatcttatctatttgcttagtcgattggatcttgcgcttttccgtatcgaatgacatcaataattgccatgccatcactcggtttacctgcatcatttcgataaggcataagggagaagaaaataaaataaatcgagaagtaagtaaattgatagaagaaaagatcaactggaagaatgtcagcataaattaatgcgtttagaatgagaataacaataatgttgaatagactaccagccgcataaatggcaacgtgagcccatgttttgttataggttaaatcttcgtattgacaccagccttccataaagtatttcttttttacttcaagaggaccgaaatgaaaaactgttttcccagtaccgatacagaatttgattttgcctccaaaaactcttgctataagaacatgtccagcttcatgtaggagggtgatgattggtaatatgataaaaaagttcacgaagaacattggaatatcgcttaaagtaaacattgagaacctccaaataaatcgtttaataatcgctcttttcgtaaatagtacactgagatagtgcgttcccgattaaaggaattccaaacctgtatgaagaagtttctttgtgatatgagtaataaaagcatgtgggttgctgaaaaatgaaaaagggtttatgattgttatagataccccgaggggtaatttgaaaactgttactaggaggataatgacatgtatttacgtacgttttttgatgaaaaattggcacagtattcttatatgattggctgtcaacgaactggtgaagcgcttgtaattgatccagcgcgagacgttacaccgtatttagaaacagcgaaaaaggaaggctttcatttagcggcagcagcagagacacacattcatgctgactttgtctcaggcgcaagacaactagctgaaaagcatgacgtaaagctgtacttatccgatgagggagatcaagactggaaatatggttatctcgatggtttgaatgtggaacttgtaacagatggttctatgattcatgtaggtaacgttgaacttcgtgtgatgcatacccctggacataccccagaaagtatttctttcgttcttacagatcgtggaggcggctctgaggtaccaatgggaattttcacaggtgattttgtattcgtaggtgatattggtcgcccggatctgcttgaaaaagccgccggtgctgttggtacagctgaaacgggagcaaaatcaatgttcaaatcgctacaaaagttgaaagagctaccagaatttataacggtctggcctggtcatggcgcaggaagtgcttgtggaaagtcacttggtgcggttccacaatcaacagttggttatgaacttcggaataactgggcattgaaggaagaaaatgaagagacgtttgtgaaagaactattaaatgaacagcctgaagctccgacgtactttgctgtgatgaagaaagtaaataaagaaggtcccaacgtcttaacaggtgaggaacttgaaaaggttgagagcgttgatgaagttcgtgcgcttgcaacaaatggtaagaccacaattgtggatacgcgaccagcacaggatttctcggatggccatattgatggagcgattaaccttccattcaataaagcatttacgaactggtcaggttgggtgctaaactatgagcgcgacttacttctcattgcagaggaagatcaaaaagatgaaattgttaaggctttgcattccattggaattgatcggataaaagcttacgctggccctgaacttctttcacaatgggatgatcttgaaggctattcctttgtgacaacagaagaattgaaagatgtatatgacaaagaagatgtttatgttgttgatattagaaaagaaaatgaatggaatgaaggtcatattcctggtgcaaatcatcatatgcttggttatttagaagatcaggcgaaggacattccagaagataaaacagttgtagttcactgtcagtctggaactcgttcagcaatcggaacaagcttacttcagtcgcttggtttcaaggacattttgaactatagcggtggctttgctgaatgggaaaaagacggagataaaatcgaaaaataatttaaaaagagcgtaaagccactgctttacgctctttttcttatgcactcatttcagtttctaacgtagccggtttaggctttattagcattaatccgattcctccagcactaaggacagctgcaactaggaacggtgcgtgagctgagactccctggccgatcaaaccagaaagaactggggcaattgcagcaccgagccagcggaggaaattgtatcctcccgacgtaatgcttctttcatatggagaaacctccataacgtagcttgtaaagagggcattgttgagtcctgaagcaagtccagacacaataaccacagtaatcagaagtggtgtcgatgtaacaacaaacagtaaggatagtaagagagcaaatataaataagctatatggaaggatcttcttcggtagaaacttcttctcaagttgatgacttagaatcgctgaaccgtacgcaagcattaatccccacccaaagaatacaaatccaatttgaatcgcactaagtccaataatcagtggcgtataagccagcactacgaaaaatccataataatagagcatcgctgcaagagcggacgtaaggaatggtttgaatgaaaagagcccttttaactcattcattcctacgggtttacgtttttgtttgccatttggttcaaacacaaagaagagaacaaggcaaaatgcagctagaattaggatggacgttgcaaagaaagggaatctccatgaataaccaccaagaacaccacctacaaggggtccacccgccattcctagtccaatcgctgcttcatagtagccaacggctttttgtgggtctttagataaagcgattaatagcgtcatggctgtcgcgaagaacatagaattaccaaatccccaacctgctctaaaaatcgataggcttgcgattccatttgatagagcgcagagaagcgcaaagaccgtcacgataaataaaccaaataccatcatgcgcttatcaccaaatcgacttgcaaaaatacctgctggaatcatcataattgccattgttaaaatgtaggcagtaaacagcatttcaacttgccagtggtttgcaccaatttgttctgcgatcgttggaagaatcggatcgacaatccctatgcccataaaggcaagaaaggttgctgcaattgtaatccaccgggctttagtgaatttcttctcatacattcaatttaacctcctataaaaatcgttcgaaaagaacaacggttgttatttatctcaccttaaggggaaataaaacccccacctaattaacgtaggtcaataagtacgttaaggtgggggcaacttcccctaaatgtcagattggttcatctaaccatcagaggggaagaagcaaaaccccctctgatggaagtttcactttatacaacaagtgtcgtaaaatattgtaacagagtcatgaaattgagcaataatcatgttttcgaaaaacgtggtctaaacgacaagttataaagtgttgttgagaaaaagtttattttggaggagatttttatgagagagaaggaagacccgcgcgttacgcgaacacgaaagctcttgcaagattcgtttatccatctgatggcagtaaaagaatatgagaaaattacgattgccgatattacaacagaagcaactgttaaccgcgctactttttatttgcattatcaggataaagaagagttactacttcaaactgttgatgaaatgcttcggcagttgtttggaaaggcgctgaccattcctcctggtaatttatcaattgatgaacttcagcggtatatcgcagaacatattttctcaagtattgcagaatacgataaattctttcacgtgatgttaatcaaaaaaggaatgccgaactttcttgatcacatgcgtagcttcttctttgatttctatgacaatcgaattgcaaaggggaggttcgatcctctcccgttaccaagtgaagtcatcgcaagctatatcgcatctgcttatacaggcatgatttcctggtggcttgaaaatgagatgccttatacaccgaaagagatggctgagcaaatgattcagttaaatcagaagggacctacggggatattgaaaatgcatgttaggaagccctgatgaagagagtaagatgtgttgacagaaaattcaattcattgtaatcttaacttactagctcatacttccctttagaaaggcaccccctttcaaaatcaggacagtagggcaccgactgaatgataacaatcacaataactgataaaactgttgaagctcttgccggagtttcgtgcgcagtttaaagccagtatatttttttccgtaagacgggaaaagtgtgctggcttttttgtttttcttgtcattctaaaaacaataaaaggagagatgtgtgcaatggaacttacaaggatgaagcagaacgagagaagtgtgaaaaaaggcaacgggtatgagattaaaccgagtgcagttcatgaacgactttatgtagtggagctagaagaagaagtgatcactcgtttttttgaagacgttcgtgagattagtagtcagcagttagcgtatatcccttacatgcgatttattctgacagagaagctttcacggcttttagatgaaaactttcaaaaagcggttcgagcaattctccatgatcgacagacgggcggatttaccgttggggttaacaagcaaacgactgatccagaggactatgtaaagttttcaaccgcattttctcaccttgttggaattcctaatttcgatgcgatgtccggaaattactatgctcgtttttcagtgaaacatacggacacgagtgattcctatcttcgtcaggcgtatcgtctttttacactccatacagatggaacatatgtggatgaagcgacggactggttgttgatgatgaaatttgaggagcaacatgcggttggcggacgttcacgacttcttcatcttgatgattgggaagagcttgagcggttctatcaacacccgatggcatcacagcgattgatctataaggcaccgccaagcaaaaatgtggtgaaggaagtgttccgtacgacgttctatgaacaaaacaatgaaccttgtatttgttttatcgatcagttcgttcatccagaaaacattgcgcaggcaacttatttacaggaactatcacgttcgatggagaattcttctgccacaaaaggacttgagcttccagcaggagaattgattatgttaaataaccgattctggcttcatggaagagaagcctttgaagaaaatactggacttcacagagagcttttacgccagcgtggtcgatttgcttgagtggaattggaggaaacagcatgtatgattatctcgtgattgggggcggaatcgttggtttatccacagcgctttcgattcgacaccgttacccaaatgcaacactcgcagtagttgaaaaagaaaaggaatgggctagtcaccaaacaggcagaaatagtggtgtgattcattcaggaatttattataagccaggtagcttgaaagcgacattagcgaagcggggcagtgagtcgatcgttcgcttttgtcaggagaataacattggacatgatgtgtgtggaaaggtgatcgtagctgttgatgaaacagaaaaaggtaatctaaatcacttgtatgaacgtggattggaaaacggccttggcgtacaaaagcttacaaaggaggagcttaaagaggtcgaacctcatgtgaatgggataggtgggattcgggtgccgtctactggcatcgtgaattataagaaagtgactgagaaattagcggaaattctatcgaatcaggaagttgacttgtttccgggtaccagagtaacaaatatcgaagaaagtcttgatgaagcggtggttgatacgtctaaaggaacgtttaaagcaaagtatataattaattgtgctggtcttcaaagtgaccgtatcgctaggcttgcggatatttataccgatttaaagatcgttccatttcgaggcgagtattttgaattgaagaaagagaaaagtcacctggttaaaaacttaatttatcctgtaccaaatccagattttccgtttcttggtgttcatctcactcgtatgatggatggctcgattcatgctggaccaaatgcggtacttagcttgaagcgtgagggctatcataagctgtcgttcaatccaaaagatgccctcgatgtgctggcatttgaggggttttggaaaatggcgggaagtaacatgaaagaagggctaaaagaaatgggacggtcctttcacagaaaatcatttgtgaaaagcctccagagacttgtaccagaaattcaagaggaagacgtggttccaactcactctggagtaagggctcaggctctccttaagaatggtcaacttgttgatgatttctttattattcctggcaaaaggtcaattcatgtttgcaacgcaccgtctcctgctgcgacagcatcattagagatcgggaagatcattgcagggaaagtgccttcgcctacgagaaagatgattcgattatcgtgaacgaaaagccatcgaggaaactcggtggtttattttatggaagaggtaaaaggaggcgactgctagaagaatagtttttagaagtggagggattggagcatgttagtaacgaaacaatattggattccagtgtttaatgaagaaagaacggttagaatttatttaccagatacatatgaacaaacgaatcaagattaccctgctctctatatgcacgatggacaaaatgtgtttgaagataaggacgcagtaggcggaaggtcgttgcgtttaaaggactatctcgaacagaaccatgatcaggttatcgttgttgcgattgattcgggagctaatcggatggaggaatatcgcctatgggcgccaggaaagctgagtgatgaacttacgggaaaaagtgattttagggaagcgaagggtagggattatcttgattttatcgtgagggatttagtaccgtcgattaatgctacgtatcgcatacaggcgggatcgaattatatggctggtatttcacttggcggtttgcttgcagtctatgcgctatgttgctatccaactgtttttagaagaggagctgggatctcttccgctttttttcgtaatcaggaaaagttagagcagtatatcttagaattcgaacaaattacatttgacggtctttatttggattgcggagataaggagtcaggagaagagcggatcgatcgagcgtttctgagatcgaatgaacggatttttggattgttagaggaaagagggagtagtgttgaatttaaggtagttaaaaatggaaagcataactatgagtcattttctcatagagttgatgatgtcatgacttttttgctagggcgtagataagaaaagtatattttaggggggaatcatttctttaaatagttgaaacgtttgttgactgtttattaaggttacaagcattagtaacttaaaaaggaccctggatgaggtcctttattaatagaaattacatgaataatagtaaccctgccgatattccaatggtaagaccaatcggagctaattggattttcagtaacaaaccaggtgtaatagcatggggatcaagtggattttgaacgggtgcactcataaaatccgctactcggtctgatttcttcttcttcaaggaaagagggggaacgtcaacggtgtactgatcaagttgttcacgcagttctttcggtagcgaatggttattgtgtgatttcatcgtaatgtccctccaataaatctcttaaacgtttaattgctgtcgataatcttgacttaaccgttccaagcggaatatctaaaatgtttgcggtgtcttcttgggtcatgtcgtgataatagattaagaggataaccgctcgctgcttttcaggtagctgcttaatcgcccactgaatcgtcatcttctccacagaatcgctaaaagaagattcctcctttttgatcagaaaaggtagcagcgtttgccattttgctcttcgttttattttgttaatcatcagctgataaccaattttaaaaagatacgtttttagagacgcccgtgtgacatcatagcgatcctggtacttgtgaaatttaacgaatgtatcctgaacaagatcgatactgagctgctcatcacgagtatagcgaaataagaaacggtagagtgaatctttgtgtgtaaggtaaatggtttcgaacgtcatagacaatgatttctcgaaaggaattgattcgcgttcgttaaaattcattaggccagcgctcttttatccctttgtaagtgtaagcgagtcggaaaataaaccagagaaatgtgagaagtggaaaaacaaaggtttgatgcagaaagaactgcacaaatggattttcaatgttttctcctttaataagaaaaacaaataagcctgtaatacataagaaagaatacgctgaggaagcaatcatgacataatcccatcgcgaccaatagaaatagagatttgtcttctgaaaatcaattcttccatttgttttgtgaacatgtttttgaagcgttgcaattaatacggcaaaaatggttccgagaactcctgccatgattaatcccatgatccaaccgattgccatttttttcacacctttcatttctgtattttcacatatttatacaattataggattagaaaagttcatttccgtgatgaggttttttatattggataaactataggctaagtgaaaaacaaaggcgggtttaagaaaatgattagaaaagtatgttatataataggtcttgtttttgcgttgtttctatttatgaataacgcacatcctgttcaagcagagcaagaagctaatttaagtgaggtaacctatctcaagtcagaaacgaaaaaagacgctgcccttgaagaagcgtttgctaaagaatttgacctgaagaagggtactgattccattcgttatttctataataaagtagacttaaactatgatcagatacctgaaacctttgtctatttagttggtccaatggtttgtgggacagggggatgcagtggattattattagaagagaaggacggggattatacggtaaagtctcgtttttccttagtaagaaccccggtcatcattcaaaatgaaacaacgaacggatggaggaacattgtgatgtatgtagctggtggaggaatagaacctggctatcacgagctaaaatttgatggagtaaactatccttccaatccttctgttcaaccgattgtgaaagaggataatataagagggatagggattataaacgatgaaatcgctgaaggtaatggcattgttttttgaagagaagtagagaacaaatgagagaatttgttctctacttttttctatgtattaagaggttcaggatgcagctcgtattgcttgtgggcatccttaagagcagcagcaagcgcgttacctgcttttccaagatagccctcttttaactgatgaagagggtctgtaataccatcttttaaactgaatcctttgagtaattgtttaacgaactgtttgctgtgttccgttgcgagtgtgcaagatgcgtcgacgatcacgccatactttttatcaacttcaagggtgagggttaaggtgtctgaaatgttgttagcggccatgccagttgggagtttagagtggccggcgacgaaaagggtgttcataggtaatacctcctgatgattatggtgatgaatagttttcttgtatacggtggacttctttcataagtgatggtgaaatcgatttttcaacttgaaaataaacgggtgaaaaggccttttcccatttctgatattgatcatttgttaatgtatcaatttgtatatcagttgttcttttaagttgtcggatatggctatcgttaatctcaatcgaatgccttctaacccaatccgttgtttcgtcatttgcctctgttattgccttttggtgtgatttagaaagcttattccaaaactgttcattaacgaggacggcgtaaccaagataagcgtggttactaatggtcatatatttttgttcttgataaaacttttttgaataaatgtttgaaacggtattctcctggccatcaataaagtccacttcaagattccgataagttttgttaaaagatagctgactcgtacttgtatttaaagcatcgaattgggctttaattgttggaccgggcattgttcggaagtgaagctgttccatgtcttctggttgaagaataggatgtgcatcatttgtaaactgtttgaagccgttataccagaaaccgagcccctttgcgttcgagtgagaaagatctttcattaattcttttccgattttaccgtcatatgcttcctgcacggcctggtaagttggaaaagcataaggaaggtcaagtacttgccaattagggaaatgagttgatagcttcgcagtagcgggtgcaatcatttcaactttcccattcgttaaagcttcccattcgttttgatcctgatagatttctccatttgagtatatttcaacatgcacgtcatgatttgttttggtttcaacggcctctgcgaagtaacgagctgccatgcctttcggggtattttccgcagcaacatggctaaagcgaataatgacctggtcacgaattccatcttgttcgtcatcatgtacaattggtgatgtactacctgaaaggttataacctgaaaagatagctgtgagaattcctaaaagtatgaacgctgcaatcactgctattgatttcatagactctcctatttcgtaagcgtttccaatagtttatcatagatcataacgtgttaaagcaaacattttacatttctgatacgatcagaatggcggatacatgaaatgagatacataggattgaattatttattcttaatggtggaaggactaacgccaatgacaagaagagtgccaattaaaatgaaaataatgattttttcatttggtgtggtttttttttcaatcacgattgcaggtatcatcgcttctggaaaaatatatgaggaaaatgagagggaactgggtgagagagggttaatcacgggacgcatcgtggcaaatttacctaaggttcaacagtcattaatggaaagtgaaggctggattcaaataaaccctatcgtgaatcgcattagtacaattaatggagcagactatatagttgtgcttgatacaaaccgtattcgatattcccatcccgttaaagaaaagcttggtaccctatcagcagggaaagatgaaggggctgcatttgcagaacatagttatgtgtcaaaagcgaagggagaaatgggaatagctatacgatctttcgtgcctattatgaaccaacaacacgaacagattggcgtggtcattgtaggaaatatgctccctggcattacaagtgttcttctcagtattaaatcagaactgcttctcattgtactacttgcactgggttttggaatggtaggttcatggctacttgcaaagcaaattaaaaaagaaacatttcagcttgagccacatgaaatctcaaggttgttagtagagaggacagccacatttcaagcaatgaatgaaggtgtcattgcgatcgatctgcatggagaggttatcatctttaatgagaaggctaaggctatacttgatattgtagaagacgtagtaggaaaacaactaaatgaagtgtttattggccctaaattgattagagtcttgaaagaagaccgtgcgtttgaacgtgaagaaatgacattcggaaatatagtacttatgattagtaaggttccagtttcaatcggagaagaaactgttggggctttagctgttttccaagatcgaactgaggtatctctaatggcagaagaactaacaggggtaaaaaactttgttgatgccctcagagtgcaaaatcatgaatcgatgaatcgactacatacaattgctgggcttattcagctagatcagaaagaaaaagcgttggattatgtttttgaggtttctcaaaaagatgaagaactgtcttcatttctaagtaagaacattaaggattatcgtatttccggattgctaataagtaaagtgaagagagcgcaggaattaaatattgcactcttaattgatcaacatagcaaattggaaacacttcctttctttttagatagtcatgacattgttctaattatggggaatttaatcgaaaatgcctttcattcctttgaaaactttgatcgtacagaaaaaatgattgagatcaatatcatacaagatgatcattcaattgatatcacggttgaagacaatgggtgcggtattccagaagagttcactgctgaaatattgactaaagggtttactacgaaaggtgaaaacggaagtggcctagggttgtatcttgtgaaacgaacagttgataagggcaatggagatattaatatcatttctcatgagggtgaaggaacgagtatcgaactattctttccaatgagtaacaaaggggatgagagttttgaagatagacgttttattaattgaagatgacccgatggtacaagaagtgaatcgacaatttatcgaaagagttgatggttttcatgtgattggaattgctggaactggagaagaaggcattgaacttgcaaagatgctaaagcctgaacttattatacttgatgtctatatgccaggggcaagtggcttagaaacattgaaattaatcagacagaaagatatcaatgttgaggttatcgtaattacggcagcaaatgatcgtgaaaccattagaactatgttgcatcatggtgctagagattatattattaagccttttaaatttgataggctgaatcaagccttgcaggaattcctccactataaagcgaggttaagtggagaaggaaagctttctcaggaagagcttgatcggcacttctctcatgtacaagatgaaacgaaccattctataaccactcaagaaatacctaaagggttaaatcaccagacaatgaaacaaatcattctctatatcgacaagcaagccaagcccctctcagctgaagaagcagctgatggcatcggcatagctagagtgacagcaagaaggtacttagactatcttcaaaagtcaggaaaagtacaattggacatacaatatggaggcgttggcagaccgcttaatcgctattctcttttaaagagttcttcgagttaatggaagagctctttttttatgtttagaaactattgaagtcagtgaagtctagctccagtgctagtcgggactaaccgagcgcttgcgcttttcttatgaccaaaaagaccaaaacgtccaatatgttctaaatattcaaaaatataagtgtaagcgttaacatgaacgtagcaaacaatgaagcggaggaatgtaaattgaaaacaaagatgctcgcaaccttattgcttgcacttgccatgatcatttcagcatgtggtggtggaaattcagcaggcgggaatagtggtgaagaatcttcaggctcatctcaatcccttgtttttgggactggaggaacatcaggctcgtattatcccatcggtggagcgcttaaaccgattttagaacaaagtgatttagtaggaaacattactgtagaatcgaccggagcttctgtagcaaatatccagaacatccaggatggtctaaaccagatggctgttgttatgagtgatgtagcttatgatgcggttgaagggaaaggtcaatttgaaggcaagaaagttgatattaaagcgctagcagggatgtatcctaatgtggtgcaaattgttgcaacgaaggatagtggaatcaaaacagtggaagatctaaaagggaaaaaagttggggtaggaaaagtaggatctggtgttgagcagagtgcacagaaagtacttgaagcagtcgactatacttatgatgatctttcaaaagtaactcatactggttatgcagatagtgttcaagaaatgaaaaatggcaacctggatgcagcgttctttacatctggagttccaaatagcaacattacggacttgatgcaacagaatgaaatcacttttgttgaaattaaaggagaaacagcagacgcactgaaggaaaagtatccattctataaagattacaaaataccggctggcgatgaagcgaagtataatcttgaaaatgagattgtaactgtgggtattcaaaatatgattattgtgtcccctgatttagatgaggagttagtaaaggatatgaccaaacgttattatgaatatcttggatctgatgaagtagctgttggtgtcttaaaacagcttgatcgagatgagattgcaaaagatcttattacacctctccatccaggagcaaaggcattctatgaggaacaaggaatacttgaatagtgaaaagcgagggcatcgatccggtgctctcgtttttagaagtacagttcttattttcactttgttatgtataggggtgcttcttattccttttcaggttcttacaatagatggagaaggtggggaaaagagcgcttatttaggggcatcagattttagcttgaaatggaaacattctgttgaaaaggaggagtgggaggagttttttgtcctccaagatactggcatccttctaactgatacccgatttaagacatttggagctggtgttccaagtgatgctggctcagatacttttattaaagatggctgggtttacatgacaggtattcatcgctcaattggaaaaagtcttttttttcggacaggaaagacgacggaacaccgtataacggtagatggacaaagcgtcaagcttaaggcaaacagttcttatcatgtaactgttaatcatcttaatctatttcaagctttgctattaaaaatacgagttatgtgaggtgaagattgtgacagaggaaaaaaagaaagatgcagctgaatatgatcgtgaaagtagtgtgagaacgatccatcattctaaaatgaaaatggtcgttacggttttagcagcaggacttgccttatttcatttatatacttcttacgcaggttcactggtggatattcaacagcgtagcattcatttatacacgttgatggcacttggatttttaatctatccttttataaaaaagaacgcaagcaaatcaataccaatctacgactatatcttgtttgtactatctctatttgtcggcgtttatatgctttttacagcagaacgaattattcaatcaggtggtcaaattaattctgttgattttattgttggcattgtgattgttatattattatttgacgttactaggagaattactgggtggggactcactttactaggagctgcatttctaatttacggtttttatgtaaagttgtcgatttatcctcagttaactgaacaggtcgttttcagtgtttctaaacaaatcatttctcagctagtattcattacagaaggcatccttggaacagcgataggagtatcagcaagttatattatcttatttattttgttcggagctttcttaagtagatctggaatgggacagctctttaatgatcttgcacttgcggttgctggtcatacaaaaggtgggccagcgaaagttgcggttatagcgagcggttttcttggatctattaacggatcggctatagcgaatgtcgtcacgacaggagcttttacaattcctttaatgaagaagattggataccaccgaaacttcgctggtgctgtggaatcagcggcaagtgtaggtggacagatcttaccaccgattatgggcgctgcggcgtttattatggcagagaatcttaatgtaccttataccaagatcattcttgcgggcattattccagcggttttgttttatattggtattctcttacaagttcacttcagggcagccaaacgaggattgaagggattacctaagagcgagctcccgactgtaaaagaagtactgattgaacgagggcatctcattattcctatgctttttctactttacctgctattctcaggaaaaacaccattctttgcagctttctgggcgatcattgcaacggtcattatttctgccaccagaaaaatgcttcctgtcatcatgctgttaggattatttttagtctttcaaccacaggtaacagctttactttcaggagaagcacttcctaacataaggggtgactggtgggaattaatgattattattgtattgccgtttgctatcaatctgtggagaagattccttaagctagaggccgaagaaattggtatcatggatagtattcaagcgcttgaagaaggaacgaaaacgacaatccctgttgctattgcatgtggtgcggtcggtattgtcgttggtgtagcatcgctaacaggagttgcccttgaaatcgcgaatagtatcgtaagtattggctcaatggtaaacagcccattgattcaattaatcattacacttattctggcgatgatcacgtctatcatacttggtatgggtcttccgagtattcccacttatattattactagtacgatggctgcccctattttgctacagcttccattgtttcgagagcttgcgggatctcaggaaacggcgatttttgtagcgcacatgtttgtgttttacttcgggatctttgctaatatcactcctcctgttgccctggcggcatttgcgggagcggggattagtggtggagatccgaacaaaacgggtttccaggctatgaagttagcaatagcggggtttattgtaccgtttatgtttgtcttttcccacgaaatgctcatgatagatgcgacggtaatgaatatcctgttaatagccgttacatctctaataggtgtctttctattatcgattactgctgaaggttattttcttacgcacttaccagcttcattgagggttatcactgggataggtgcacttctattgatatatcctggtatgtttacggatattatcggcggtttgatttttatagctatactagcgaagaatctattatcaaaaagacactctaccgaaaacacaatatcaacttagatttcattttattaatggaagggaaagtgaatatggatctcaatctaaaaggaaaatcagtcgtcgtaacagctgcaagcaaaggacttggaagagcttcggcccttgcatttgcgaaggaaggtgcgcatgttattttatcaagtcgaagtgaagatgaactgaaaaaagcatgtgaagaaatcatcgaagagacagggaatgagcaggttacctggactgtttgcgatatgacaaaagcggatgatattaatcgattgatgacgtttgccgcagaaacgaatggtacagtagatgtgttaattaataatgcgggcggtcctccagctggtcggtttgaggatttcgatgatgaaggttggcagaatgcttttgaactgaatctattaagcttcgttcgaacgtcaagagcagcaattccttacatgaaggaaaatggatggggacgtatcttgaatatcgcttcttcttcaattaaacaatcgctagataacctgatcctctcgaatacatttcgagcagggattgtaggactagcaaaaagtctttcacaggaatatgcagagcataatattcttgtaaatacagttggcccaggacgtattgctactgatcgtgtggagcaacttgatcaaattaaggcagatcagttaggcatcaatgttgctgaattaaagagtcaggcggagcaatccattccgatgaaaagatacggggaacctgatgaatttgcaaaggcgatcgtatttctcggatcagatgcaaatacttatatgaccgggcaatcactcgttgtggacggcggccttgtgaaggcattataaagaggggagggacgcagtttgactgcgtccttttttctttgagaatctccccctaatcatttttcttttaggaagaaaccgatataatagaagaagatgaaaatgactaattctggtgttgctaaaccctttggtttcaaagcaattgtcggtacagggagggtgattggatggtagacgcgaaagaacggattctagaagcgacggatattcataaagcaactgagatgatcagcattgcgacgaataagccagttattattgagaacaaaaattttgagcttatttcctatagcacagcgtcggaaagttttgatcaaacgcagcaaaaaaccattttatataagaaatgcccagtttttattattgatcgtttaaaaaaagaagggatcgtgcaacagcttgagagcaatgaagctcccattcgcattgcccctattgaagaaatcggcttttatcagcgcgtggttgtgaaagcgatttatgaagagcggacaatgggatatctctgggtgcaagaaacaaatagtccgcttacggaagaagaggtggactttcttactgaaatcacccctcacattggcaagcttattcatgattcgtatcaaaaagggaaagagcatgaggggaagcaagagaaattgctttggaacgtgcttcttcatgaatatgaaagcgaaaatcaaatgaggcgtaaagcccaggtggcaagcctgccattgcctgagcgcttttctgtacttgttatgtccattgcagagccttctcaagaaccgcttttgaatgaagtgctcgagcttctatctcggtttaagcgtcataaaattcaggtgctgaaaacggagtttcaagtggttgctgtcatttctggtgataaaagtatgaagggttctgccattgagcatagccgagaacttgtagagtacgtgaaaagtgcgttaactcacgaagagttttattctttcttgattggaattgggaaagaatacgtggagctcattgatatgaggaaaagttttctagaagcactggaagtcattgagacagctgactttattggcccaaggccagatgtgatgccacgagagttctcgaagctcggcgtataccggtatcttgccgctctttatgagaaaaacaatacggagcattactttaatcaaaatttgcttaacttgatggaaaaggactcagttagtcattctagtttattaaagacgctagaagtatatttatcgaacaacggtaagggaaaaagtaccgccgctgaactgtttatccatcccaatacgctgaattatcgcatgaaacagatacaggatctaaccgacattgattttgatgattttaatatgaaaagtcacatttatattgagttgttgttgttaaacaacataccgtcttactataaccggtacctttcggctgtagaggagcagaaaagtacgacgaaatagctagtttaaacggggatctggctagttttttggctcaaattgagaagctgcacatggtgcagcttctttttgtgtttttgagagtgctaagtagctcgttacgagaggcgtgtggtaggtttattggccaaattcgagatttattggccaaattcgaaatatattggctaaactggaaattcagtgacgctcgtctccgcttttagtgagatccagctgcgcgggccaaatccttcggctgtttcacccaatcgaatgagacaaaaagcgtctcactctcatgggttccaacatcctgcggatttaaacgggcccgctccgcttttcgtgagttccagctgcagtgggcagacacttggtcacttcaccttctcaaatgaacacaaagaccgtgttcttttgagaaggttccagtgcctgtcgtgtctaaacgcccacttccgcttttcccattgtgtttaaaccacaaaatctctgctaaactattgtgctttgaccacgttgccagattggggttaaaatcgatataattttcacaagaaaacaaaaactttcttttgagtatttcacaagtttgatgaatgattggagatatagggtgaaaaggagcgtggtagagttggaagccatcaacaagagttttttcctttttctcgctagtaggccctcgcttgatcggctcgccaaacgatggggtagtaagtttggggcagacaagattgttgggggtgaaacctttgagcatgcggtgcctcttattcagaacttgaatagccaggggcttcgggtaacggtggatcaccttggtgaattcgtttcatctgaaacagaagcgaaggagcgtacacaagagtgtcttgatacgatccgcatgattagtgctcatcaactaaattctcagatgtctttgaaagtcacttcacttggtcttgatattagccatgatctcgtctggcataacatgattgagattatggaagaagcggtgaagcatgatgtgttcgttacgatcgatatggaagattcgacacgaacggaagcgacgctgaatctttacaaagacctgaagaagaagtatgacaacattggaacggtcattcagtcttatttataccgatctgatcaggacctggatgatttgaatgaagtaaaccctaatttgcgtctcgtcaaaggggcttacaaagaatcagcgaaggttgcttttccagcaaaatcagatgttgatcataattttaagcagctcattaagaagcatttattgaatgggaattttacagccatcgctagtcacgatgaggccatcattacctttacgaaagaattcgtgaaagagcatgatattccgaaagaccaatttgagtttcaaatgctgtacggtatgcgaagccagagtcagctcgatcttctagcggaaggttatgcggtaagagtatacctaccttatgggaacgattggtatgggtattttatgcggcggttggcggaacgacctgcgaacatcgcctttgcttttaatggaatctttaaaaaataaacttcttatatttgaaaggggaatttactcatggtagtaccatacaaacacgaaccgtttactgatttcactgttaaggaaaacaaaaaggcttttgaagaagcactgaaactagtaaaagaagagctcggaaaagatcatgatcttcttatcaatggtgagcgtgtaagcacggaagataaaattgtttctattaaccctgctaacaaagagcaaatcgttggccgcgtatcgaaggcaacgaaagagcatgcggaacgcgccattcagtctgcagatgaagcatttgaaggctggagaaaatggacggctcgctctcgtgctgaacttctattccgcgcagcttcgattgttcgtcgccgtaaacatgaattctctgcttatcttgtctatgaagcaggtaagccgtggaaagaagctgatgcagatacagctgaagcgattgacttcatggaatactatgcgcgtcaaatgatcgagctaggagaaggcaaagcgattgaaagccgtcctggtgaacaaaaccgttacgtttacacgccaagtggtgttgcactcgttattccaccatggaactttgcttttgcaattatggcaggtacgacggtagctcctcttgtaacaggaaatacggttcttcttaagccagcaagtgcaactccagttgttgcagcgaagtttgttgaagtgcttgaagaagctggacttccaaaaggcgtgttgaactttgttccaggtagcggagctgaagtgggcgattatcttgtggatcacccgaaaacatcgatcatcacattcacaggttcacgagaagtcggtacacgtatttatgagcgtgcggcgaaagtacagccgggtcaacaacacctgaagcgagtgatcgttgaaatgggtggtaaagatacgatcgttgtggataaagattcagatctagaacttgctgcacaggcaatcgttgtctcagcatttggcttctcaggtcagaaatgttctgcaggttcccgtgcggtcattttgaaagaggtatatgatcaggttcgtgatcgcgttgttgaattaacaaatgaacttacacttggcgaaacgacaggtccagatgtgtacatgggaccagtcattgatcaggcatcatttgataaaatcatgagctatattgaaattgggaaagaagaaggacgtctcgttgctggaggagaaggcgatgattcgaaaggattcttcatcaagccgaccgtgtttgctgatcttgctccgaaatcacgcatgcagcaagaagaaattttcggtccggttgtctgcttaacgaaagcagataacttcgatgaagcaattgagattgcgaacaatacggagtacggcttaactggtgcggtaatcacgaataatcgtgcccacatcgagcaagcgaagatggacttccacgtaggtaacctgtatttcaaccgtaactgtacaggagcaattgttggataccacccatttggcgggtttaaaatgtccggtacagattcaaaagcaggtggaccagattaccttggccttcacatgcaggcaaaaacagtttctgaaatgttttaatcggataggctaaaaaggctgtcaccttaagtgggtgacagcctttgttttgttctaaagtagaagggaaagtgatgagaagggaagtggttttatatggaaattttagcggttgttgttatcatgatcgggattatttcggttcgcgtgattggtttcttttatccatcttttcttgagataaaaggaaaacagttaacggaagggcaaaagtatgccattgatgcactagcgattggaattttgcttgttacgtttatcattgtatggacgttgtaaaaggtaggaagagatacttatctctcttccttgtgaagtgggagaaagaggttggcaattgtaccggcaccttcatttgaatcaatgacgatttttccgtgatgagctttcataatatcaaagcaaatcgaaagtccaattccaagcccactgcttttcgtactaaaaaagggagttccgagctgtttaatctctttttcactcatccccttgccattatcttttaccgcaatgatagcgtgttggtcttttttttctaaagagacagtaatttctccaccctgaggcattgcttcaatggcatttttaatgaaattaataagcacttgtttgatttgggaggcatccatccaaacggttatttgctcctcttcggcatgaaagtaaagttcaacattatgtaggtgagcattgcttttcattaattcaaccgtttcaaatatgagaggatataaatgcccggattttcgttcactaattgtttgttttcccatcatgacaaattgattgacaaggtttttcatacgctcaagctcagttctaataatatcgatataatgggcttgttttttatccacatccaatagctgtgtaaagccgatgatggatgtgagaggattgcggatttcatgggctaacccagcccctaattttccaatagcagaaagtttctcagattggatgacctgctcttgcagttgataataagaggtcatatcgcgaaactgagcaaaagcaccgcttagcttctgattgtgattatatagaggtaaaatatcaagtaaacactttcgttcatcaagccttgagaaggtgatttcgatatcctcgattcctttttctttcgtgagcacatgatcgaaaaatggtttaagaacaggaacctctgatatatgagatccgatcatgttgatcttattcattcctgttagttgcgcggcgctttgattaaattctcttatatgaccaatctgatctgaaataacaattccaattggcgttgtgctcatcagcatttgattgtagagatgaagctgttcgttttgttcatgaacccggatttcgcgttcaatggtgtcaattgaagatgaaagcaagccaaggtgtaacggtgaggcgtgctcttttggtgtcataattgaaatggtgccaatcacttctccgttacgataacgataaggtgccgagtagcacgccacctcactaaaacaataatggtaatgatcatccccaattaaatgaatcggcttgttgtgttttagtgcaagtgtaatggcattcgtacctgccgtttcttcatcgaatttaacgccgttttgaatgccgagtgacgctgtcatttgtttaagacgctcgtctccataggaatctaacacaaccccctggtcgtcagtcgtcacgataacagtagggatatcggttaaaaagcttaaaagctttgtcatgaatgtttgaatggtggaaagcgcacgttcgtaatgttgcaggcgctgatttaactcttcttccgttaataaaacgtgaagaacaggaactgagtttggatccatttggtaaacatgctcgcaggtggttttagagtttttgatgtacgtttcacgttgcgtcatggggcatcctcttttcctggtaataatgatattagctttatataaaaagtattggttatgtattaaattgaagcattttttatagattatcatacttttgtacctgttggttcgtttttaccataaataaggatgaataagaatcaggtgaggggagattgcttcttatgaaaaaggatgacaagataagcaaatcatttgcgaagggggagatagtgggtgaggacaattctcttatttactttagcaggcctactgaaattggaggaggctatttaatatggctatggattcgagaaggatattcaagcttacgaggtttaccgggaggagtagctttagttctatatggcatcattgccactttgcaagtttatccagatttcggaagagtgtatgcggcatatggaggggtgtttgtcgtgatgtcggttctttagggatggagacacgatttacttggagccgcgatttgcccacgtcactagccgtctataaaagataaaaagggtttttatctcattgagaagaatgaaagagaggggagtataaaaggagagtgaagtcttatgaagatcagtgaatacaatcgaatggtgtgggataaaaaagtcgcagatggtgtttcgtatacgaagcctgtcacaagtgaagtgattgaggaaagcaagagaggaaattggcacatcacagtaacgacggaaaagcctgtcccacgtgagtggtttccgacttcgctaaaaggggttaagattctttgtctcgcttctggtggtgggcagcaggggccaacccttgccgctgcaggagcagaagtaaccgttgttgatctttctgagaaacagcttgagcaggatcggtttgttgctgaaagggatgatttgcagcttactgttgaaaaaggagatatgacagacttatcatttatcgacaatcatacgttcgatatggttgttcatcctgtctccaacgtatttgttgaaaatgttttacccgtttggaaagaggcgtcaagagtattaaaagacggtggcacgctgatttcaggatttacaaatcctttgctttaccttttcgatggtgcgcaggaggagaaaggaattctagatgtgaagaacagcattccgtattctccgctcgatcaattaagggaagacgagcttcagatatacaaggaaagcaatcaagcacttgaattcggccatacgctagaggatcaaattcagggacagattgatgccggatttctgatcgctggtttctatgaagatgattttggtggaaggcgcctaatcgatcgctatactcaaacgtttattgcaacaaaggcaattaaaacaaaataaagttaccatttatttttggcgcacaagggggagtttaatatggaatacgttggctcatcggtatacgatgatcatgctttttatgagcaatatatggccagacgccatcgagaagaaagtccaaataaggtaatcgaatatcccgctcttatgtctttactaggagatgttaccgataagaaaattcttgatctcggttgtggagacgcctcgcttggagagtcattactaagtaagcagtgtaaagaatatgtaggtgtggatggctctcagaacatggtgaagcaagcggaattaaagctacaggggaggaaaggaagcgttgtgcacacatcgttagaaacctattcttatccagcagatgcttttgatcgggttgtttcccaattagtccttcattacatagaagatctagaatcgattgttaaaaacgtatacgagacgttaaaacctggaggaaagttcgttttcagcgtccttcacccggttatgacggcttctttcaaaagtatgacgggaaaacgaacggattggattgttgatgattattttgacacgggtaagagaattgaaccatggattggggaacaagtggtgaaataccatcggacgattgaagactattttcttatccttcagggcgctggatttacgatacagggcttaaaagaaggaacgccacaacgagaaaattttcaagaagaagaagagtttaaaagaagacagcgtattccgttatttttaatcatttcctgcataaaataacaattgacagcgatgaagaattgaattatgatcatttcaaataattaaataacgcaactcctaaaggggagtagcttttacagcaaagtcgtcattccagagcttattagctctcggctttgttggcaacattcgtgttgttagcaagacctttacttttacggtaaaggtctttatttgtttcaaaagacctttgccaaagcggcagaggtcttttttatgcaaaatgatttacttgaaaacgaagggggatttaataatggatgtatcaatgttgttggagtacggatgggttttgctacttcttattgcacttgaagggttgcttgcggcagataatgctctcgtattggcgattatggtaaaacatttgccagaagaagagcgtaagaaagcattgttttacgggctagctggtgcctttgtttttcgctttgcctccctatttgcgatttcttttctcgttggtgtgtggcaggtgcaagcaatcggagcgctttaccttttatttattgctatcaatcatatcgttcgaaagcagctgatgaagaaggggaaaagcgatgttgagaaaaaatccaaaaagcagtcaggtttttggggaacagtcattaaagtggaattagcagatattgcttttgcggtcgattctatattagctgccgttgctttagccgttacgcttcccaatacacctcttccacaaatcggtggattagacggcgggaagtttcttgttatctttgcaggtgggctaattgggttaatagtgatgcgattcgcggccaattattttgtaaaacttttaaaagcaaagccagggttggagattgcagctttcatgattgtcggttgggtaggtgtgaaattgtctgtttacactctttctcacccagaattaagcattctacctgaatcatttgcgaaatcacccgaatggaaagtaacgttctatgcggtattgctactcattgcaatcggaggttggtttttatctagttctaaaaagtctgaggtatcaaaaggagaaacaatgtaaattttaatcattttctccaaatcaagtatcgaatctggtaaattatataagtgaaaaatggtaacgattcggatgaggaggacgcaaatgataagagtagatgtggtgtatacgcttctttataacgaaagggacgatcaagtgttaatggttcaaaataagaagcatgacaattggtcactccctggtggagctgttgaagaaggagaaacgctcgtgcaggcggctattcgtgaaatgagagaagaaacgggattaacggtggaagtgggagacgtgttgagtgtaaatgaagcatttataggaagtcatcacgctcacttctttacgtttcaaggcaaaatcacgaacggcacgatcgccattcaagacacagaaacaattgcggatgcaacgtggatggatcgaactgaagcggataagtggatgacttattatcaagggggaattcaaactttactcaaagcgtctgtaccgtatgtctttcaaggttgaatgtaacagcggtaagggcaaaatccttaccgctgttttcatataaaagttcaaaaacggaaggagatgcgttcttcttttccttcatttaatgacttcacgataatctcgttatttgttacttcttcgtttccaataaggattactttttcaattcctcttttactcgctcgttcaagagatttcccaattctcttttcactcatatcgacttcaattcgataacctaattttcgataagccgatgcaacaattaaggcttcacgctttgcatcaatcggaatgattaaatagtcaggtttttcatctttaacgattgatgactcccttccttttaatgcagtgaaaataacatcaagaccgaacgaaatgccaacagttgaaaaggactcctcgctgccaagtaaaccaccgattgcactatcgtagcgaccgccactgcctatgctggatgagatggattgatcacttaggaaaatctcgtaaatcgttccggtataaatatcaagacctcttgcgagaaacgggttaaaggaacaattttgaagaacgttaagtccatccaaataggatgtcagttcggaaagctcatttaatcctttttgcacattctcattctcggaggcaaattgttcgaaataagtgaggtcttgaccgagccactcctgtgcgtagcgctcaatgttacgaatcgcttccggggagatgtttttttgttgaagctccttttttacaccatctatcccaattttctcgagtttgtccattgtaagaatgacgtcatttgatcgcgagatagggatcgatatggtctgtagcattccggcaaggagcttgcgattgttatattgaatcgttacgttaagtccaagttgattaaaactatcaagcgccatttccattaattcggcttcagccatctgcgaacttacgccggtgatatcgacatcacattgagtaaactcccggaatcgccctggtttcacaggtccatctcgaaaaacttttccgatctcatatcgcttgaagggcatacgtaaacctggattcattgccactacttttgcgaatggaatggtaagatcgtagcgaagagcaagctctctttttccacgatcggtgagtgtgtacatttcttctaaaatttcatcaccgccagcgtattttgaagccaataatttttgttcatttagaataggtgtttctaacggaagacagttatattggataaacgtatcttctagagttcgcctcacttgtcggcgtatccgctcatcctcaggtaaataatccattgttcctttcacattttgatctttaagctttttcaattaactcatcctttcgttttggaatacaaaaaaccgcatgaagaggagaagatttcttctcaattcatgcggttacgagtaatagccttcctatacgcgattttttatcaatcggatagcaaggctaactgtgatgatgaagttgtacgatgaataactgtttcatatcgctcacctcttatttccaaatatagtagcatacgagaaaagttaaggcaatctttcttttcttctgaatgtttggtaggataatatttccttcagaaaggcgggtagaaaaatgaaaaaccttacaaaagagaaaatcatcactatgatccctgaattaactgatgagacactgattccaattacaaaaggatattcgtttgatttaaaatatgtaacacattggaatggacaacgagtgttgcttcggatctatgagtcagctttaagtgagcgagtgcaagataaagtagtaaagatgcgtgcgttcagggagcgtggtgttcgatgtcaggaagtatatgcttttggtgttataccggaagaaaatttctgttacacgattttttcttttcttgaaggagaagatggagaggtggcgttatctagcttaacggaagctgaacaatacagagcaggatatgaagcaggagtcgatcttttgaaaatgcacgaattgcccatcgttgcctctaaatccgagcatatggctcttgtgacaactaaatttgagaaggcggtcgagcgttatttgaagctcgaaacatgcataccgcatgatcaaaagataattgattatgtgaggagaaacttgccacttattggagagagtaagcttatatttgcgcatcatgattatcatgcaggaaacctgattattcagcatggaaagtatgctggtgtgattgattttaacagatgtggtgtaaacacggcttattctgagtttgataagcttgaattgttttcgagtcgcttgagcattcctttttcaaaagggatgattcaaggatacttttctgacgaagttcctgatctcttttggaagattcgttcggtacatatggcacagcttttgatctatcatatgaattgggtaacggatttctttccgcaagatcttccacttgcggaagaggcaattgagtatgtcctagagacgtatgatagctttcatcgaacgattccaaattggtatgaatagagccaggcataagcctggcttttcacattgcttcttttattccctttttaacgagccaccaatttgctggatagcttgtcgcaaatccaaaaatcatcgcaatttgcatcataaaccagtatacggctgagttagactttggaggttcggcaaataggacaaagtgtacgattgccatccagccaaacataccaacctcaaaagcaattaaggaaagcgtgtctgctttggcggcttctttaatcgcactccatgcgccatcttctttgtgcattggataaatcgcgtaaaattgaaaaaggataccgaatccatatgcaagtataaattcaacgagatagtgagtgtaaagaatagagcccaggagagcaaagccagttaaagcgacgatcggaacgccgacggcatctcctaatgtgcagcctgctgagcaatgactcgtagacataaaaacttttgcaggttcacctcgatgatcgtcataatccagattctttgccttcaagcgaccccatttaaagtaagaccagatggcaaatggaccaagaaaccacccattaattggccaaaccacattcataattcgcatcatttgtggatgacggataatatcaacaaggattacgagcgaagagagtaatccaatggaaagagcaagaatagaaataagctgaagtgtgttcaaaagaatcatccccttggagtaataagtttgtatataaactttacccactaggggtatttacaaaacaagggtaatcttaataaataaaaaaacgctctcagacagtgagagcggttcttaagagccgattattcgctaactttagcaacaatcttaccagttacatgacgtttagatagttcaaccaaagcttgtggaacctcttcaagtgaaatgatttttgaaatcatcggatcgagatagccacctagaagaagttgaatcatttcatcacccatcatagcaaggtccgcttgttctgctaagttagacgattgataaacgcctccaagagcgatctggtggaaagaaagggggcgagcaaaagagacaccttgttgaaaatctggggcgccggcaatataggcaatttgcccgttaaatgttaaggtttcaagtgattttgtcgcattatctccgcttacggcatcaagaacagcgtgaacgccaattccgtttgttagttcgagcgttcgttccacgaagtcttcttctttgtagtcaattgcatagtcagcaccaagtttttttacaaaatcgtgattgtgacgtgaggctgttgtaatgacggttaatcccatatacttcgccatctgaatcgcaaagccacctacaccaccagcaccagcgtgaatcagaatcgtttgaccacgatgaatatgaagcttacggaaaagggcttgataagcagtgtagcctgctgttgggagtgctgcagcatcaacgaatgaaatggattcaggaagcttagcgatcgtatgagcttgtgcaatcgcatattcggcaaatgttccttttttcatcaagtcgccatggtacaccacgcgatcacccggtttccaatcagttacttcttcgcctaattcttcgattacaccagcgccgtcaaggccaaggatatgaggatattcccagttagcatttccgtttgttgctgtcttataatcaacggggtttaatcccgcagcgtgaattttaacaagaacttctccttttttgggagatggggcatccatttcttgcacttccatggaatcccactgatttttatctttaagtaagagagctttcattgtaattcctccttatgatatgaatgaatatggatatgattcacctgttttcatatttgtaaacctactcgttttgctattataagataaatgctttttttgataagtaggcactttttaataactatgtgaaacaaaacagcttgcaaaatcgtagaaagactagagagtcaataaggagtgagaagatgacactgataggatgggtgttttggggaacaattgcaacttttctggtgcttggttttctcttccaaaaagtttttggaacgaaagcaccgaatcgaacgaatcacgaacaaatggaagaagaagtgaaaaactttactagtcaatacgttcataatgattgaaactaaagggtgaattgtcatgcgagaatggattggagcagcggcagtttgtacgaatgatcagggggatttgctgatgattcaaaatgagaagaagaaatgggccgttccttctggagaagttgaaaaagatgaaacgcctgagatgtgctgcattcgtgaagtgaaagaagaaacaggctatgatgtttcgattgaaaagccactatttgtgaaagatcaggatgtgaacggctttcatgtcaccacttattattatgaagtaaatgtggttggaggcatgatttctcttccgaaatctgaacaagacgtaaccgaaatcgagtggaaaacagttgaagaagtggaagcattagctcatgcttaccctgaagatgcttcttatttaacgaatttcttatatgaaaagactccttaacatagtttaaggagttttttatgcttcaaccttattttataaaaggatgtgaacgatttgaaacggatgattcctttagtgaccttctttttaatgattgatcttataacaaaacgttggattgactctgtcctaactatcaatgaacggattgaagtgattgatggtattttagggttccagctttattataactctggtgccacgatggggttattagaagggtacacgggtttgctactctttctacaaacaggaatcattcttctgttgatttacgggtacatacgcgcaacgccaaaacgttttgccatgcaagtagcttttagcttgctaattagtggtggcattggaaatttggttgatcgtattcaatatggtcacgtcattgattttctttccgtgaagtggagttcaggtatttttaacgtagctgatatgtttattcgatatgggtttattttaatcgttattctttactttatgaagaaatttacgatccaggggttggatgaagatacgaatcaagagctacaaaaaagcgagagagggtaatcctctctcgctttcatttattgcgcttcttgaagaatttgttcaagctgaaatgcgcgaactttcctcggtaggaagcttcttatttcatcttcatggaaaccaacctgaagacgtttcgtatcaagtaagatcggccgcttcaaaatgccaggattttctttaatcaagctataaagttcctgaagcgtcagttcgtcgagctctttatcaagtgcttcaaacgcttttgagcgctttgagatgatttcttctgttcctttttcagtcatacgtataatcgctttaatttcatcctcagagagtggctttgcaaacatgttccgctgttcataaggaagattgtgctcttcaagccatgccttcgcctttctgcaagatgtacagcttggtgacgtataaagtgtaatcatgtgtttgacctccaaacggattttacatggttcatccccatgttaagtatactaaaaaagtggatcgctgactgtaagctctgttacacatttttgacgattatctatgtttggtttcatttcgcaataataaaatagcgaagttgatgtaggagtaagttttgtttcattatagccaggttttactagggtatacccactaacaagagcaggcaaactacatatgaagtagagatgttaatggaggatgctcatggaagataaaaagaagtgggatttgatttcccttgcttcaattccacttgtgatgacactggggaattcaatgcttatacccgttctacctcttattgaaaaaaagctaggcatcacatcctttgaagtatcgatgatcatcacagtctactcaatcgcagccattttattaattccgattgccgggtatttatctgatcgatatggaagaaaaaaagtgattatccctagtttatttattgcaggagctggtgggctggtgacgggttgggcatcatggtctttagaagacccgtatagcataattctcattggaagagttcttcaagggattgggtcttcaggtgcagccccagttgtccttccgcttgtaggagatttattcaaaagtgataaagatgtaagtgcaggacttggtttgattgaaacgtcgaatacaatcggtaaagtgcttagtccaatacttggagcgcttcttgcttcttttctatggtacttaccgttcttagctattccggttttctcacttatttcaatattgcttgttattttccttgtggagtcaccagaaaaaaatgagaagccgcaaactttttcatgttttttgtcgtgtttaaaaaacatttttcataaagatggaaaatggctgacagcgatatttgcgattggtggcgtgatcatgtttgttctatttggaattttgttctatctcgcaggatttttggaaaaggagtttcaaattgtaggcgtcaagaaaggagcgatcattgccattccgctcgtggctctatctttgacttcttatctcgctggaaaacgaattggtgagaacaaaacgacgatgaaatggtgtatctttgcaggtctttccttgctcgctgctgctacaataggcgtatcttttacagaaagactgtggttcatgttactaatattgtttgtagctggggtcgggatagggatttcgcttccatgccttgatgcgcttataacagaaggcgtgaaaaaagaagagcgtggcacgattacatctctttacagttcaacacgtttcctgggtgtagcggcaggaccaccggtctatgccatacttatgaaacaatcgcatgaaatcgtattttatacctctgcagctgtagctgtagcggccgttctactttgttttgtttcgattaagcctgaatcggatgtttagagtgccgaaataacgggtaactatataattccccattaattgctaaaaagggaattgaaacaagagtcaaagagagggatgaaagaatgtctttagaattaaccttacaatttttaatgttaagcataggtttcattgcagtagcagcactatttctaaatgtagataagaaacgaactcagaaacgtttggaagtcgagctagctgaatataaacaacagcatgaacaaaaccagaagcacaaataagatggagactctgaaatgggttttcatctttttttgtgctttcagaagcgatattaaattcaagcagaagagtttcatatttgagtagggtggaatgtaaaggttagctaaccaattccgtatcggaacaacttaatgataaaggagagtattcgctatgaacgatacagaccattactttgctaaaaattacgatgagtcaagagtaacatttcgcagtcatctcgaaaaaattcagaagaagtggccggaagcaaccttaacaacaaaagcgattggaaaagaagaaaataacacaattgatatgatttattcagaagcacttacttcaaatgatcaggtgattttttttacaactggtgaacacggaattgaaggctacgcaggtgcagccgttattcaattattcgttgagaattatcttgatcaaatcgatgcatccaaaacaggcatttgcttgattcatgccattaacccatggggaatgcgtcattttcgccgcgtaaccgaaaacaacgtcgaccttaaccgaaattatttctatgatgaaaattccgttcgcagagatgtgaataaaaattatgcaaaggaaagtgacttatttttaccggatggaaaaataagtgatttaaaagaagaaaagcataagttgtatgctcagttaattaaaggactcgcaaaagaaggatacgccggactgaaaaaggcaaagggaatggggcaatttgaatttgaaagaggcgtctactatggaggttctagggctgaagagtcggctgttttcttgaaaagtattcaagaaaagatgctagagacttattcgagcgtgattcatatggattggcatacggctctaggaccaaccaatgaaatcacgatggttatctcggagcatgatggcagaagcgttgatgaactaaaagaagcctatcaacttaagaatgtcgaaaaatatacccctgaaaaagtaaaaggtgactcaacaaatcatttctataagctaaaagaagaagcgtatccggaaacgtaccttctttctgctttgtttgagtttggaacgtttggaacggacaagcaggcggaacttcgtgaatttatgacgattattttagaaaatcatttatatcatgaaggcgcagagtctgtcgatgatattcagtggattcttggagaatttgaagcgatgttttatccgaatgacttagagtggaagaaatcggttctaaatgaagcacgtaatggaatggaaggtgtattgaagaaagagggaattctaacctaaaatgaaggaggtagcggatgatccgctacctccttttaaatgcctacccaattgaacttcgaacttcatttacttgcccatcaattgtaagtgccttgtcttctcgatcctcaatcttaatattcgtgatcacgcgatctgcccctttccgaagcgcactcgtatgaatgtccctcgccaattcaaaaagctcatctacgtttccttcaaaaacggttgaagttggtccaatatggtaagtgaagccttgtttttcagcgagttgaacggcttctgtgacaaaatgactcatactcgtctgacttgttcctacaggtgttacgctgatttctaaaagtgccatatataatcgcctccagtttattcatgtatagtagactattgactgatctggcatttttcaaacatttattgttcaagatcaattcgaaagtactaaattccttattttacaaaaaagtgaaacgtcataggtttcttcttcgtattaagaatataagctacaggagggatgctgtatgtggaacttttttctcatgatcgctgttattgttgcttctttaactggattcaattggctaatggggtatcggaaaaaccatctccaaatcgatttgaacgatcgctatattgattacaatgaatacgtgagagccttgaaaagtgagctaagatctcaggggagagaagtggactatttaggtgaccgaacgtttaaaattgatggaaaaccgtatatgtttatcgaacggaacgtaacaatgggtggggtcccactacagagaacaatcttcaaaccgataaaatcctagcaagcaaaaaaattgctttgataagttcatgccactatgcttatcctattcgtaaacaagcattggaggttagaaacagatggagcaaattgcagttaccgccattttaaagccaaaagaaggacaagaagaagccgtgttgcacgtacttcaggaagtgttagtaggctcacgaaatgaagaaggaaacattcagtatgacgtgcatcaatcaatagaagattcaacgttcgttatttatgaagtgtggaaagatcaacaagccattgagacgcatattaactcggagcattatgaaaagtatcgagaggatattggttctctgcttgagagtagagaagtatataaaatgaaaaagctcgactaacttcaatgttgtccgcttttcatttccgcggaaataactgtgaaatcgcggataactttcgattttcgcggaaaaaatatcgagattcgcggaattaacgacttatttcttataaaaaggcgcgctggatgctcatctagcgcgcctttcctcactaaattagcgtccttctttcgcaaaatgagcgatgcgttaaaaaaaatgaatcgaaaagtatccatcaaaactaaacgaacgcccatccatcagattgattcttgcatagtatgtattaaatccatgatggaaaggaggtcatactccatgggatacggttacggcagtgggtttgctctaattgtagtgctgtttattctccttatcatcgtaggtgcagcttttgttggaggaggctactaattctcaaaacataagctgtattcagcggaacaattctgttgaataagcatgggttgaataataaacgcgcaagaaggctgatatcggtagagtcagccttttcttgtagggttttttaggacagccttttttaatcgatcgctgttccttgaaatatattttaaatttaagttattgccaagcgatccataggttttacggttttttggatcaatgaggtttgtctgtttttgataaacccgaggcgtttgccagagtgcaatcaatgctttcatcatcggcatttcatggtaacgttcaggccacatctctttaatatgttgtttcacccttggatagtattttgggttcataccagggaaaagatgatgttccgtgtgatacgagaaattaaagtggaggatatccacgattttcggcaccgttactgtgagactatttgcaagtggatcattgacaggagttagtggatttagtcgatgattggttgaaatgtaagccatcacaataaagttcgcgataagaaggggaacaagataagcaaatagccagttccgaaaacctatgacaaagatgaggctaagccatgagatccatggcaaaatcatttgcaaccagatatcacgttgttttttgcgattgaattcttttacataagtaaaaaacattttcaaagaatgagcgctaaattgaacagtaagtgatgcaaaagcaaagaacgaccggataaacagtggaagaccataaatccacttaaatattctcatctttgatatacgctccagtgttggccaggcgtcagggtcgttttcttcatgctgtgtatggacatggtgattgaggttgtgccattttctccaaagtgttggtccggtgtttaatggccaaaaagccaccgctcccaaaagatctcgaagccacgcttttcgtacgacggtgccatgcaaaatttcatgaccaagaaaaccaagccctgcaaaacaggcaccaaggataaaggagaaaatcagcaaaacgagcggatgaaaatcgtacaaactaatgagagaaataacagcaatcgtgatgatgagatatgtaagtccaccgtataatctagttggtacgggtttaaaggcttcaggtggaagaagttttttgagtttagcagcataccagctaaatgaatgcaggtcgtccatcttaatcctcctaacatttgttgaataggtgatgttgttcttttaagtgaaaaataagtgagataaactgacgtttcaatttatctcttttacatttataaagcatgcccaatttattttgaaatagccttttttctttaatttgtgagattgtttcccagagagtaaccataattatggtgaaacttcgtgatatgcatgattataaagaagaatggtatcgaaaaatcatactttttctcaaatttcaatattgttattataaaagcgttgtgtataatttaaaatattagaatattaaaaaaataatctagggggaatttgatgaaaaagttcacgaaagggttattgattacggtgttagcgtgcttgttagcgatcatgacggcatgtgggcagaatgaaagtagttcgacaagcaattctgaaggggatagtgagaagaaagagaagttaattgttgggacagacgcggcgtttgcgccattcgaatacatggataaaggcgagattgttggctttgatatggactttctcgatgctgtgatgaaagaagctggttatgaatgggaaccgaaaaatataggttgggatccgctatttgaagccgtgcgccaggggaaagaagtggacatggcaatctcaggaatcactattaatgaggaccgagagaaaacatttgatttctcgaatccgtattttgaatcaacgcacatggtgatgttcaaagaaggaacagatattcaaacggcaaaagatattgaagggctgacagtaggtgttcaaaacggaacaactggacaagcagcagcagagaagattatgggagataagagctctagtattaaaaagtttgaaaacaacgttgttgccattatggcactgaaaaacaatgatgttgaagctgtagtaactgataatacggtcgtcaatgaatatgtgaagaataacccggatgataatttccaaacaatcgaagatccggaaaactttgaatctgaattctatggcttgatgttccctaaggacagtgaattgaaagcagaatttgatgaagcgattaaaaaagtaatcgaaagcggagaatactctgaaatttatgaagagtggtttggaaaagagcccaataccgatacgttgcttgagcaagcaaaataaacgaataaaccgacttacttcggcctaagcgataagcgtgatgactgtagtaagtcggttaaccatcgtagaaaatcataaaggagatcgaatatgggcgtattttcatttgaaattgttcgtgagtatcttcctttctttctaaagggagccatggttacggtcggagcgtcgttagctgggatactaattggaagcattttagggttatttatgggaattggacgaatctcaaaatcatggtggattcgctatccatttatctggtacatcaatgcttttagaggaacgccattattcgttcaaattctcctcattcatttcggcttaattccgataattatggaatcagttaatccacttgtttctcttattgtgacgttatctttgaatgcaaccgcatatattgctgaaatattccgtgcaggaattcaatcgatcgatcgagggcaaatggaagccgcacgatcgcttggaatgacgcatgttcaggcgatgcgccatgtgattctgccacaagcatttaagagaatgatccctccacttggcaatgaatttattgtgctattaaaggactcttctcttggagcgattatcgccgcaccagaactaatgtactggggtagagccgctcaaggacaatattatcgcgtttgggaaccgtatttaactgtagctatcatttacttgatccttaccctttcgttgacgtatttattaaattacatcgaaaggagattggataccgcatgattaaagtcgagcgtctgaagaaatcatttggtgatttagaagttctaaaagaaattaatgtcgaaattaaaccacaggaagttgtcgttgtgattggtccatctggctcgggcaaatctacttttctaagatgtttaaatcttttagaatcgatcactggtggaaaagtgacgattaaggatcaggatttaacagcgaagggaacaaatatcaatcaagtgcgaacgaatgtaggaatggtatttcaacagtttaatttatttcctcacaagacagtgcttgaaaacatcatgatatctcctatgaaagtgagaaagtggcagcgcaaacaagctgaagagaagggacttgctcttcttcgtaaggtaggtctttatgaaaaggcacatgtctatcctgactctttatctggaggacaaaagcagcgtgttgcaattgcgagagcacttgcgatggagcctgaaattatgctgtttgatgaacccacttctgctttggatccagagatggttggagaagtgcttgaagttatgaaagatctagccaaagagggtatgacaatggtcgttgtcacgcacgaaatgggattcgcaaaagaagtaggggatcgcgttttgtttatggacgggggatacatcgtcgaggaaaatgtgccaattgaactatttgaacatcctaaggaagaaagaacgaaagcctttttgagcaaagtgctttaattaacataatatttgttaaaaaaggcttgctcttttcttcagtaagatttaagataagtaaaataactttgcgatgatgaagaagagtaatcttgagagacactttagagagctgatggttggtgggaatcagcgtgtgcgacagatgaatgggcttctgagcttccggaactgaacaatttagtaggattcggcggagcgtcttaccgatacaagagacaccttatcgaagttggtttctgtaagggtaagtgcgtttacgtcggtaaacgaataaaggtggcaccacggggtctctcgtccttttttataggatgaggggtctttttgtgttgtattaaatggaggggatcttatgcggaagacgatcgtaacaggaattaaaccaacaggacgggtgcatttaggaaattatattggtgccattaaacctgcgttagagcaagcaagaaatgaggagctagacccagtctattttgttgccgattatcatggattaacaaaagttcgagatcagaaacagatgcaagaattatcatatgggattgcggccacatggcttgcactcgggctagaccctgctaaggttattttctatcgccaatcagatgtacctgagatttttgaactttcatgggttctggcctgttttacacctaaaggtttgatgaatcgggctcatgcgtataaagcaattgtcgataagaatcgtaaggaagatcgtgaagaggacgaaggagtaaatgtgggagtattcacttatccgatcttaatggctgcagatatattactgtttcaatcccattacgttcctgtaggaaaagaccaaatccaacatgtagagattgcacgtgatttagcatcagcttttaaccatcaatttggagaaatatttacattgcctgatcacataatcgatgaaaacacatcggtcctccctggactggacggtagaaagatgagtaaaagttatcataatacgattccactgtttgaagagccgcctaagcttaagaagttaatcaatcgcattacaacggattcaaccgggccaacggatccaaaaaaccctaacgactctactgtttttgctctgtataaggagtttgcaagtgaagaacagacggttaaaatgagaaagagatttgaagaaggaattggatggggtgaagcgaaaaaagagctttttctcctaatgaatgatttccttactgaaccacgcgaaacgtttcgctactatatgtctcatacggatgaacttgaccgcatccttgaagaaggtgcaaagaaagcaagggcaaaagcgcaaccgttattacaagaagtaaaaagcaagcttggtattcgggtgcacacttaacctctgtttcatttatgccgatagagagactgaacagatttttttaatgtcggaggcacagaatcatgattgaaatgtcaggacagtacaattggtggatcgttttactgtctttaataatagccgtttttgcatcatatagcgcgttagatcttgcgggtcgcgtagcttattcaaaagggatacgcaaatggatatgggttgttggaggagcgggtacaatggggattgggatctggtccatgcattttatcggtatgctggctttttcgatggcgatgccgatgacttacaacattccgcttgttttcttatccataggagctgcattcttaggttcattaatcgcccttttggctgttggtggaaaacaattatccataagaagactaatcgttggaacgatatttatgtcaggtgctattatcgccatgcattatattgggatggaagctatggaaatggtcgagattacttataatccctggctgctaagtttatcagctctaatcgcggttgttgcttcttttggagcgctgaaattatcatttaccctttcaagaccaaagaaaattcgtcatatcattcttttgaaattaggcagtgcaagtgtgatgggaatggcgatcgcaggcatgcattatgttgggctagaggctgccaccttttatatggcacaatatcataatccacttgtgaacggattagatacgtcagccctatcgattgtgattgccattggcacactttgtattcagactattttaatcttcgggattgtcaccgaacgtaagtttattaagcaggaatcggagttgaagggaaacgattatcgcttgcgttcccttttaacgtatagcatcgatgcgatcttaacgcttacagtagacggcagaattcgttcactgaatcctgctggagaagcgttgtttcaagtaaaaagggatcagattagtcatatcgaccccattgatttttttggagaagaggaacatgaacgggtaaggaaatactttcttactgtccatgaaacgagacaggcagttggttttaatacgaagatatttacacttgacagagacgttcgtgagttaaatgtaacgtttgttccgatctatttaaatgaaaagcttgatcgcatttatgcgatgacaaaagatattacgagacagcaaaaggcggaaagacaaacttatcacatggcttattatgatgcattaacttctttaccgaatcgtcgttcgtttgtcgagcacttagaaagctatctcaaaaatgataaacatgatgacctggcagtgatgatgctagatttggatcgctttaaagtgattaacgatgccctcggtcacaatacaggggatctgttcctttgtgcagtagcagagcgattggagtcacgtgtgtccccttatggtttccttgctcggcttggtggagatgagtttgttattgtgcttaatggttttaaagacatctatccagatgaccttgcaaaccaaattattgaagcttttgagacgccgtttcgcataggttcccatgatctatcgacttcggcaagtattgggattgctgtaacgccagctgatgggagcgatgtggaatcattaatgaaacgtgcggacattgcgatgtattcagcaaagggacgcaaccgtcagaaataccagttctattcatcagcaatggggctaaaaagcgaatcaagattggtggaagaaagctcgttaaggacggcactgatcaatcaggattttattttacattatcaaccacaggtgaaatgtgaggatggcgcactttctggagtcgaggcgcttgtgcgctggcaggtgaatgagggagaactccgttacccaggtgactttatttccctagctgaagaaacgggattaattgtcgagcttggacgtcaagtgctcgcaatggcgtgtgagcaagcgaagaaatggagcgatcgaggccattctcttcgcgtttcagttaatctctcgcctaaacaatttcaaagtgatgaactcattacaacggtaaaagaaacgcttgaccattacaagcttgaccctgagttacttgagcttgaagtaacagaaagtatgacaatggaaaattcgactcgttcgtcatggatgattacttcacttcgtgacctcggtgttagtatttcaattgatgactttggcacaggtcacagctctttaagttatttaaaagacttttcgattaaccaggtgaaaattgataaatcctttattgatgaactgactcggaatgtgaaatctgatcagattacgagtgccattatcgcgatgagcaagcaattgaaattgcaagtgatcgcagaaggggttgaaacggttgaacaagctgaatttctatctcaaaaaggctgtgatagcatacagggttattactacagtaagcctgtttcatcgaaccaaatagaagaaaattatttaatgattgaccaagaaccggcttagtagaaaccatgttaaaccacactgttatcatcgtgtggttttttgtataggggtgacacgtctatccacaatattgacagtttgttaacctcatgataatttaatgttaactataacttattttaagttaacatattatcgggaggcgtatgatgcaaaaagtaatggaacatgcggtggagagctgggagcattttgctgatttagcactagaggggaaaacattaacaaaagaacaggctttaacgattttatcatcaccagatgagcagttattaccccttttacatgcggcttttagagtacgaaagcactactatggtaagaaagtgaagttaaatatgattatcaatgcaaaaagtgggctatgtccggaagattgtggatattgtgctcaatccgcttttgcggacacaagcgtcagtaaatatcctttacttgatcaagaaacattagttgaaggggcaaaagaagcaatgcatcgtaaagcaggtacttactgtatcgttatgagtggacgcggagcaacaaatcgagaactagataaagtgattggtgccgtcgagcatataaagtcagaaatgccgctaaaaatttgtgcgtgtctcggtattctctctgaggaacaaacagatcggttaaaacaagcgggggtcgatcgttataatcataatgtcaatacaagtaaggggtaccatgaaaaggttacgtcaacacatacatatgatcatcgtgtaaaaacagtagacaatgtgaaaagatctgggatctccccttgttctggttgcataattggcatgggagaaacacttgaggatgtgtatgacatagcatatgaacttcgtcaaattgatgccgattccattcctgttaattttctctattctgtaccagggactaagcttgaaaagatggatgaactgaatccgcgctactgtttaaaagtattagcgctttttcgcttcatgaacccaacgaaagaaattcgggtttcagggggacgtgaggttaatctccgctctcttcaggtaatgagtctatatgcagcaaattctatttttgttggagactacttaacaacggatggtgcggatgcaacagcggatcatcagatgatagaggatcttggatttgaaattgaatcatagagaaaaaggactgcctttacttacgggcggtcctttttaatgtttaataatcttgtatccaatccaatttaaggcctgttgtagatttgatttcactacaatttgctcgaaatcacttgtagcatggacggctttaatcgcaagctctggacgaatacccgttacaatcatctgaacaccgatcaacttaagggattggccaatctttaacaagtttgttgcactttcagtatgaatattcactaaccctgataagtcgaagatcaaatagtccagctgattttttgcactctcagcaagcgctctttccattagtcgttcggttcgtatctcattcacgtcaccgataattggaagaattgctacttcctctgatataggaacaacaggaacagagagggactcaatttctgtgttcgctcgctctaattcaagaacattccccagaagattggccatcgctttaaataagtcgatatggtcctgggtatagtgaaatggttttaaatcaagaccgcataatgtaccgtaattatcgccatttcggtaataaatcggtgctccgattaacgagccaccaccaaggtttttagttacttccatatcttttgttgaatcgtgagtagctaaatcatcaatgataaggggttcacgaccgccttttacaatgaattgtcagaaagaatctcgataaagggtttcaaaacctgattcgagaataatttcatctctgttaaaggaagaaataatatcgacatcggttttgtcattttttgcaataaaaaatgtattaacacctacgaatttacttataacctctagtacatctctcgaagcatcttcgatcgaagtataggtcggggtatttgactgaatcacatttttcacctctcttcaattgacgttaaaactctgctatctctatagtatcgtatcattgatgggatagatatgaaaaaataaaccattatagatgttagatgactctttttaggagagagtagcggctgaaataaattttcactctttttaaatttatagcttaaatgttgatgattagggtaaaagaagaaaagagaattttgaactagtcctacaaaatggtagacgaaatttatgcaaatgtaaagggagatctcgatgtattcattctgcatcgtttgttatacgtaagaagctaatttttttaagaggtgagttaatgaaaaatgcaacgcttgttttttggtatagtctcattatttgtacgttggtagtgttatggggggccatctggccagagcatttacagtcagttacgtccgctgctacaacttatatatcgagtcgatttggatggtattacctcctcattattatggggattcttattttttgtgtgtacttgattttttcaagatttaaagatattaaacttggtggaaaagatgacaagcctgaattcagcctgccaacatggtttgcgatgctttttagtgcaggaatgggaatgggaatggttttctggacaacagcagagccaatctcccatgctttcaaaagcagtcctagtggcgaattaggaacggataaagcgattgtcgaatcacttcaatattccttttttcactgggggattcacgcctgggctgtttatgcccttgttgcgctcgtactcgcttattttaaattccataaagggtatcccggattaattagtgctacgctaacccctttgtttggagaaaaacgaatgcaagggactctcggacacatgatcgacacgcttgctgttgttgcgacagttgtaggtgttgcggcaacgcttggcttcggatcagcacaaattaatcaaggactgaagtttttatttgatgctccagcaaacttctcagtacagctgcttattctcgtgatttcaaccgtattgtttattgcttcggcatggtctggattaaaaagaggaattaaatatttaagtaacattaatatgattctcggctttgctcttatgattcttctccttattgtcggaccaacgctgtatattatgaacatgtttactggctctttaggaggttatatctcgaacttcttcgatatgagtttccacattgaaccgatcaacaacgatcagcgctcatgggttgatagttggacgatcttttactgggcatggtggatttcatggtctcctttcgttggaatctttatcgcgagaatttcaagaggccgaacgataaaagaatttatgcttggtgtattatttgttccttcgatcgtctgcttcattttctttgcggtctttggagtctcggctctcgacttgcaacaaagtggaattgcgacgatttccgattattcgattgagacggcaacatttgctgttttacaagagtatccccttggaacattaatgtcgtttattacgatttttgttatcgcgattttctttataacatcagcggactcggctacatttgtattaggaatgcttagtacaacaggatcattgaatccttcagcattaattaagatcgtatggggattagccctttctgctatggcagctatcatcgtgtacttcggtggaacacaaggcttgcaaaatatgctaatccttgccgccttaccattttcaatagtcgttcttatgatgggctattccttctatcgagcggcgagtaaagaagttttatctaaaagaaaaagagcaaaaacacaaaaagaagcggtataatgtgataaaaagctgtgttcctcaaaggggacgcagctttttttggaggaaaaaaggataagatcgggaatctctaatgaaaggtaactatggaaggaatgaataaaagttgaagcaaattatcgcgatgggtggtggagggttttcgatggaacccgacaacccgttattggatcgctatatcttaaagcaatccctcagcaagcaaccgaaaatctgttttatcccgacagctagcggtgatgcagacggatatatagcgaaattctatgccttttttgagaaggagttatgcgtgccatctcatttatctttatttaaaccacctgtacaggatctcgaagccttcttgttaagtcaggatattctttatgtagggggagggaatacaaaaaatctcctcgccctctggaaagaatggggacttgatcaaataatgagaaaagcctgggagaaaggtatcgttttagccggaataagcgcaggggcgatctgctggtttgaaaaaggggtcacggattcatttggagatgagctccacgcgttggagtgtcttgggtttctaccggggagcagctgtcctcactttgacggagaagagaagcgacgatctgcctatcatgaattgattgattcacgtcacatgcaacctgggatagcgctcgacgatggagcagctgttcattatgtggacaaaacgattaaggtggttgtgagttcacgaaaagaggcgtatgcctataaagttgagagaatgcaaataggtgaagagcggttggagacggtttatctcggaaatgaaaaggagcatacataaagatgaaattccttaccacacaaaacgtttcagaagttaatctgatgaatcaagctttaacaaatgaagggttacgtccgttatcagatcactctgaaatacacctcttaggggaaggtgcctggcattttgctttcttgatagagaaggaacagcttgttctacgtataccaaagaaagtggcctatgaaaaagaagttactttccaacaaaaagaattaacggcagagtatgctgcgacaaaggcgttttacacacatgctaatcgagcaaaagaaggcatatgccctgagttctttacatttttcgttcaagaagaattaacgtatacgttagaatcgtatttggggaattccgataaacttggtgatttgacaccaaacgaatcacttcaatatggaagggagataggagacttttttctttctctagagacggtggaatctccctataaagggatcgggtacttgaagtgtgatcaaaatggtaagttaacaggtgaactagatatggatcaaaaagagttcgttattgaagagacgagggagtatgttgaggagttaaatcctttgcttgcaagcgactatgattttgataagaaaagggttgaagcagttggaagagagctgatctctgctcgttccttaaacggtgaaataataacctttacgaatcaagatacgtctcctgagaacctgatcttttcaaaaggtggccttaagatgcttgatccttatccaattctttctccaggtgtttcgctagctgcgaatcacgttttcaattatcactatctatttccttcacttcataacacgcttagataccgggaaggaaattatcttcaatctcttccgcaattaagagcaaacgctgaagggtttaaagaaggttatacagccgattcgagacagaagcggtataacctgcacattgaagttttcttaaagcttgttacgatgacatatactcattatcagctaataaatgagcaatcattaagtcgtgaacaggtgattcgttatggtacgaaagcgcaaattgaagagcgtttcgatcattttctaaaacagcttgagcaatatcctgaatggtaaagcaaagaggaacgcctttcttttttttaaacccaaattaaaaaccacaccggagtgtagttttaatttgagtgaagtatctcatgtaaatcgaatagattaactacccttctatcattccgagagatttcaaagctccttctaaattctgtttaattgtaagggattgcaaatcaagccccaatgagacaacgccgattgcaacttcagaactaaccccagttacaatgatatccacacccattacttctagtgaatcaacgattttgaagaggtgttgggtcatcattgtatcaagtgttgcgacaccagataagtcaagaataagagagcgaatcttttttgcgctggattccattaatgttcgttcaagaataaggtttgcgcgtttttcatcaatttctccgataattgggcaaatcgctacacgagaagatagtttaataattggtacagataatgcatcatcttgatagtattctgatcgaaggctatttgttttttgtgttaaatagctttcggtaaaatgatgaatgaaataatcaatcaacggatcgacgatttttgtaatggcaatgacgtctgaaaccgtaagcgagaaagtatgctgattctcttctacatagctaagaagcgattgtttaacgactgaaatgctcattaacaccgtatccaaataagcgggaatagcatccatttctttaaagcttgaaatttgctctgttggataagaaacttctcctgcttcaatcgattcacctaatggtacgatgatctgttcggtaaatgtgtaaggcacaatgtttggaagaccctgttctttgacggaaatttcgatttgatgccgcgcgtttgctgtgatttgatctatgttttgtaggatggattgccctatagcttggacagtgtgtgaaatgttttcggacatagaaactcccctctaactttgtagttaacttatgataaaataaggttattatatgctatcttactacaatgaacgtttttgtgaagaagtatattactatatacctggaggtgcagggggaatttgaacagatccgtggaggatatgaaaacgacgcttgatgtagtctgtgggaagtggaaagccgttttgctgctagaattagtggaggggcctcttcgatttagtgagataaaaaaggcgataccacgcattcctcatcaaacgttaattaaacatctcaaagaactggagcaggatgggttaattaaccgagtagaatcggatgatgtaccgcccaaagtcgagtattctttaacttcatatggttatgctcttgaaccattgcttcaagaaatggaaaaatggggaagagttcaccgctctcgttccgaagaaacgattgcaaactaaaaggaacgtgcagatgcacgttccttttgtgtatgtttatcttgattctcttagtggaatatctggatttttatcctggaaccatctaagtgcaaagtcgttttggaacagaagaacaggacgcttaagctgatcgtaaacaagcatattacgaacgctgtctactttctcttctggattatccgtttcaatccatcttgcatgctgatgcggcattgtatcaaattgaatatcgacgttgtactcacctttcatgcgatattcaaaaatctcaaactgtagacgtcctactacaccaatgacgatttcatcccagtgagcggtacgatagacttggatagcaccttcttctgaaagctgctgtacccctttgtagaaatgcttttgcttcatcgctttttgggcacgaactttcgcaaaatgctctggtgggaaagttggtaaggcaccaaaggaataaacatttttcgaaccaacaagcgtgtcgccaatttgataagttcctgaatcataaaggcccacaatatcaccagggtatgctttttccacattgcctcgagaggaagcgaagaaaagttgcccctgtgatagcttcaagctttttcctgttcgctcaagccatgcttccattcctttttcgaatgtacctgacacaatccgtaagaatgccacgcggtcacggtgagcggggttcatgtttgcttgaattttaaagataaaacctgagaacgtttcgtcatctggctttacttcaccttcagagctctcgcgaggtgctggagaaggagcgagatcaagaaagtggtttaagaatgtaggcacaccaaagcttgagatcgcacttccgaagaagacaggggtttgcttaccagattgcagggcttcttcactataagttgccccggcttcatcaagtagcatcacgtcttcttgaagctggttgactaattcttcaccagctttttcttttagcacaggatcatcaagatctgagatttgcattgcctgcttgttgtcgccttctgtatcataaaattcaacagctttttgatgacgatcgtaaacgccctggaatgattgaccgataccgagtggccagttcattggataggactcaattccaagaacatcttcaatttcttcaagaagctcaagcggttcgcgaccctggcgatccatcttattaataaaggtgaaaatcggaatgccgtgctcactaacaactttaaatagcttctttgtttgtgactcgacccctttagcagcatcgataatcattaccacgctatcaacggcaaggagggtacggtacgtatcttcactaaaatcttcgtgtcctggtgtatctaaaatattaatggtatgacctttgtagttaaagttcatcacactggacgtaacggaaataccacgctgtttctcgatttccatccagtcagatgtggcatacttagatgattttcgagatttaacggttccagttgaacgaatctgtccaccgaggaacaacagtttttcggttaatgttgttttaccagcatcagggtgagagatgatcgcaaaggttcgtctcttctttatttcttcttgtaattctttatggttactcattatgtcatttagtcctttcaatatcacttcttatgtaatataacatattcttacggttgttcctattgcttgaagggtacgaaaagagagagaaggaattccacgaacggagcacgaatgtgaaagagaaaggagagggaatggtatgagtggatttcaagaatttttagatgattttctaacgagctggcagaactcttcattagatgaaataaaggttaaaattagcgattcgtatcaggcgagagagatctccagtcaatctgaactatacgattttgggtatgatgaatcgattgaaggctgggatcaagcatttaaagcttttaagaatgatggatcaacatgggttttaaagaagctggccgtcacgccacttcgaagaaatgaaatgcttgcgattatttttgcttctattgaaatagatggcaaacaaagtgaaacaggaaatgtcttttttaatacttttcgaaaaggggtacaagggaattggaagcttgttagaagttacattgaatccgggattccaggtgaacatgtaaaagcgtttggtttaaaagaagaatagaacaagaactcagaaactcccgctaaaagttagcgggagtttttttgtatgcagctcttgatgcgagccattaggtacttttaggtgcctatattacagcaaagtacgtacttccattgttgtctagaaggttgcataatcagttgtaccgccgaaaagggaggcgcctcccattaatctcggcactaaaaaactcaaggaggaattcgctttatgagttctaaaacacatacaatgtcaaattcgaaagaaaaatcaagtggtactcttgctcttttagccctcgctattagtgcatttggaattggaacaaccgagtttgttcctgttggacttctttcttctattgcagatgacttatcgatttcaattacactggctggcctgctgatttcaggctacgccatcggggtcgcaattggtgctccggttctaacggctttaactggaaaaatgaatcggaaaacgctactgatgtccttaatggtcgtctttattattggtaaccttgtagcggggatatccacatcgttcggtttattactcgtcgccaggtttattaccgcattttcacacggaattttcttttcaattggttcaacgattgcagcagatctcgttccggaaaataaacgcgcaagtgcgattgcctttatgtttacaggattaaccgttgccacagtgacaggagttccacttggtacgtttattggacaagcgtttggttggagagcaacatttcttggtgttgccttactaggtgtgatcggtattatcgcgagtgcgattctcgtgccaaaagatttgaaagaatcaccgccagcgaagtttagtgagcagttgaagatcttaacgaatggaaaactactattagcttttgcgattacagcactaggttacggtggtacgtttgttgcctttacgtatttagcgccgctccttgaagatgtcacggggtttagtgcgaaatttgttagtgtcattttacttgtgtatggtgtggccgttgcgattgggaatatgattggcggtaaagcgtcggataaaaatccattaaaagcgttgttctggatgtttgtcctgcaagcgatcattcttttcgtaatgacatttgcactcccattcaaagtagcggggattataacaatcttctttatgggattgtttgcctttatgaacgttcctggattgcaagtacttgttgttaaccttgctgaaaagtatgttccttcagcggtaaacgtagcatccgcactcaatatcgcagcatttaacgttgggattgcgattgggtcatttgtcggtggggttatcgttgattcaattgggttaattcacacgccgtggattggcggcattatggttgtaggagcagtcggtcttacaggttggcttcgtgcgatggaaagaaaagcgtaggaggctaaatgcttttttgattagttagtttttttgcgctccaaatgaaggaattatggatgattaagtctcgttaattaatgaaagccgttaggggatccccttaacggcttttggtgtgtaacttaagctgagttaaatactgctcaccttccaatgtaatttgtgttcctgcacgtccacgcccttttacgacataccccttgttttccagatcgtttaaccgtagtcggatttgctgaggagagagtgtgtgagaaaaagcggcgctttctttagaaagtaaatctctacttgctgttttgccttcatcatttcggtctttcatgatctgcaagatgacgtaatgatccttcgcatcgatgctgcttactggaagtgtcgctggcttctcgtttataggttgaagacgatggtgggggagatcctcgagtgtaatcgtagagccgcttgcgacaacaagcgcgtaatcaatcatgctttttaactcacgaatatttcctggccaatgatgggccataaacgtttcaatcacttgttggtccactttcatccacgtgccgctttttgtaacaaaatagtttgtgagtgattgaatgtcgctcaaacgttcacgaagtggagggatcgcaagttgaaggacatttaatcggtaaaataaatccgagcgaaacgtgccttctgtgattttttgttcaaggtttttatttgtagcggcaatgactcttacattaatcggcgtaatttttctaccaccaattcttctaatttctttttcctgaagaacgcgcagtaagtgggcttggaccgttggactaatatcaccaatctcatcgagaaaaatcgttccgttatctgcgagttcaaatagtcctttctttcctccgcgctgagctcctgtaaatgtgccttcttcatacccaaataattcactctctaaaagactttccgtcaaagcgctacaattaatcgcgataaacggtccgttttttcgaagagagttgcggtgaattgcatgagcgaaaagctctttaccaacgcctgtttctccgttaatcaaaacagggtgctcagcgatggcgagtttttttgcgatacgaacgcgttcaagaaggagggggtgttcaccgagaatatcttcgaagtcatattttgcagcgaatcctttcttgtgctgctctcgctgtgctgttttttcaatttcaaacgcctgattaacgcttttaaaggtaacgactgtcgtatgttcttctgggattgattgacgaaaggctaccacatctactccgttcatcgaaacgaatttattttcttctaatccattaatgataaaattttgaaggtcggtatcgactacataggaaagattacggccaataacatcttttgctggcatctggaacaatgcttcaagtcggtggttaaacaaggtaatctctctttctttattgatggctagaatgccatcatcgacggtattaacgacgttctggtaatgttctgttgtttgaagcgcgtcttgttcagcaccaagaatcttgcggtgtaagacgatcatacttcgaatgtagcgctcggaaactttggaagaaacggaatcgtccagttgaaagtaatccattactttaataatcgtggccatatcaaaaggtcttactccgatatcaatgatttgagggatgtaagatgggcataagtgcgtttcgccaggagaaacggctacgtgaatattgtcgtaaaacatttgtcctcgtttaaatggaagaaacgtcacgtggttaatgccaagttggtaaagtgactcaataacatcaaccgtggacgggtcgtcatcatttaccattaagactctttcaccatgtggaatcgtaaggagacgatcaataaagtcatggcgaatggttcgtttgcctacaatggattcttttcctgagatgttacttatcgtagcagcttccgttttagttgcttcggaagaatataagataacgtgatcttcaagttgatgtggtaacgtttcgtcaatcgcaaacgctcttactacgatgtaatcgcctgccaactgatgcaattgatcatagagtatttttttcgtttgagtacttcctgcaattagcgttaaggtaggtcgctccaagttattcacaccttttctactattttggttctattgtaacaccaacaaaaacttaaaagacccaattattacttttatataatgatttttcggacaatttaggtattgggagagttggcatgaaacttgcttctctattaagtaggtaatgatgattaaaacggaaagaaggggaagtatggaacaagaaaagagaaaaaaagaaatgaagatgcctcatacgtttgtgattgtattttttgtcgtacttgctgctgctgctttaacgtactttattccaaaaggaacgtttgaaaccgaggatgtaacgtatgtccagcagggagaagagcaaacgaaaacggttcttgtcccggacagtttcaagtatgtaacggatgatggtggagatgcggtccgagaaggggtttcactatttgagccttatggtggagcgggttttcttaattatgtgttcgaagggctagtatcaggagataaatggggatctgctgtaggtgttgtggcttttatcttaattattggtggtgcatttgggatcatcatgcgcacaaaggcgattgatcaaggaattctctccattattgataaaacaaagggtcgagaagtgcttattattccgattatgttctttttattttcccttggtggagcagtttttggtatgggggaagaggcgattgcctttgcgatgatactcataccacttgtcgtagctcttgggtatgacgctattacaggggtaatgataacgtatgttgcaacacaaattggatttgcaacttcgtggatgaacccatttagtgtggcgattgctcagggagtatccggcattccagttttgtcagggtcaccattccgaatggtaatgtggggagttttcacgattatagggattgcgtacacaatgtggtatgcgaatggtgttcgtaaggatccaaggaaatcgcttagtacagatgcgaatcgctactttagggagtacaatcagaatcaagacctcgctagcaaatttacgcttggccatggacttgttgtccttacccttgtagcaggaattggctggattatatggggtgttattgaacatgcttattacattcccgagattgctacacagttctttacaattgggatcgttgctggtgtgattgctgtgatctttaagttaaatggcatgacagtaaatgatattgcagagggctttacagacggtgcaaaggatttgcttccggccgcgttaatcgttgggatggccaaaggaattgtgattattcttggtggcgatgctgctggtgaaccttctgtattaaatacaatgttatatagtgcaggaaatttagttgatgatttcccagctgcgctatcagcgtggtttatgtttgtcttccagtctgtctttaatttctttgtcgtttctggaagcgggcaagcggccctcacaatgcctcttatggccccgctctctgatattgcaggggttacgcgtcaagtggctgttctcgctttccagctaggggacgggctgacaaacattattgttcctacatcagcggcgctaatgggtacacttggtgcagctagaatggattggggtacgtggtttaaatttattattaagtttcaaatcgtgctgtttgttctcgcgtctgtctttgtgatcacagcttcgcttatgaacttccagtaacaaccgtttggaggaaagacaatgtttacagtcataagaaatgccgagatttatgcgccggattatataggtaagaaagatatgctaatcgcgtttgataaaatcgcgatgattgaggatgaaattaaactacctgattcgattccgcatgaggtaatcgatgcgaatgggaagatcatctttccgggattcattgactctcacgttcacattacaggtggtggcggtgaagggagttatcgaacaaggacaccggaattaacgttatcgaaagcgacgagtgctggggtaacgacgattgttggagtgattggaacagatggcacaacgcgtacaatgcctgacctcattgcaaaagcgcgaggactagaagaagaaggcattacgtgctatgtgcatacaggaagttaccaggtaccggttaaaacgttaactggaaaaattgaggatgacattatcttgattgatcgcgtgatcggagcgggtgagattgcgatcagtgatcatcgttcttctcagccaacagtagaagaaatggctaggatcgcttcggctgcaagaattggtggaatgctttctggaaaagcgggcatcgtcaatattcaccttggagacagtccgtctaaactatcgctacttgagcaagtcgtcgaaacgacggatatcccgattaagacgtttcacccaacgcatatcaatcggacagaagaacttttcgaagctggggtcgcctatgcgaaaaaaggcgggaacattgatttcacgacaagcaccattcctcaatttcttgaagaaggcgaagtgaaatgcagtacgggattgaagcgtgcacttgagggtggagtcccggttgagcgaattacgtttacatctgacggacaagcaagtttacctgcttttaatgcttcgggagagtttgaagggctacagatcggttctgtggcttcactatataaagaagtgcgagatgccattgttgaagatggcgtaccgatttcggatgcgattaaagtgattacgaaaaatccggcatcgctattgaagttaagccaaaaaggtgagattgcggtggagaaagacgcggatcttgtaatcgtagactcagattttcagattgatactgtctttgcgagaggttgtaagatggttgaaggacaagagtgtcttataaaaggtacatttgaatagaacaagacccctatctaagcgataggggtcttgttcttcattggtactgacttaaccctttcttaaatgcagaaaggtggttttttgaagcgtctccaagcctagtcattacgcttcgtacatcttgtgggaggtcaggtagatcggctaatttctcatacatggcgatgttgtcgatttctccttgaacgcccgcttcgaacgcttctttttgtgtgttaggtgtcgttgtatactggttagcattattttctgggacggttatgttatacctggtaaataagggaagaagagctgtaatgtgcctttgttcggctatttttatttgagtaaagggtctgatctcgccaaattctttaatgatggcatcgtaacgagcctgggccaggtactcatcttgcaatgcataagttaatgcctcttcaagcgtaatagatgagtcttgaagggcccctattgctccaaaatttttgggaggggcttctgctgttgctacaagcgagctaaagtttaaaaggataaagctgaacattgcaaaaatcactaattttttcaagttacctgtacatccttcctaatggctgattatgtttcttatttaagttttcttttcgtgaagggttttatgtaaatgattgtttttcggaaaggccctttttattgatttacttttaagaacacttaaaaacacgtcttagtgaatttagtgaaacgttgtagcgaaagagaactgggcagaacatatgcaggtagatggaaatttgattactggtcaaaatcctcaatccacaacaatcgtggcaaaggaagttgcgaaaaaattaagctaactcaccgatgaagtagcgagataagtgaaaaggactcccgatttcggagtccttttcgtatttatacctactctttatcttttttctttccaaaaactttttttgaagctcctttaaaaacgtttgaagctgtatcaactgactttccaacaactttattccctgttttacttacatttttgacaaagtcagttgaagcatcagcggctttaccgacaagaccaccttctccgctaactgactttacaatatcgttcgctgtgtcagcggatttattcacaagatcacttgcggttttagatgtcttctttacgatgttttcttccttcgttgaatttttttcagacatcgcaatcccctcctaggcgaatttgatacatctctatgcttatgaagaggttagtgagaatatgaatttggtttttttgggggatatgagtggtgtcttttgagggtggcaagaataaacaaacccgcatatgctgcgggtttgcgctttagaatgacagtgtttggccgtcatcaggaatgaggactttatttagaagatctttttcttcaatgaattgttttaactcatctcgtgttaacagacagtgattgagtgattccatatgaacggcaacgatcgtcgcatccggtgcctcttgatacgtttgcacgacattttcttttgtcattgtaattggaccaccttcaagaaattgggctgcaccagcatttactacgatgatctctggtttatgtttctgaatcgctgttcgaacatcctcgttgaaaagagtatctccagcgacatagagcgttttttcatttggatgagaaaatgcaataccggatactttccccgtttgctttaagatttcgcctgctccgtgcttcccatccgtgcgagataacgtaacattttcaaaagaagactcctcttcaagtgaaaagacgttttgaaaaccttctcctttaattacttccacatcttccttgttctgtgcgaagatagcgatctctttcggaagtacctctattgccttgtcatcgaagtgatctggatgtaaatgagtgacaataactgcgtcaacattaatgatttcattaatagatgttgatataccgacagtagggtttgagaggtgctgatttgctgtgttcgggaaaggaggcattgctccttgatcggataggaaaggatcaattagaaattttttatcagcataatgaagaacgagcgttgcgttacgaatgagttgaatattcatcttatcttcctccttttgatctggttctcttataggataatatagatgtggacaaggaatacatagatgaattcaagtctttaagataagatacttgaattgtgaaaggagttggtggaatgatcgatcaaacagaccgaaaaattatcaaagaattaatgcagaacggtcgtataacgatgaaagagcttggtgaaaaagttcatttaactggtcaggccgcttcatctcgagtgttgagattagaagaagaaggtatcatagagggttactcaattaaagtagataattcgaaaattggttatgctgtgcattgttttctgacgatctatacccaaaacattcatcacaccccatacctttcttttattaagacaaaagaagaacatgttctcaataactataaaataagcggtgatggctgctatttgctagaatgtcgttttccttctaataaagaacttgatgaatttcttgttcaattaaatgagcacgtgaattataaactgtcgattgtgattaacgaagcatagcgctgctagtcttgatattcctcaaattaaatggaaacattaaaatttaggtttgtttacttttttgcagggtagtaagaagaagtatttaaaactttgaggaacggtggctaatatggggttcttttactatataaagaaatatttaaaaatgtcgaggcgacagcggaaaagtgaattgaattcaaccatttggtttatgccgttttggtatatagttggagcgattgctctttctgcttttacctattatctcgattatgtggttgatgttagcttatatttgccgatcgggatcggtttcagcggacagaccctgcaggtgcttctaagtgcactcgttggaggggtgctaacgttaagtgcctttacacttaactccttgctcgtcgcacttacgacgtttagcgggcagttttcttccaaaatgctagtaaacttcgtcagtgaccgagcgacccagcacgtactcggtatctttaacggaagttttatttatgtgctcttaaactttttatatgtgacacatggggaagaggaatacgttgttgcgacaccggtattatccattctgacagctattacagctgcggtgacctttatttattttatcaaccatacagccacttggatgcaagttcataacatcagttttaatatgaatgttaagtcaaaatcggtgcaggcttctctagaaaaagaattaaactcttaccatcttgagaaggaagtagagagtgaatctcttccccctgagtctgatggaaaggtaattaaaacgaggcaatctggttattttcaagtcgctgacttttcaaaactcataaaacaagcgaataaagacaactgccttttaaggtttgacgttagaattggagaatttgtagtagaaggaacgccattgcttacttattgggaatatgaacaaagcattaatcccgaacgctacgttaaatttattgagatcggagttaaacgtacagaaattcaagatttggagtatggattaatgaagcttgccgaagtagcgatcaaggctttagggcataatgacccgcttacggttacgaatacgattcatcagattgctgatttgttgaaaagcattaggcagtctacgaacttttctccataccttttcgatcaggaagaggagcttcgcattatcttaaatcaaaagaattttccttattaccttcataagggattcgcttccattcgtgagtattccaatcagaattcaacagtgatgacagaacttttaacgatgatctcccttctaagtaaaacgttggataaggaagtacacgaagatctatgggaatttgcacgccagacgattttaggatttgataactatagtctgtatgaaaatgactgcttgtatattttagagcaactgtccgagcttgctaaaaacacaggcaatcaggaggattatcttttcttgcttgaatatatgctccagcgagttagttcaaagagcgcctctaaggtgctaaatgatcctaataaggaataaccatacgctattttttgtgatatgacgatataaactaaataacatacatgatgagcattttcctataagggatttgctcttttttaggttgtttttgggttgctgaaacaaccagataatcgtgaccaaaagaaactgaccttttcattacagggttcctgagttggaatgaaacttgcataatagtttgataacaatgaaaagggagtgtggaagttggggaaatggaagcatgttatcgctgttacagcaatgctggcagtatgtatggtgttagtcattttggggagagagtttgaaacgaatgccactggcgcagatgaaacaaaaggatcacttgtgattgtaggaggggctttaagtccagataatgaagaagtgtacgactcgtttctttcattagggatggattatcgaaacaagacaaaggatgaattgaaaatcggcattatgccaactgccagtgctacgccaattcaaagtgcatcttcctacaaagatgacttcgttcgctatggcgctactgaggggaatgttgatattcttcctgttgccgtaagtgatgatccatctaccgaggaagacgaatcgaagtggaatgatggtgcttataatgaggaacttgctgaaaaagtgaagcaatatgatgcgatctggtttgtaggtggaaatcagttagattatacgaaaacccttctaactaacgggcaagacactccagtgttaacttcaatcaggcagatctatcaagatggtgccgttctaggtggttcaagcgctggtgcagcgattatgagtgatccgatgattggcgcaggtacaagctctggtgcgctaaatgaaggggtcacctatgaagataactatggtgatgctgatgacaatcgcgttttccttacacaagggcttggtttctttgagagtggtacagttgatcagcactttgtgaagcgtggtcgctttgggcgactaatcgttggggcatgggatgccggtaacgaaatgggctacggtattgacgaaaacagtgcaatggttgttcataatgaggatcaatcaattgaagtggttggagagagtgggcttgtcatcgttgacctttcaaaagcaaggaaaacagcagattttccgacggcaatgaaagatgtgaacatcagttacattgaaaaaggagatcgttatttctgggaatcaaaaacgtatcagattacagaagataagcctcttattgaacaaccttattacccggagagcactacgaatacagggatttttggtgaagatgcgctaaaacaagttcttacgtatgatctcgttgatagtgattccaatgaagcggtaggcctcgcttatgaactgactggcgacaaaaaaggggaagggtttaagcttgtcttctcagaaacgaatcaaacgaaaggatactgggggagaatcaacggcgaagaatcttatgcggcgattaacgtttcccttgatgtaacaccaatggaagtgaagctaaaaattgataaagtaaacgaaaagaaaatggaaaaattttagaagttcgtttatgaaaagaaggatgtgcccgcgcacatccttctttagtattctactcgttcgccgtgtttttgccagttttgaaaaggctcgttcttttctttcatctcaatatgatggaaagggatggttctttgttcaggttttttctcaatttcttcatagatgacagcatcatcaaatccggcatcggcagcttcgtgtcttgaagctgcgaagtaaacgcgatcaggccgtgaccagtaaatggcgccaaggcacattgggcatggttcgcagcttgcgtaaatgacgcagccgtcaagctgatgtgtcccaagtttttggcaggcgtttcgaatggcgactacttctgcatgagcagttggatcgtggtcgcttgtcacttgattgaatccttccccaatcacaacgccatcttttacaacgatagccccaaatggaccaccacgataatctgtaacactttttgatgctaactgaatggcatgtgtgagccaatctttctctgtcattgtcatttcaccacactcctatctaacagtaattagacatatctatcatcattccctttcagctgagaaaattccagggaaagagcatcaagaaaacaagatgaatgttaaaggaagggctaaaagttaagctcttcctgagttctctttcttgcgttataacgaatagaggcttataattcaaaacgtaatgtttacgatttgtaaaaagtgattgatcgttataagttgtggataactgcttaacgctcaaatcgcaacgattaaaatagagaaaggaatgcatttatttggctaagaagtcgaaagtagtaaaagaacaaaagcgtcaggagctcgtcatgaagtatgctgagctacgtcaggatttgaaagcaaaaggtgattatgaagctttgcgaaaattgccgcgtgattcttcaccaactcggttaaataatcggtgtgaagtgactggtcgccctaagggatacttacgaaaatttaaaatgtctagaattgcgtttcgtgaatatgctcataaggggcagatccctggagtgaagaagtcaagctggtaaaagggtaggggaagatgaatgaagtgcaatgaacatttgttgaagatgctcgttcgtgatatcgtggcaaaactcccggagaaggagaaagccctctatcagttcattgatgaattagaagtaaggttgattgaagcggctgcaacacccgatcaatacctgaaccttctaaaaaaatattctccttatcatgaagcagcgaatcaatttgacatctctccatataaggcgagaacaatgatgcatcgaattgaatggaaaattgccgcgaaattggaagagaaacttcagcatctcaagtggttggagcatccttctcatggaaaaagagtgaaaaaaggttatctagtgtttaaatgaaaagagctgcgaattattgatgaattcgcagctctttttatgttcataatcacgctgtttccgtctgctactattttttcatctcaataactttataaaaatgagaacggatcgaaaaaacaaaaagggaagcataacgttctactgtacagttcgagtgttttaatttagaatgtataatgaggtgattgatcttggggtgttgttaaaaataggtgagttagctgaagtgtgccatgtttcgaaacgtacagttgactattatacaaaaataggattattgcagtgtgagcgctctgaaacgaattatcgcttctatggggaagatgcgattgatgatattaaattcattgaacaatgcaaagaaatgcaaatgacgttaagtcaaatccaacaacgtctaacggtaaaaaagtctagtcaagttgatacagaaatgattcatagtcaggtgaaacaagtaatcgataaaatgcaatatttaagggcggaattaaaggatattcacgaaagtgttgagaaattagatgaagaaactcaaacgaagattaagaaaaacctttcgcctcaaactgtcgcgcttattcaatcgttacttctttactcaacttgaccggcacgataccaaaaatgcaatttataatcagttaggataaacaacaactcaggagagtgaaattttttgaatgatataccactggattcgattcttttattaggttccttaatactgttatctgcttttttctcatcagctgaaacagcctattcgagtgttaacaagattaggttaagaaatttcgcagatgaaggaaggcgtggaagtaaaagagctttagccattgctgaaaactttgataaagccttatcaacgattcttatcggaaacaatatagtcaatattgctgctgctagtatttcagctgctgtagcaactgatttatttggcgggaatgctggcctcgtgattagtacggtgttcatgactattttaatcttgatctttggtgaaatacttcctaaatcattagcaaaggaacatgcagaatcttattcattaatgatcgcaacggtgttatatgttctcattaagctgcttgcacctctcaatttcttttttgttaaattgaaagtgtgggtatcaggtctttttgcgaaaaacagcacaatgccatctgttacagaagaagagttaaaagtgatgttagacattagtgaagaagagggcgtcatcgataaagaggaaagagacctcattcatcgatcgatggatttcgatgatacgcttgcaggtgaggttttaacaccgcgaattgacatcgtggccattgatattgatcaatccgtagaagaaatgaaagaaatcttctttgaagagaggttttcaagaatacctgtctatcaagatagtattgataatattattgggattttaacagaaaaagaattttttactcacttgattaagtatcagactgttgatattaaagaattaattcgagagcctctgtttgtggtagaatcaatgaagatttccactctgttaccaaaattgcaaaaggaaaaggttcacatggccattgtgctagatgaatttggtggtacgtcaggaatcgttacattagaagacgtactagaagagattgtgggagaaatctgggatgagcaagatgagaaattcagtacaatgcagcgaatctctgatagcaactatcgttttgatgctcaatttcagctagatgatttctttgatttaatggaggctgatacacctgaaagttcttatcacacgataggtggatgggtcattgagaatcttggaacagttcctagtaacggggattccttctattatgaaaatcttaaaattatcgtcgaacaagtggaagagcgtcgcgtaagaaaaatactggtagaagtgcttccgaaagatcaaacgtacgaagatatgatggtaaaagtttagattcttattcatctcacataaaaaacaacgagagcagctgatccaaatggctgcttcttttaatgaggtaaggtatgaaaaactggagaaggcgattgaaacacctttatcgtttttttatcgatcgaccatataagccgcagtttcttatttctaatcaatatgaagtgaagcgtgttattgggatgggaagttacggaataacctatctctgtaaaaataaaaaaacgagagagcgatgtgtcgtaaagcaaatacgtccaagtaaactgaaaaacagtgacacttctttctataaaatggaggcagatatactgggttctttagaccatgttagtattcctaagctccatgatgcttttcattttaacgggaatcagtttttagtaatggactacattgagggtgtgaatctagaagatctcctgtttgataaacatgatcgatttaacgaactggaatctctcaagtttcttaaaggtttgattgatattgtagcttatttacatatgcacgatatcagtcatggtgatctacgaataccgaatgtgatggtaaaaaacgctcagatgtatgtcattgattttggattagcagtctcattgaaagataagtcagatcaggaggcgcttgagctcattcaaaaggatttatacgatctaggtgattttctactcttcttgctttactcttcttacgatcccaatagtagaaaagaccgtccatggacagaagaactaaccattcatccagctacggaacatttcataaagcgactgctgcagattgagactggatttgaaagtatcgatcaggtgcgcgatcacctgtatcaattgctgcgtatagctaacaataaaaccagcacgtgatcaattgatcacgtgctggtttattgttagctactgcttgagcttcttcctctacgcttataacgatgactgccgccataaggcgaatgtttccgtccgctcgagctgcttcttttataatgttttcttttgtggctactaccactagacttcttgatttgtttttcgactcgttttaatatttttttaaacatgatcatgggtctcctttcagtctcaaatcgtgttcgaatgcagaaaagaaagatagactagattctctatagcttatcatagagttactaaaatccatacaatgaatatggggcgtttatccttagcggtgaattattttcatcaaattttcatataagccacttatactaaattcttagatacagttaaatgggggaacgacggatggtgagtgcaagcaaattaatatcaattggcatcattagtttaagtatcatgatcggacttggtaccttctatgtgataagtgatctatcgaagcaaaagagaagagaacatatcgaaggaatcgtgtcacaattgattaactttattctctacatttggatggggaaaataattttaaatttttccttgtttattaaagatccattggcaatattagcttacccgagcagttcacatgcattttatttagcgattctatttagtatacttgtcaatcttttgcaatccaaggacgcacacaaaaatgatccccactttatagaaactcttgtatttgtttcgttaggaacggtttttgtgtatgaatttattcaactggtatggaatagtaatgcctatgcttttggaaccttaattgttgttggttttctcctcgtcttattcattagcttgcgggaaaaaatagcgttctctacgctactcatcatgacgataacggcgtggtcaggaggaatgatgttactggcatttattcaaccaattgtaactttgtttggttatataatgacaccatggtttgttggattattttacttaattagtatgttcatcctcataaataagagaaggagggaaagacgtggttggaattgaagcagatacagctctacttgtaggtctgttccttgcaatgggagctggagctttatcttttttatctccctgtgtattaccaattttccctgcctacctatcgtacataactgggataagtgtgaaggagttgcaaggaaataagaattcgaagattcgtagtcaattattgagccattcgttatttttcttgttaggggtatcacttgtctttattagtttaggtgctagtgcatcattattaggtcaatgggttcaaaacttattactaggggactctggtttattaattcagcgttttgcgggaatctttattatccttatgggattttttgttgcaggatggataacgattccagctttaatgaaagaaagacgtattagatactctaaaaaacctgttggctaccttggcactttttttgtaggactaggttttgctgctgggtggactccttgtatcggccctatttttggctcaattctattactggcagcgagtaatcctgggcatgggatcgtttatacggtgatgtatgtaattggattttctttaccttttatacttttgacattctttctcggttctaccaggtggatcgttcggcatagtgaggtcattatgaagttcggtgctgtgatcatgattcttatgggcttggtattattctttgggctattgccgcgaataacaggctttctgcttgatttagtacaaaatacatggttatcagaattaggataaagggggatgaggaatgagaagaacacttcttattatcgttattataggcatggttggttgggcggtatatgattctactagctctactgatgacgctaaaggagaaaatagcagtagtgatcaggtagccaacactcaaccttcaactcaggctgttgaagatgatttagtagaatcaaatgatgttgggataaataaagggcagattgctcctaacttcaaattgcaaacgttaaatggagaagcggtgcaattatctgattataaagggaaacgagtaatcgtgaacttctgggctacctggtgtcctccttgtagagcagaaattcctgattttcaaaaactgtacgagaaaaaagatgtcgagatcttagccgtaaacctcacagaaacagaagagagtactgaaggagtcgaaggatttgtaaaagaattcggaatgacctttccagttgtgatggatgtgaattctgatgtttctaacacgtatcaagtgagtgcatatccaacttcatatatgatcgattcaaatggtcgaatccaattcgttgcaatgggtgcattaaattatgacctcatgatacaggaatatgaaaagatgaaatagtctttcatatagtacaatagtcaagaggtgagtttggtgaagcagacagttttagtcgtagaagatgatcaaatgattcgaaaccttattgcgatctatctgaacaatgctggctatgaggtagtagaagctgctaacggtgaaatagcgaaaaatgtgttcttagaataccatccgtgtctagtcgttcttgatttaatgttacctcttttatctggagaggaattttgcaagtgggtaagggatcaagaacggaatgaggtttcgattattatgctatcagccaaagcgcgaacagaggataaaatcaagggattaaaaataggagcagatgattatttgacgaagccgttcgatccagaagaacttcttgctcacgttgaggccgttttgcgacgtactggacagttttgtcagaaagtcacttacaaagggttatgtatcaaacctcgaaacggtgaggtatttctttacgataaacagataaacttaacaaaacacgaattcaatctactctatcattttatggaaaacccaaatgttgttagatcaagagaagatttgattttacaattatacccctacgtcgataaaacggttatggatcggacgattgatgcccatattaagaaactacgggcgaaaatcgaggttaatcctggtattccagaacgtattcaaacagttcgaggaatggggtataaatttgttgtggaataaacgcgcaaagaccttcctaccaaataaacttttatggcgtttgacatttgttaatgtcattgtcgttggtatatttatcgcattaagcagttgggcgatctatcatactgcctgttctttggctaatggattgggatcttggaatgactcgaaacagcaactatttaactccactctttttcaatatttatggatatttagtatagctgccatttcaattggaagtttaatacattatcgcttggtaaaggaaatcatacgaccgttaaaagagctaattgaatcaacgaaaagaatgaaagcaggtcattatcccaaccccattattgtgaatacgagagatgaagttggagaattaattggtcattttaatgatctggtgaaacaattaaaagagatgcaacaacatagaaaagagctggttttggatttttcacatgaatttcgtaccccattagctaatttgaacggttatttgggtgctttgaaaaatggtgtgattgaaggagatcaacaaatataccattctcttcagaaggaatcggaacgacttattcacatggtggaacagcttgaacaagtgaaggaatgggattatatatctaaacagacgtacactgagaaagaaccaatcgatatgcaatttctaatacatcaatcggttgcaatgtttcgttggtcattagaaaatgcaggaattaacgtggaggtgcaggctgaatctggtacagtgaatgtttctaatgaggggatttcgcaggtgatcagtaatttaattgataatgcaattagatactatcaaggaacaggaccaataatgataaaaggagaattagtagaaagtcactataggctatcgatctccggtcctggacaagcaattcctatccaagaaaaagatagaatttttgaaaggttctatcgttcaaattcttcacgcgaaagagataatacaggcggaacaggacttggacttgcgatatccaaagaaattattgtacaccatcaagggaagattggattaaagtcagaggaagagactcacaccttttggattacactaccgcttatctagttggcctatttaaaagacggagctcctgatgatcttggcgaaaattaactgagttaagaatgaacataagcggcatctcaactccctgattattatgggagtgagatgccgctgttttaaaataactaaagcaattctagtatatttaaatttggtataaaaataggttaattctctatgaaagtgacttgaaatacgtacaaacggtttctatcccttttgtgaagttttcaatatgaaaatgttcattaggagcatgtaaattttctgacgggagtccgaagcccatgagtacaacaggtgcttcaagaacgcgcgcgaatacttcaacgattggaatcgacccaccttctttagggaaaagagcacgcacgccgtatactgtttcatatgcatctgccgctttttgaatcatcgggtcgtttgaattaagggatacaggacgggcctggataaattgattcactgtgatcgttgtaccggttggttgatgctcgagaagatgtttttcaattaactcatagatgtgctgtggatcttgatctccgacgagacgacagctaattttaccgatggcttctgaggggacaattgttttaattccgtcaccctggtacccacctgaaatcccgttcaattcaagcgttggacgaatacccgtttgttccttgaaagtgaatcctttttcgccaaataaagaggttaatccgagctcttccttcatcgcttcatcatcagacggaatctgagcgatttcttctttcaattcctctgtaagttctggtacaccttcgtaaaatccatccactgcgatggatccatcttcgctgtgaagactatcgagtagacgaacaagggaatgaactgcgtttggaaccccgccgccatatacgccagaatggagatcagtcttcgctgttttcaccttcacctccatcgcaaggaccccgcgtaaagatgtacaaatcgcaggtaatccttctttaataaaggaagtatctgaaatcacaacagcgtcagcagcgagcttctctgtatttttttcaataaaaggtccaagatgtgggctggcgatttcttcttcaccttcaatacagaacttcacattgacgggtagcttgccatcttcttgcatcaaaagttccatcgccttgatatgaataaacagttgacctttatcatccgtggcaccgcgagcaaagatcttgttatcacgaataacgggttcaaatggtggcgtttcccagagatcgagtggatcagcgggctgcacatcataatgcccatagataagaatcgtcggcttaccctctgcatgaagccaatcagcgtagacgatcggatgtccatctgtttcgatgactttaatgttctccatgccggccttttctagagaagtggccacccacttagcccctttttgaacgtccgacttatggagtataacctccttagttaggttgtctttattatagtccacagacggaaatttgcacattaatcgagctgtttttggtggataaataaggaaattagataacggagcattaaaacttatattaaaattatgacaataagattaagtgcgtgtcatattatataggtctaaatcccttcatgtggaatcgattcctgattctaaagaaccatttatttttacgatgaaagccttttcgataaccgtttgaaaaccgctttcttaattgactgaatagggttttcctatctaaagacctgtataatatgtgctttttcgagcatattgacgggttcacatattttccatacagttatggcgaacgaaacattttactaaattttgaggagtgtggcagatggggaacgtgaaaaagtcttctgtttttaaggggattgcactatcgacaattatgcttgtaagtggatttgcaggcatgccgttatctacgaatgcggctgaggatgtagagacagcagtttggtctcgtcaagacgcgcagggttatgatttatcgaaaaacaacactgcacctaacatcgacaacgtggatgaagtggctccagattattgggtttgggacacatggccactacgtaatcgtgatggatcgattgcacaggtaaatggttaccaggttgtctttgctcttacagcttctaaagaatatacatggagcggtcgtcacgacgaagctcaaattcgctacttctactcgaagaacggaaaagattggaaaatgggcggactcgcttatgaatcagaagatgcactaggcgctcgccaatgggcaggatcagcaatgatggatgacgatggtaaggttcaccttttctatacagcaactggacgtaaaggtgaagaacaaacaacatttgaacaacgtcttgcgaaaacaacgtttgatatcgaagcagataagaaatctaaatctgttgagctaagcaactttggtgagcatgaaatccttgctgaagctgacggtgagtactatgaaacacaagaacaaaaaacaggaaatattatttattcattccgtgacccatggttcttccaggatcctaagacaggaaaagaatacttaatctttgaaggaaatacagcaggagacgacaagtcactagacccagaaaacattggtgatgctgatttccgtgaaactcacgatgtaccagctggcgctgaagattacaacggtaacgttgggattgctgaagcacaaaatgaagatctaacagactttgaattgcttccaccactactcgaagcaaatggtgtaaaccagcagcttgagcgtccacacatccttgttaaaggtggagagtactacctctttacaatcacacataaatttacgtttgctcctggattaacaggtcctgatggtctttatggctttacgaatgattctcttcgcggtgattacgagccacttaacggcaacggccttgttgtggcaaaccctgaagatgatccatttatgacatactctcacgcagttatgccgaatggtacagtcatcagctttgtgaacgagtatcgtgatgagaacggtgagcttcagtttggcggtacgtttgcccctacgcttaaactttcgattcatggtgatgaaacaaaagtaactggcgcacttaagccaggtcaaatcatgccttcacactaaaactgggaaaaccagactaaaggagacttacccacatgaataagttttcaaaaacagtagcgacatccgttctcggattcgctaccctgttttcaagttttgctccggcaacaagctttgcagcagagagtgaaacatcgaactggacaagagaagatgcatctaaaattgttcaaaacaaagataatacggctccagaaattaacacaaaagaccttgaacaaattgctccagagtaccatatctgggatacgtggcctctacgtaacaaagatggttcgatcgcaacgttaaatggttataaagtgattttctcgctaacagcaccaagtgatgtattacctggtaagcgtcatgatatcgctgaaattcgctactttgtttcaaaaaacgggaaagattggaagcttggcggtaccgtttttaatgaagagcaggccctaggttcacgtcaatgggcaggttcagcgatgattgaagatggcgaaattaatttcttctatacggcaacaggtcgtaaaggcgaagaacagttaacttatgagcagcgtctagtaaaggcttctgctgatgttgatgcatcaaataagggaatcgaattcaacaactggtctgatcatgaagtgattcttgagccggatggcgaatattaccagacaatggaacaaagtaagcagggagacattgcttatgcattccgtgatccgtggttctttgaagaccctaaaacaggcgaagattatatcttgtttgaagggaactctggcggcacacctgcagaacgctctgttgaacaagagcacatcggttctgaagacttcgctacagtagacgaagtaccagaagaatcaaagctctttaacggtaatatcggaatcgcaaaagctgaaaacgatgattacacagagtttgacatcatgcctccactgatggaagcgaacagcctcaatcaggagcttgaacgtccgcatatcgtaacaaaaggaaataaatactatcttttcactgatacgcacaaaaacaagtttgctccaggaataactggtccagatggtctttatggctttgtatcagattctctaacatcagactatgagcctcttaacggaagtggtcttgttgttgcaaatccagagaatgagccttatcaaacatattcatggatggttatgcctaatggaacagtgattagctttgctaacttctatgacctaaacggtttaacaatcaatgaacttggcgcgcagtcagagcaatatcaatttgatcactttggcggcacactagctccatctcttaaactttcgattcacaatgacgaaacgaagatattaaaagaaatggatgctggcgtatttaaataagagtgatggtaactgtcggggtaagcttcgacagttacttttctatttagaggtataattcgtttgacagacaggagagctggatactatgagaaaatggttgctagctgtaggtgttattgtagtgatcggcattcttatcttctttgcgccctttaatgacaaaaatgaatcgccagaacaagaggaaaaagagcctgagataccaaaagaatacaatcagtcgctacgtccccagtttcactatacgccaaagcaaaattggatgaacgatccaaacgggatggtgtattttgaagggaaataccatttattttaccagcataaccctacaggaaatgaattcggaaacatgggctggggccatgcggtcagtgaagatctttatcactgggaagaaaagccgatggcgctagaagcggatgatcaggggatgattttctctggtggcgcggtttatgataaaaccaatacgagcggcctttttgcagaaggaaaagcgggtcttgtcgccttctatacgatagcaggagatgaacagacacaggggcttgcgtatagtgaagatgggggagaaacgtggaaaaagtatcgtggtaacccgatccttccaaatccaggggttaaagattttcgtgatcctaaagttgtctggcatgaggaatctgagaagtggatcatgcttcttgcagcaggaaataaagtcattttctatggctcagataatttaatcgactgggagaaattaagtgaattcggcgttgatcagggggcccagggtggcgtttgggagacgccagaacttttccaattaccggttgatggcgattcttctaatgagaaatgggtgctacaggtggatatgaatccaggaagtattgctggcggatcgggtggacaatattttatcggtgatttcgatggaaaggcgttcacgagagaaggggcaaaagaagacattaactgggttgattacgggaccgatttttatgcggcacaagctttcagcaaccatgagggcaatccaatttggctcgcctggatgagtaactggatgtatgcgtctgatttaccaacagatccatggaaaggtgcaatgtctttaccacgtgaggtttctttgaaagaagtgaacggtgaaacgcgccttatccaagagccagcgggtgagattgagtcgaatcgttccaagaagttagtggatttatctgataaagaagtggaaggtagaatgccacttgattttaaggcagatacgtatgaagtcgttgccaaatttgatttagatacgtcaggtgaattcggctttcgcgttcgaaagggagacgaagaggaaacgattgtaggatatgattcaaaaaacaatcttgtatttgttgatcgacagaatagtggcgatacaagttttcatgaacagtttcctggtgtgtacagggcaccgctagaaccaacggaagatggaaaagtaaagcttcatctgtttgtcgaccgctcttcagtagagttgtttgcgaatgatggaaagcgtgtcatgacgaatcggatcttcccatcagaggatagtgatgattttgagatctatgcgatgaatggaaaggtgacgcttgaatctctagaagtgtatgagcttgattcttcgtggaaaacaggggaaaaagagtaaggatttatggtgaaagcgggcatctgcgatatagatgaccgctttttcttaatggcgatcccttgtttagagtgagaacacgttatttccgcgaatttcggaatatatccgcgatatttatttttattccgcgaaaatcatgataattccgcgatattctcaagtattccgcgaaatgctcaataatcgaaaataaataggtccttagaaggggtttccttttcctggattggggtacaaatagctatcttgtaaataatgggggatgtatggaaatggaaacatcattttcaaattcagaacagcaaaagtttgtcaggactcttcagtcattcaaggaaaaccgccagaatccagttgtgttagaagaattgttatcagacgctgccgttctcattgaccagaataagctcgaatccctttatcaacttgctgatgactatgataaggcaggcatttttgaaggtggaccatgggaagaacctcgtaaattacaaccgccgcttgtaggtggatcgtttaaaatagacggaaactattcgatttttgaagtgttaagtgagctgcgtatgcttgcgattgcaaaagaggaatatacgcatccagatgtttcacgcgagcaagcccgcacttttctaaacaaagtgatggcgctgaatctccaaatgattttcccagctgagacggaggaagcaagaattaatcaagggcaagaacaaaagagaggcatcctcctatttcaatttttagctgaaaagatgtcgctcggatccctatcagctacgtttgtggatgaaattgatcgtttaactgcacaacgcccgattatggtaaaacgaattaaagaaatgattggttacgctgaaaacctcttatcttcagaggatttaagcttagaaggacgtgaaagcattcagcgttaccttgatagcgtgcatgcaccatcggaacttagcaaggcttaccctaactttgctgactatcaaagtcaattcaatgcgctatctgagatggaaaaagaattagaagcggagcgatttgcagacgtgatgcgcgatactgggctcgtctcgccggttcatgcgaatcttgcacgtactcttgcagaagaggacgcgtctcatttactcgttttaacacttggattgactgaaaaaggggaagcgaacttaaatgagcactttaccttagtaaaagagctcattacgttagcaattttccctgtcactgctcagtctctttacggacttgcgcgcatgcttgagcgcggcgttttatcctctccgcctgttattccaggactggagcgtataatcgaaattgagatgctctctgaagtagaaaaggatttactcgcatcacgggatcatcctgatgacgtcacgcctgtcggaattttattgtcaggacttttaagcgtattggggcagccgcttggcattgggcagggaatgaatccgacgtgtcaatcagctcgaggcatcagcctctggtcacagcatgatccaggatttttgctagagcttgtcgcaagagcgtgtcgggatggggaaattgatatctcatttgaaggtgctgaaattaattcgtcgcttattgcgggaggacttgccccggatcttcataaagaacttgatgccgtttcacttattctcgttccacatcttgatcgcgtttacgatgaaatgatgaagcgaagcgctctacgtggtgaagatggtcataaatttgtgaacccggaattttatggtcagtggatttctaaggagttttcatcagttattaatccggtaacgggtgccgtaacaaactatgaacagtttgcacgactcttttatgcaacgcatcatccggattacaatgaaggccatcagctgatttacccaaatccggtcgggatcttcgtcactacagcgaacgccgatttactcggtcttcatgcgattagcatccagcgaattgatgctgatccatctggggaaacgagagtctacttttataatccgaataatgatagcggacaggattggggtcagggcattaagtcaacggtccgaaatcatggggaagaggaaggagaagcctctcttccatttgatcagtttttatcccgtgtgtatgcctatcattataatccgaatgaaatgggagacgtcgaaacggttccacaggagatcattgatcgggtaacgacgcttgcaaaagaaagctggggacaaaaataccagtggaccgatttagctaatccgtttttaatttaaaatggcatgggttcccttcttgtactatagaaggtggacccttttcttattaagggttaaagtagagggaatagatgatttactaatcaggaggtacatattatggaagcaaaactagtcattgatgcacgcgcaatactcggagaaggtccttgttgggatgatcagagtcagctactgtattgggttgatattgaaggaaagaaggttcacgcctacaacccgatgacggcaggtaatatcgagatgaagcaagagcaaatggttggaacgattgcaccacgtgaagcaggtggcctggtgatggcgatggctggggggttttacgctatgaatctttcaacagagaacgtagaggcgattaccgatccagagagtcatttgcctgataatcgctttaatgatggaaaatgcgatccagctgggcggttctgggcaggaacaatgcacatggaagggttaaaaggggaaggcgcgctctattgtcttgatgaaaaccttgaagtgacaaaaaaaatcgatcatgtgagtacgtccaatggactcgcctggtcacctgatacgcgctatttgtattttattgatacgccgacgaaaaaagtcgttcgctatgactatgatttgtctacaggcgatatccgaaatcctgttgaagtaattacgattcctgatggagagggtatgccagatgggatgacgagtgatgaagaaggaaatctatggatcgctcactggggaggttctaaggttacaagatggaacccggataccggtgaaagactgctagaagttagcgtaccagcgttgaatgtgacgtcatgtgtatttggtgggaaagagcgaaatgagctctacattacaacagcgcgaacaaatacgagtgaagatgaactgaagcagtttccgtatgctggcggagtgtttcgtgtgaaaacaaatgtcaaaggaagtcgcacttacgcattcaaaggataacctttttcccttccttcctgtcttaaagtcttttataataagagggaaataatagaaaaagaggggccgagtgtgaaactaaaatcatttatcgcaatggggttatttttattgtttctagcgggatgttcggatcaaccatcagcggttgatgcgttcgatacatacgtgaaggactggaacaagcaggagtttagcagcatgtacgatcaattatctccaactgcacaaaaatcgatatcgaaagacgaattcgccgagcggtatcagtctatttatgatgatgtagaagttgaagatttgaaagtaagctttgaaaaacctgaagaagaacctgagccaaatgaggagggagaagtgaccttccctttttcagtgtcgatgcaaacactagctggcgaagtctcatttgatcatgaagcaacacttgtcctgactgaaggagaagaagccgactcttacggcgttaactgggatccttcgtttatttttaaggaattagaagaaggtgatgaggttgcgattcgttcttctgttccggttcgtggtgaaattaccgatcggaacggtgaagcgttagcagttaatggtacggttaagcaaattggagttgtgccgcaagccattgaatccgatcaagaaaagattgtggctgagcttagtgacgttttgaaggtgagcgtagaggatattgagaaagagcttaatcagggttgggtgcagtctgatccaacgcagttcgttccgctaaaaagcgtaatggaatcagaggaagagcttattgctgaggctggtgaaattaccggcgttcagattaacgatacgactgaaaggatttatccttttggtgagagtgctgctcatttaacgggttatattcgacaaatgcagaaagaagatctcgagaagtatgcaggagagggctattccagctatgagagcattggaaaagctggcctggagcaagtgtatgaagacgagcttcatggtgtaacaggctggtcgattgaagtgaagggagcagatcctgagaaagtgatcgctagtaaggaaaaggttgatggtgagaacattcaggttacgattgatggagctgtccaacagaagttgtttgagcagcttggaaaagatccgggaaccgcggtggcgcttcatccaacaacgggtgagacgcttgcgttaacaagctcaccttcctataatccaaatgattttacacttgggtttgacgaaggtgagtatgcgaagttggctgataataaggacctcccattttcagctaagtttaataaaacgtattcacctggctcaacgattaagccgcttactgcttcgatcgcacttcgggatggtgatttagatccgaatgcagttgagaagattgaagatttaaggtggcagccagactcaagctggggtggatataaagttacgcgcgtgaagccggctgacccggaagtaacgctagaagaagcgcttatgcattcggacaatatttattttgcacgaaaagccctggatcttggcgctgaaaagttccagaaaggtttggaatcttttcagattggtcaggaagtcgagtttccttttccaactgaaaactcatcgatctcaaacggtggactaggtaataatgacattcttttagctgactctgcctatggacagggtgagctacaaatttccccttatcagctagccatgacatatacgacgtttgcgaatgatggcgtgatgctgaagccaacgcttcgaatgggagaagaaaaggcagctgaggagtttgaagtcatctcacctgaaattgcctcaattgtgagcgatgatcttgggaaggtagtttcggatcctgagggtaccgcttatgatccagtggtaaaaggcatttcgctcgctggtaagacaggaacggccgagttaaaggcggcgggcgaagaagaaggccctgaaaatggactttttgtcgcgtataacacggatgagaaggacttattgatcgcgatgatggttgaaggcgcctcaagtcacgatattacaggcaaagtgaaagaagttttcgtggaaatgcagtgatttctttggttgctgtggtggcgggaggatagctattcgctgtttattagccaaatttcggataaattggccaaaatgcggttttattgtccaaaattcagctatattgtccaaaaccagattttattggctaaacatacaaaagccctcgattcttaagtagaatcgagggctttttctggaaaagtaaggaactaaagagggattttcgactctcctatggaaagtagtaagaataagctagatttgatcgaaaggaggatgtcgaacgatgccacatcatgatctttgtatgattgatcgtaaaaaaggcttcacgcctgagattggtaggttagtgtcgatgatggattatgccagatacacaacagaagaggcaatcagaggtttaacaatcgagcagctggatattcaattagacgctaagagcaattccattggaatgcttctttatcatatgtcttcgatcgaaagagcatttcaaatcatgacgttcgaagagcgggaattaaatgacgcagagtggggtgaacttgggacgggcattgagcttggagacaaagcgagagcagtcattcaggggcgcgaccttgattattattggagtgagcttagtcttgttcgtgctaaaacgcttgatgatttaagagaaaaagacgatacctggctagaaaaagtaacgccatttggctgggatgaaaaggcgaatcactatttcaaatggttccatgtgatggaggatgaaattagccatcgaggccagatcctcatgataaaaagaagactaacgacttaaagggaaaacaagttgcataacagaaaacgaatgacaatacgagacaaagtcttaaggtgaaaaaaagaggagaataggaacatgtttacatatcaacttaacgaggatctttatttaagaatgtacacaattgatgatgcagaagcgctttatcacttgatcgatggttcaagagatcacttaaaaaagtggctcgcatgggtcgattacaatacagatgttgaggcgtcccgtgattttatccaaagtacgttaaaaggcgttagtgaaacaggtgggtatccgaaaacgctcggtatgttttataaaggggagcttgcgggaacagttgggtttaatgaagtgaatcaaacccatcaatacgctacgattggctattggctaagtgagaaattccaacgaaagggtattgtgactgaagcgtgccgagggatcattcatttagggtttaatgaaatgggattaaatcgaattgagatacgtgcggcatctgaaaataaaaaaagccgtgccatccctgaacgacttgggtttacgaaagaaggcgtgctcagacaggtggagattgtaaacggggaattctatgatcatgttgtctatagtatgctggcgagtgagtggttgaaaaaggatatctagctatacaaaaaaacatctccggcagtatcctctggagatgttatggtagctcgatcatatgaacgagtcgttctaattcttccattgtgcattcataaagctgtttgtcctttaatttatatacaccgcgatcgagtaaacgttgaatgaatgactgtttttgttggggatcatgttgcttcattaaatgtgacacgtttcattcctcctgttaagtatatccaggtaatatgttccactgtatggtccagttcaaacctctaaatcgcacatttcttaaaaggaattaagcgctttcgtagcgaatgcatgatgataatacgctaggagggatatagatggaaaaatacgctgttaaacaaggtgcagaaccattttattttgaaggaaacaaaataggcgttttagttctacacggttttactggttcaacgcaaagcatgcgttatctaggagagcaaatggcttcggaaggatatacggtgtgcggcccaaggttaaaaggccacggtacgcactatgaagagatggaacagagtacatatgaagagtggattcagtccgttgaagaaggctaccaatggttgaacgaacgttgtgattcccttttcatcaccgggctatcgatgggcggtacactaacgctttatttagctgaaaaatacaatgaagtaaaaggcattatgccgattaatgccgcaattgacttgcctgatctagaacaaatgagagggaaaacagagccgcgcttccttgatgcgattggttcggatattaaagcggaaggcgttgacgagctggcttatgagaaaacgccaacgaagtcgattcaagagattttgaagttagtagaggttacgcgaaaggatctatcgaacattacgatgccagcgttaatctttaaatcaattgaggatcatgtcgttcctcctcaaaattcaatgatcatctacgaggaaattgcttctgtgaagaaagaagtagtcgaattgaaagatagctatcacgtggcaacgcttgatcatgataaagatttaattgcagaaaaatgtaaggcatttataaaaggactcgtagcttaggaggttttaacatggaagtaagacagctaacagcaaatgatgcagaagcttattgggagcttcgattagaagcattaaagaaaaatcctgaagcgttcgcgtcaagttacgaagaggcgatcttaaaggatgacccgattaaaagcacagcgagaaacatggaatctggcactacttttggcgcttttgataacgagacgttaattggtgtgattacatttgtcagagggtctgggagcaaggttcggcacaaagccgatttatttgctgtctacgttacacctgaatatcgtggcaaaggggcaggcagagcgcttctatctggcgtaatggagtatgcaaagaaccaggatgcgcttcttaaattaagtgtatctgtcgtatcaacgaatgaacgagcaaagcacctgtacaagagctatggttttaaaaccgtttatattgaagagaaggctctctatgtgcaggggcagtttctgaacgaagagcatatggttcaatatttctaatcaaaagcagacgtctacgaggcgtctgctttttgattgatcaatccagaagttaacgtgttgagaaagtatcgctataaagggcaatgctgtaaggataaagttctgctgtcataatcccttctcgtacggcaggatcactgttcattagtgcttctgcctcatcttctgatgggacttgaatcacaacaattccgaaagcagtagggtcattgttttgggtacgtcctgccataatgagcgtatcatttttcaacaagagttgaagtgcgtgaaagtgctctgagataatgttattttctttgtcggtccagttgctttcttcaagtagttcaggaattaatgtgagcttgtatagaaattgtttcataagaaaaaacctccatttgttcttcctatttctcttttgaatgagcaaactccttcctaattaacttaagtaaaaagccgctgttgtcatttgagcacagcggctttttgatgcttcggtaacggaataaagcaaaaaagtgcacaactttctgttttttttaccgttgaaacgcttacagaccgcagtatagaataaaacacagacattaaaacgcatacatagcggtagggattactttgattccgcttacaaaaggagaggcaccaatgagtttctttacagtcggttcatttctattttttacaggtatggttgctgtcatctcatacctcgttactcgaaaagaagatttagcaacacaggacggttattttctaggaggaagaagtctcggtgcttgggttattgctggatcgttgatgctgacgaatctatcaaccgagcaattaataggtttgaatgcacagggatattcagacacgatcgccgtaatgggctgggaagtcggttctgccatttccctggtgattgtcgctttcttcttattgcctcgttatcttaaaggtggtatcaccacgattcctgattttctagaggagcgatatgattttggaacgaagcaaattgtgacgattctctttctctttggctacgtttttaacttgcttcctcctattctttattctggggccgttgcattaaacgggctatttaatattccagagacgttaggacttagtcggatggctagtctatatgtaaccgtttttgcgatcggaattatcggcgcaatttacgcgatcttcggcgggctaaaagccgtcgctgtatcggatacgatcaacggaattggtctactaattggtggtttaatgattccaattatcggactatatgttcttggtgacggctcggtttttggtgggtttaacacgattgtggaaaattctccagaaaaactaaattcagtcggagatgagaacagtcccgttccattcgggacgatgtttacagggatgcttctagtaaacttgttttattgggggactgctcagcacattatgcaacgtgcgattgcagcgaagaacttgaaggaagggcagaagggcgttttgattgcagcgttcttgaagctactaggacctgtttttcttattttacccggaattattgccttcaatatgtttggaccaggtcttgagccaactgatgcctatccgatgttagtaaatgaagtgttaccaaaaccgctagttggattttttgcggcagtgctatttggtgcgattctatcatcctttaactctgcactaaattcatccgttacgctaattgcgcttaacatttacaagccgtactttaatcctaaagccccagacaatgtggttgtgcgaaaagggaaatttgtggggataattctcgcaatctttgcgatgtgtatcgctccgttgattgataaagttcctcaaggattctttcaatacttacaaattgtgaacggtttctataacgtaccaatctttacaattctaatcgttggttatttaacgaaacgtgttccatcgattgcagctaaagtatctttgtttgtgtttatctcggtttacgcaacgactcagctcgtgtgggatacgggtattcatttcttgcatatccttggaattttgtttgtcgcttgtacgattctgatgcttgtcatcggaaaaattgcaccgcgcgataaagattttgttcttgaagaaaatgcacaagtcgatatgtcaccgtggaagcttctttatccggtaggcattgcagcaaccgtagcaatgattgtgatttatacgttgctttcgccgattggcatcatttcgtaatgttccattggatttccatttgatataataggaacaatgtcaaatggaatgaaggatgatgtgggatgagtaaggcaaatgagccaatcgaatcgctatatcatagcgtttacgaatcattagagaaactgcacaaagaagtaaacgagcaggaaatgaagctggatcttgtggacccagctgatatagagaagcttgaacgtacgcagttcgcactgcagctatcaaaagatgtgctagagaattttgtagcttcaggaaaaagtatgaccattaattatgacaaacgatcgattacaattgaagtttcaaagtagaagggaccgcttatgcggtccttttcgattacttctggagcaacaagtttgttcgatactttccaggtgaggtgcctgtcacctttttaaacactttattaaagtagttagcgtttttatacccaataagaagtgcaatatcctctgatgaatatttggtgttcactagaagttcttttgctttttttatccgaatgtccgttaagtactgaatcggcgtttggttcgtatattctttgaattgtctcgtgaaatgataacgcgacataccagaagaagcggccatttcatctggtccaatttcttcgctgtaatgattcatcgcatacatcgacgcttcaacaattgcctctggccaatcggaaagtcgcttttcaagattcgaacaatacgtatagagcatcattgtaaattgataggcataaccagatgcttgatgcgcgttggaaatttggcggtttgaggccatgtttaacaggttcaataagtataagaccggatcggagtcaggttggaaatgaatgatatgtccaatgtctttttggatgtcctcccaatattttttgacaacatccccgtataatgttaagtaaataaattcccagcggtcgctgtcttcaggtagataataccgatagttgccgggaatgttgacgataaatccctgcccgggcgttagctcatgacgttcatcctcaatatcgatacatccctttccggagatcgtgtattgaaaaatgaattttcctgtatccagccgattttttccatcccagtcatagagcgtcgtggtttgctcatcccaccccagtgaccagatttgagcaaggttttggagcatcggatctgagaaacgatacccgtaagacccatattgcgatggcttttcttccataataattctccttaataagcaaaatagtactgtttaatagagtagataggttagatgaattactttctaaatagcattttatcttatccaatgaaagaagtctaagcaataaaaggcataaatctttatttttttttaccattgaacagtgacttggatttttttaaactagatacgggaacgagaacggagaaatggaaacgttttcgaataggacgtggagggaaacagatgccagtattcattaatgaagaaattcttcagtttcatctgcaaggaaaagagcttagctatgtgtttcacgtaatgaaaaatgggcagctaggacaactttattttggtaaaaagatacgtgaccgctctgattttagccatctatcaaaaaaggaggcgagagtggcgtcttcttatgtgtatgaggacgatccaactttttcactagatttaataaaacaggaatatccggggtacggcacgtcagactatcgagagcccgcttttcaaatcgagcatccggatggaagtcgcatttcgaattttacttatcaatcgtatgaacttgtgaaaggaaagccacgtctatcaggtttacctgccacatatgtagaagatgaatcagaagcagatacgttagtgatccatttgcatgattcgtctatgaatctctctctttctttaatgtactcggtgtatcacgagcggaatgtcattatccgttctaccgcgtttacgaataaaggtgaacgtgatcatttgataaagcgagcacacagtgcttctgtggatttcccggatgcacattttaacatgatacagctctcaggttcgtggtcgagagagcgacatgttcatgaacgacgacttagcccgggtgtgcaaagcattcaaagtacgcgtggaacgagcagtgcgcagcacaacccgtttcttgctttaaagagaccgatgacaaccgaacatgcaggagaagtttatggatttagctttgtttatagcgggaatttccaggcgcaggttgaggtggatcattacgagacagcgagagtgacgatgggaattaatccatttgatttttcatgggtgctccaaagtggtgaaacatttcaaacgccagaagtcgtgatggcttattcagagcatgggttaaatggtcttagtcaaacgtatcatgatctttatcgatctcgtcttgctcgaggaaagtggcgtgatgcagaacgtcctgtgttaataaataattgggaagccacgtatttcgattttgatgaggaaaaattaataactatcgcgaaacaagcaaagaaaaccggtgtcgagctgtttgtgttagacgatgggtggttcggtaagcgaaatgacgatcggcgttctctcggtgactggtttgtggattcaactaagctcccaaaagggctatcaagtctcgcgtctaaaatgaataatctgggattaatgttcgggctctggtttgaacctgaaatggtatcgaaagaaagtgaactgtacaagaagcatccggagtgggtcattcaagtgcctggaagatcgaaatctgttgggcgccatcaacttgtgcttgatttttccaatcctaaagttgtcgatactatttatgagcagatggcaacgattttaaaagaagccaatattgattacgtgaaatgggatatgaatcggtatatgacggaagttggctccctttctttgctgaaaagtcatcaggcagaagtaccgcaccgttatatattaggggtatacgctttgtatgaacgtttaatcgaagccttcccacatgtgttgtttgaatcgtgtgccagtggtggagcgaggtttgatccagggatgctttactatgctcctcaagcctggacgagtgatgatacagatgctgttgaacgactgagcattcaatatggaacgtctatggtctatccaatcagcagtatgggcgcgcacgtttcagctgttccgaatcaccaagtaaagcggattacctcacttgagacaagggcaaatgtggcgtattttggcgcatttgggtatgagcttgacgtcacgaaaatgagtgatactgagcttaccacaatgacagagcaaatcaactggtataaagaaaaccgagcgcttctccagtacggaacgttttaccgcttaatcagtccattcgatggaaaaggcaatgtgacgagctggatgagtgtgtcagctgatcaaaagaaagcgatacttgggtattatcaagtactagctgagcccaatccagcgtttaagcgattgtatgtaaaaggactcgctccggaaaaagaatatgaagtaagtggctatgaaggaacgtattatggagacgagctaatgagcgctggcattcagttaccaggcgaatatgacggatcacaaactggtggactagaagaatcaggagatttttcttcttatatctttgtgatatcggagtataacgaacgataggggagaacaaatatgaaagaactgaaacaggcatttatcgaacagtttggagatgaaggggaaaaagcgctcttttttgcaccggggcgagtgaatttaatcggagaacataccgattataatggcggacacgtgtttccctgtgcgttaagtgttggcacgtatgccgtcgcacgaaagcgtgatgatcagaaagtccggttctattcgatgaactttcctgatcagggaatcattgaaacatcagtagactcccttttatataaggagcaagatgattgggcgaattatccgaaaggtgtgcttgctctttttcaaaaggcaggctacaccattccaaccggactagatctagcattctatggcaatattccaaacggagcggggttatcttcatcggcatcgattgagctagttacatcggttgtactgaaagatctttttggtctttcagttgatatggttgatatggtgaagctttctcaacgagcagagaacgaatttgttggcgtgaactgcggcattatggaccagtttgcgattggcatggggaaaaaagatcatgcgcttttacttaactgtgacacgcttgagtataagcaaacaccgattaagttagagagtcatgcgttgattattgcgaatacaaataagcgaagagggctggccgattccaaatacaatgaacgtcggactcagtgcgaagaggctctaaaatccttgcagcaagagcttacgattgacacgttaggtgatgtgacggaagagcagttcgatgcttatcagcatgtaattcgagatgaggaaacgaggaaacgtgctcgtcatgcggtttatgaaaatcgccgcacaatgaaagcagtagattttctgaatgaaggaaatgttgaagcttttggtcagctgatgaatgaatcccacgtttcactgcgtgatgattatgaagtaaccggaaaagaattagatgcgatggtagaagcctcctgggaagaaggggccgttgggtcaagaatgactggagctggatttggaggatgtacgattagcattgtgaaaaaagatcacatccagtcttttattgatcgtgttggagaaacatacaccaaaaaaactggtcttgtaggggatttctatgtcgttgaaataggcgatggtgctcataagctggaggacttcgcatgatctatctagaaatcgaacgacttgttcaatatggattgcaaaagcatatgatttcagaacttgatgttgattacgttcgaaatgctcttttttccctgtttgagctcgatggaacagagtcattgccttctccaccagaagagcaagtagacacgccaacggctattcttgaaaatatgcttgattatgctgtagcacagggattaattgaagaaaacacgataacagagcgcgatttgtttgatccaaagattatgaataccttcgttgcgcgtccgtccgaaatcgtgcgtacgttttacgattgctataagcacagcccgatcgctgctactaacttcttctaccagctatctaaggattcggattacattcgaacgaatcgcatcaggaaaaacgttcactggtatagtgaaacagaatacggtgatcttgaaatcacgattaatctctcaaagcctgagaaagatcctaaagcgatcgctgcagcgaaagcgaatacgtcttattcttatccaaaatgcttgctatgcaaggaaaatgtcgggtatggcggaagacttgatcatccagcacgcgatcaacatcggatgattccggttaaccttgaaggagagaattggtacctgcaatactccccttatgtttactacaatgagcatgcgattatcttatctgaacaccatcgtccgatgacgatttcgaaagacggatttgagcgactgcttcattttaccgagcagtttccgcattactttatcggctccaatgcagaccttccaattgttggaggatcgattttaagtcacgatcatttccagggaggttatcatgagtttccaatggcgaaagctgagattcaagagaaagttcagctcaatcaatattccgatgtaacggtaggtattgtgaactggccgatgtctgttattcgattacgaggaaaggaccggaagcgactaactgaacttgcacatgtgattctagtgtcgtggcggggatatagcgatcgtgaagttgatctaatagccgaatcaaacggcgaacctcataatacaatcacaccaatcgcaagaaaacgtgatgagcagtttgagcttgatctcgtattacgaaataacagaacgaacgaagcgcatccgatgggcatcttccatccgcatgaggaagttcatcatattaagaaagagaacatcggtttaatcgaagtgatgggacttgccgttctacctggaaggcttgtcgatgagatggaaatgcttgcatcttatatcgaaaaagaacagcttgatgatgcacaacagaatgaactggttgcaaagcacgtaccctgggcgaaaaaaaagatcgttgaaaaatacggtagaattgaaaaggaacagatacagaacgtactgagagatgaaattggtttaagattttcgagcgttttagaacacgctggcgtttttaaacgagatgaagagggaaaaaaggcgttcctacgctttttgaaccaaatcaactaaaggataaagtcgctacccgataaggggagcggctttattatgttatggttaagaaagtgaccgttgggccaattctggttcatattcgtgattttgtatataatgaaacctgatacgaacgaaatgatttcgctacttacaggaaatgggaggggaagcggagtggatgaactactatatttaagcgttttcctcatttataccattgccattcttatactaggaaagcatggttttgataaaacggatgaattgaaagggtactttctagcaggaagaaaccttcctttgtttccgagcgtggcttccttctgtgcaacctggtttagtgcagcctctcttcttggtttaccaggtttgatttatgaaggtggaatttcggtcatttggacgactgccgttgcctggttacttggcattatagggctatttttcctagcctctaaactttatacatataacgttgtaactgttccagaattttttctcattcgctatgattcaaagcttcttcaaatttgggttggcatcattctgagcgtaagttaccttctttatgtagtgatccaaattcgaggattcggaattgttgtaagtcaaatgcttgaaattccttatacagttagtgtgtttttaatatatctttttgttctctatacgacgtttggtggcctccattcggtagcccgaactgatatttttcacttttgcttaatcctcttcggtaccatcttaggcgccgtctttattgtaggtgaaattggagggcttggggaactcgtgagtggtctttcagctttagatcaaagtggatccacatcttatttgtcgctgtttcctgaaggtggcttatcgttctgggcgttgttaagtgcgttcttttcgctcggaattggcgttgcggcgaatcctcaatatgccgttcggattctttccgcccgttccaaacaaattgcgctaaaaatggttggcgcaagtaccgcttttctcgtgctcatttatttttctatttttgtcattggaataggatctcgcgtgcttgatcctaacgttccattcactagtacggatgaaatctatccattcattatcacttatttacttgaaacaccgttaaaaggcgtgttgttaattagcgttgtcgcagctgcgatttccacagcgaactcgcagctattgatcatggcgacgagctttgtgtatgatatcacgcttccgatacgaaataagaatgcagccgatctaaaagtgatttcctggacgaggtggatgatttttatctttgccaccttttctcttgtgattgcctttacgccaccacaggggattgtgccatttagtggacacatttggggaattattgccgtgtccttgttctttccgctatatggaggtctttatacgaacgtccatcatcgtcatgcgcttctttcaacatttggaggagtgatcacgtatgtactggcttttctgcttattccgaatgagctgcagccagtgtttcatcctgttctcccttcgcttgtagttgcaggcattcttttctttctaaaaggaagggggcgatcagatgcgtcactccattgaacgaaaaatattagtgcccttcttaattattgtactcgtgccgatttttattattggtgctgtctctatgtggtcaagttatcagtcagaaaaacagttaaagcaggcgacggttcaggaacacttaacgagtcttggtcggtatgcggcgaagcttgatgatcgtgtgcaaagtgggagtatggacgaagatgaagccaaatcattgatcaaaatcatgatcaatgaaacgaaaggtttgtacgtagaagaagcggatggcacgctttcgtctgaaggagaagtcgttcaaccaagtacacttgattggtacaatggtgagtcaaacacgagcttttttactgagagcacggtactcacagaacaaatcgagcagtggaactggacgctttaccaaccaatgtccttttccttttattcaggttctcttccaaatattcaaaaatatacccttctcatcagcatttttactggggtaattgcggtgcaaattacgattattctttcttaccacctttcaaaaccgattaagaatttagcggcattttgtaagcaaattgcgttaggagaaagaacgaagaacatcgagatgaatgaaaatcgaaaagacgaaatcggcgtactttcctcatctttgaaagaaatggtcgaaacgcttgatgagcgtaatgtgcaaattgataaaattaaaaagctgaatgagacgatattaaatagcgttcacgttggcatggtgctcgttattgaaggagccaattccgtttataatgaagctgcacagacgatgatgaaagaagatccgctattaaaagaacggcttgggaagttaacgattcatgaaacgaaaagaagaagcgaagaaatttgggatcataagcggaaggaagagaaagtgttctatgccgtaagttacaaagtattgggcacctcagagaagcaacgttcgattattacgtttgaagatattacgcatcgacgaaaattagagcagcgagtggagcgaatgtcgcgtcttgcctcattaggtgagatggcttctggtattgcccacgaaattcgaaacccactcgcaggcattaaaacaacgacggaattattaacacgcaggctcgagctaacgaaggatcagcttacattaacggaaaatatgctgctggacattgaccgtgtgaataagatcattactaatattctgcagttttcaaggccgatggaaacaaatccttctgtattaaaagtagatgaaacactccattctctcgtgttactcatgaaaacgatcgcgaatgaaaaaaatgtggttcttcatcatttcgaaaacgatacggaaattttcgtggatcgtgatcacatcaggcagattctgctaaatcttatcctgaatgggatgaacgcgatgccagatgggggcgaactgattctttcaagctaccaaagggatcgtgacgtaacgattatgatagctgacacgggtgtaggaatggaggatactgtgatggaaaagatttttgatccattttatacaacgcgtgcagaaggaactggacttgggttgtcaattgttcatcagttagtcgttcaaaacaatggagaaattgatgtaaagagtatacgtggaaaaggaacggagttttcgatcacatttccaacaggaagggaggaaaaataaatggctgtaaaagtaggcattattgacgatgaaacaacgcttcggctcacgctgcagatgtttctagaagacgaaggatacgatgtgagagcggcagcaacgcttgaagaaggatggcgcatgcttgatgaattcagtccgcacgtgcttctattagatattcgcctacctgatggaaacggactcgactcgctacatgaatttagagaacgctatccagaaatggctgtgatgatgttaacggcctatggcgatgcgaaaacagccgttcgctcgattaaagaaggcgcttttgattatttaacgaagccatttgagttagaagagctgaaaatcacgcttcagaaatggattaaacagcaccatcttgagaaggaagtcgagcgttaccgagaggaagagcgacgaacgaaacttgttcaaatgatcggtgaaagtaagcaaatgcacgagttaaaagataaaatttctttaatctctgaaagtaatgatacgacggttttagttcgaggcgagacaggtacggggaaagagcttgttgcaagaagtattcatcagcaaagtaagcgtcatgaaggaccgtttgttgccgtgaattgtgccagcattccagcggacttaattgaaattgagcttttcggtcgagaaaaaaatagcgtaacagtacaagtgaatccgaaagttggcttaatggagtgggctgatggagggacattgtttcttgatgaaattggagatctttcactcgatattcaagtaaagcttcttcgttttcttgaagataagaaaatcaaacgtcttggaagtgttcacgatattgaggttgatgtacgcgtcattgccgccaccaatcgatcgctcgaggaaatgattcaagagaagacgtttcgatccgatctctactatcgcttgaatgtcgttccagtaaagttaacgcctttgcgcgagcgaggcgatgatattgtgatgctaacagaacattttcttcatgagttctgtcagcaaatgagaaaggaaaaaccagcattacgagctgatgcgaaaaagcgtttagtgagctacaattggcccggaaatgtcagggaactgaaaaatacgattgaacgaatcgcgattcttcaccaggaaaaagagttagcagcttatcactttgattttctaaacccggttgaaggatacgtagagggttctaaatcagttgacgacgtcgtcttcgatgatcgcttttcattagaggatcatattgaagcgattgaaaagaaatacatcgagaaagccattcaagatgcgaggtggaatatcacgcaggctagtaagttattagggatgagccgctatgcccttcaacgtagaattgataaatatgatatcacatgagcgaaatcgcccgaaatgggcggtttttttgtgcggaatcttataaaattatctgaaaattacgtgatatcgtagaggtaagagaaaaaacgcatcgattcaagtaaagaatgaatcatatagaaaaagggggaatttgatgggtattgaaaagcaaaagccaacagagttagaaggcggtccaacgaaaagcaaatggggcgttatcctcggtgccgccttcttaatgggctcatctgcaatcggaccaggctttttaacacaaacggctgtctttactgagcagctactcgcaagctttggatttgttattttaatgtcaattattttagatattggggttcaagcgaacatctggcggattattgccgtttctaaaaaaaagggacaagacatcgcgaacatggtcgtacctggactcggttattttctcgcattcgcggtagcacttggcggacttgcctttaatatcggtaacgttggcggtgctggacttggtatgaacgtgctctttggcattgatccacggattggcgcagcgattaccggcgtgattacaatcggaattttcctttcgaaagaagcaggggtagcgatggataaaatcgcacgaatcctcggtggaattatgattcttcttacattgtacgttgcatttcaaagtaacccaccagtcggcgatgcgattgtgcatacattcgcaccagataaaatcgatgtctttgcgatcattacactagtaggtggaacagtaggtggctacattacgtttgctggtgggcaccgcttacttgatgcaggtatttcggggaaagaaaatttacaccaggtaacgaaaagctctgtctcaggcattctaattgcgtcgattatgcgcgtctttttattcctagcggtgttaggtgttgtggcaacagggtttaaactagaccctgcaaacccaccagcatctgttttccaacaagcagctggagctgtcggctataaaatgtttggagtcgttctttgggcagcaggaattacgtcagtcgttggtgcggcgtatacatccgtttcattccttagaacgttatccaaaaaagtcgatcgtcatcactcaggtgtaacgattggttttatcgccgtatcaacaatcattttcgcatttatcggtaagccggttctgttactgatccttgccggagcttttaatggattgattttgcctgttgctcttggaacgcttttggtagcagcttataagaaatccattgtcggagactacaaacacccactatggctcacgatctttggcgggtttgttttccttattactgcctatctcgccatcgtgacgcttattgataaagtgccacagcttttttcttaattgttaggaggaacatgtgtgaaacttgattattatcctcttggtgatacaggcattcagcttgtatttggtaccgagatttcagaagaaacaaatcagaaaatcagaatgtttgcagacgagttagcgcaacatccgattgacggaattgtggaatgggtaccggcgtataccacgttaacgatctattatctgccgaataaaatttcttatcatacgttaaaagaaaagctggaagaaatgaacgcacaacaacatggaagagaagcagaagctgcttctcttgtttatatcatccctacttattatggtggctcagatttagcgtatgtagcggagcataatggattgagtgaggaagaagtggtctcgattcacgccaataaagattacctgatctacatgatgggctttgttcctggatttccttatctaggtgggatgcctgaagaaattgcgactccgagacgtgaaaatccacgtgccgaaatcgagccaggatccgttggtattgctggagcacaaacagggatttacccgcttgaatcaccaggaggctggcaaattattggacaaacccctgtgaagctatatgacccaacaggagagcgaccgattttgctcgagtcaggtcattatttgcggtttgtttttgttagtaaagaagagtttatcacgataaaagaagcgatcaaacgtggagagtatgaagtcgaaaccgaagaaaagaaggtgagcgttcatgaaatcggttgatttaaatagcgatttaggagaaagctttggagcttataagattggtaacgatgagaatgtactaggatttatttcatcagcgaacattgcctgcggttatcatgcaggcgaccataatgtgatgatgaagacagtggcactagcaaatgagcttggcgttagtattggtgcacatccgggatttcctgacctcgggggtttcggcaggcgtgagatgaagctaccgcctgatgaggttttcaaccttgttgcttatcagattggggcaattcagggtgttgcgaatgttcaccaaacaaaagttcaccacgtgaaaccacacggggcactttataatctggcagcgaaagatccagccattgcaaaagcgattgcaaacgctgtctacgcagttaaccctgagcttatcctctatggtttagcgggaagtgaattgattaaggcaggtagagagcgtggactaacggttgcacaggaagttttcgcagatcgcacgtatcagcctgacggtactctgacaccgcgctctgaaccgaacgccatgattcacaatgctgatcaagcggttgagcgtgtcattcgcatgatcaatgagcagcaggtgaaagcagtgaatggagaagatattgccattcaagcagacacgatttgcgtacatggcgatgagcccgaagcgctgcagtttgttcaggagttaagggagcgccttatgaatgaaggaattcgtattcaacgggttggagtgaatacccatgtctaaaccaatctttaaagtacgaaaatctggattgctttcgacaatccaggatagtggaagaaaaggctaccaacaatacgggattgttgtatccggtgcaatggatcctttttcaatgaacgtggcaaacttcctcgtaggaaacaaaggaaatgaagccgttcttgaaattaccgtgatggggccagcttttgatgtgcttggtgatgctgtgattgccatttgcggtggcaacctttcacccaaagtgaatggagaaaaagcgccaatgtggaaaagttttactgtgaaggaaggcgatcggcttgagtttggtcagcctctcgctggtgctcgttcgtatattagtgtcgcaggtggttatgatgtaccgattgtgatgggaagtaagtcgacatatttgaaagcaggaattggtggagtcgaaggacgagcgcttgaaaaaggcgatgtgcttcatacgaccggaaggttaaagggaataagtgggcgtgccctccatccggatgaagttccctcttataaaaaagaattaaccatacgtgttgtactaggaccgcacgagcattcatttacggaagaaggtattcaaacattcctttcaacgccatatgaggtaacccctcagtccgatcgaatgggctttcgcttaaaaggggaaaaggtggagcacgcaacgtcggctgatattatttcggaagcgatcccgcttggtgggattcaggttccagcaaacggcgatccgattattctaatgtcagaccgccaaacaacaggcggctatacgcgcattgcaacggtgacctcaagtgatattccgtacttagcgcaagcgatgccaggttgtacgatccattttcgtgaagtaaccgtggagcaagcgcagggagtgtatgaaacgaatgatcgttttcttcgaacgttagaaaaagtatctgtgagataaagggaggacacagcatgttaagttcaaaagaaatcattgagattattaaatatgtagatggatcaacagtcgatgaagtgcattacgagcatgatagctttgtcgttaaggtgaaaaatcagaatccggagagtgagaaaagcgaaccgcaggaagcccaggttccaaccgctgttgctgagcgaggacaagaggatctaactcctgagccggaggcgccgcaggagacacctgaaacacatacggttaaagcccctatggttggcatgttctattcctccccttctccggatgatccagcttttattcaagtaggagatgcggttaaggaagaaacggtcgtttgttgtctggaagcgatgaaaatgtttaatgatgtgcaggcagatgtgaacggtgaaatcactgaaattttagtagaaaacggagatcttgttgaatttggccaaccgctctttactgtaaaaccagaataggagggaatcagatggggatcaaaaaagtactaatcgcaaatcgcggcgaaattgctgtacgcattattcgcgcctgtcacgagctggatttaactgccgtggccgtctattctgaagcggattgtgatgccttgcatgtgcaattagcagatgaaggttattgtatcggcccaacatcttctagcgatagctacttaaacgtaggaaatattatgacggttgctacgaatagtggcgttgatgctattcatcctggctatgggtttcttgcagaaaatgcggattttgctgagatgtgtgaagactgtaacattgcttttatcggtccaagcaaagaatcgattcgtcaaatgggaatcaaggatgttgcaagaaagacaatgcaagatgcgaacgttccggtcgttccaggttcgaatggcattatttcaagtaaggaagaagcacttgaactggctcatgaaatgggatacccagtcattattaaagcaacagcaggcggtggcggtaaagggattcgtgttgtaagagaagaagaagaattaattaaagcgattaacatgacccagcaggaagcggaaaaggcattcggcaaccctggggtgtatatggaaaagtttatcgaagactttaggcatattgaaattcaagttctcgcggatctttatggtaacgtgattcatctaggtgagcgcgactgctccattcaaagacggatgcaaaagcttgtggaagaaacaccctctcctgccttaacggcatcgatacgatctgacatgggggaagccgctgttcgagcagcgaaggcggtgaactatgctggtgccggaacagtcgaatttatttatgaccaggatggaaactattattttatggaaatgaatacacgtattcaggtggaacatcctgtaacggaaatggtgaccggtgttgatttgattaaagaacaaatcaaaatcgccgatcgtgagcgactatccctcacacaagaggaagtcagcttaagcggttgggcgatcgagtgtcgcattaacgcggaagatccggataatggctttatgccttcacctggaaaagtcgaaacgtatcttccaccaggtggatttggcgttcgagttgattcagccgtttatccaggatatgtgatcccgccattctacgattcgatggtagcgaagctgattacatacggcgcaactcgaacagaagcgatgcagcgcatgaagcgtgcgctcagtgaatttaaggttgatggtgtaaaaaccacgattccatttcatcagagattattcaatcatgagaagtttgtagaaggcgattttaacacaaagtttcttgaaatctatgaacttaaggagatggtgtaatggtaacccctcaaacacagcgactgaaatatcgcgatcatcttgagagtggcacaacatcagggatatgtgatggttacttacaggcgaatatgattacactcccttcaaagtacgctttcgagtttcacttgttttgtcagcgcaatccgaagccctgtccgatcgttgacgtccttgaagcagggcaggttaagcctcgcattgccgatgcagatattcgaacggatcttccgaaataccgtatttacaaaaacggagagttggagaaggagccacttgatcttaaggacgtctggcaagatgactttgtcacgtttctattaggatgtagctttacgttcgaaaaagcgcttgttgaatgcggcattagcttactacatcaggaaatggatcttgttgtgccgatgtatcaaacaagtattccttgtgaagaagcgggtcagtttaacgggaatatggtcgtcagcatgagagcgatacgaaaagaagaacttgatgaaacaattgcgatcacatcaaagtttccccatgcgcacggtgctccgatccacgttggtcatccatctgaaattggaattaaacagattgaaaaaccggattacggagaattcaccccttatgatgaagaagaacgcatcccggtattctgggcgtgtggggtgacgcctcagtatgttggtttgaacgtaaaaccagagatcatgatcacgcatgcgccagggcatatgttgattacggatcaaaaagaataggatgtgaaaaccgttcaatcaagcacctcacgtttgattgaacggttttttctgtagagattaagcacttatagacgtatgatagaatgaacacgcataatcgtgttggtatgagtaggaggaaggtagaccatgacaatcgttagcttcttacttattgggtggattttaagttggtttaagtttgagcaactgtttattcaagcgtttcaagagctttttaataagaagatcacaaaagcaagttattattttaccttcttttgtatcggtgcaattggagacatcgtactgctgttgaatgggacgttttatgataagttgtaaacgttaaaaagtttttggatcaccccttatatgtaatcttttaaaagtggctgaagatgttttcatctttagccttttttgtattaattggaaattcgtgatcaaaaacagatgacaaaacctcttagaagtgaaaaaatgtaaatagatgcatagctgaaaagagaggctttaatggaaaaatcaaatcgactgtcagtgcttttatttagtttgatgctattgagtttaggcgttctggcttactccgtgtattggaatgatacctatccatatgttacagaagtgattattgggtgtttagcttacctttttctgtccattctttacttcatttttatggcgatttggaatacgagaaagctgcacaagtacgaacggaaggagcgagtcggtacgttcatcaaatggttaggcggcctgagcgcgattcatgtggtcgtctcattgctcacttcctccagtatgaacggatatcaattgtttacttcctttgggttagcggcgggtattgcatttattgatatgatttttcacaagaagaggtctttctaaatcaggtgatatcggcgcaatcgattattgggttgctcctccgttttggaagaaagggattggaacgaaagctgctcaacaagctgtaagctttggcaggaatgagttaggctataaaacatttgaaacgtgttgtcttattgaaaatagagggtctgctaggatacttgagaagatcgaatttcagaaagggaaggaatttcaaattggaagcggagaaaagcatgaagggaaaatggcgaggatgtatgatttgaattgagagggatggaaaaagagtttctttttaatgtcggtattttaaatgaagatatagacagtaatcttccataatagggcaggattgtggaagactcagtttcgagataataaggatagatgtaccaatttttttatttgaacaaataaaaaatgaacgagcagggaattttcttgtttaatattgtataattcagaagaaagtaaaatttaccgttaccctgatcgaattaaggtaatgtagacaaaaatttggaggagttctctagtgaaattcacagaacggtgaatattcttttatttctgttttattaagaagcaatggtcaagaaattaactatccaagtcttgattcgaacgggggtaataaattggttcatgtgactaactttgaggagagactagctcaggatttgataattacataataagtttggttagcaattactcatactgggagaatttttgaaaaaggcgcatcggattggggggtagatttgcttctaagtaatatacctgcttcgataataagcgcttatatatttgattttttcaaagaaagaattcagaaaaagctgaagtgaggattaatggtagttttgataaaaagtatgtactaggtaggtatagctgtacaattaagtgaagttagcataaatgacttaaaataattaagtcatattacaacgaacacgatggaactacattttattttgttactagtagatatgtagatgtcaaaatcactctcaataattcaaacgaagtcatcaattatagtttagacaagaaaactcaattgaatatttaaactgcttcagcgactgataaccacgagcaaatgggatggataattttaggtgacagcaaagaccaattttcagataaaattaacggatttatttatgaggtttttgttctagaagcattcagattctccaaggagggagcattatgatattaaagtctaaaaacaggaaagttcacgtgtttttattgtttgtaacagcagctctggtatttgcctctatttcagtacttccgttgcagataaaagcaaatgcaaaagataatgatgcttacgcagaggtacacagcaatcgaaaattcagtcaactcgaaagcaagtttgatgctaggctcggtgtctacgccatcgacactggaacggggcgaacggtcgcttatcgacctgatgaacgatttgcttacgcttctacatacaaggctctcgccgcaggcgcaatcctgcagcagaactcaattagtgaactcaacaaagtcatcacttatacgagcaaagacttggtcacatattcgcccatcacaaaaatgcacgtagataccggaatgactctaagggaactgtgtgcagctgctatccgctacagtgataacaccgcagggaacctattattgcaagagctgggcggacctagtggattcgaaaatgcactgaagcagatcggcgataacgttacccaacctagacgcttcgagacggatctgaatgaagctatccccggagatatccgtgacacaagtacacctagaacacttgctactgatctccaagctttcacgattagcaaaaacgtgctcccgattaaaaaacgtacaatcctaaccaattggctacgaacgaacaccaccggagacaaactcattcgtgcaggcgtacctaaaatctggaaggttggcgataagagcggtgccggaggctatggaacccgtaatgacattgccattgtgtggccaccaaacagagctcctattgtcatggcgattctatctagtcgagataaaaagaatgttacctataatgatgcgcttatagctaaagcagctaaggttacaatcaaagcgcttaagtgaataaccgtaatggagtaccgcaacgcataactagttatgagttatattaaacatgaaagggagaaatttttatatggaacagcttgaattacagttgtatgattataatgaatgggcaaataaacaaattttcaaccgactaaaagagcttccaaaagatgtttatcgtcaagaaatgcaaagtgtatttacatcgatatctaacgtattagctcatgtttatctttctgatcttggatggatagaggttttctctggtaaaagtatgaactatgcattagagttggctgcccaacaaaaaggagaagcagagtcaaaaggaatagatgaattggaagcaatgttttttaagatatcagaaagatataagttattccttagacaaaaggggaatttagccaaacctcttgaaattgagaatccatccggagctttaatgaaaactagtgtgtcagagctagtgactcatgttgtgaatcatggaacatatcaccgtggtaatattacagctatgttaagacaaatgggttatgtttctgttgggacagattatggtctttatttgtttttaagagaaagggagaatgactaagacgccgtatcaaaaataaagtttataatccaacaaaggaaatacatagtaagctctaaaaacagttccataatccggcgctttaatggcgcaataaaaagcctaatttttcaacttaatgctgagaaattaggctattaatattaaaattctcttaacgttgtaaaaccgcattttcctgactttaccccataccgattctgtttaggtttaaggagatggggttatggaaattattatccagtctaaaaatcagggtattgaattttaaattcctattgaacaatctcggagcttatctgtaataagataggctctttttaatgtgaaataaaagattgagttgttttcaataatttgaaacaattggcactaaagatatggacaggattgttgaacagtaagcaatgaacaataagggggtaaaaaatggagtgggacactttgcctaattggttttgggtaatatattacttgtttttattaacaacattagtaacaactatatacagcgctgtgaaaagaaaaatgaaaggtttgtcaatcgtagccattctgttcactgttacagttccaataattgtcctcctaaatagtattggtagaacagaaggcatgaatgagtttgaacatttagttagtaaattacaacaaggtgctttatggtcatatttcacaagtattggttatttgtttctgttattatggtgggttttgttcatattcaaaagcagagtaaactccacttcttattaaattaattcggagctaatgttgaaacaatggttggttaccttttctaattatatagacgaacataatggactaacggagctggttaatataagaaggtcagggttcctatagtaaaattatataaaaacatcacaggagagatagtagatgaaaggaatatatgaatttataagtgaagcacagttaacaaagtatgcagaacttgctgtacgagctggtgtaaatctgcaaaaaaatcaattattgattattcatagtgatatacaaaatgctacgtttgcacggttgatccaagcggtagcctacgaggcaggagcttcaaatgtatttatagattggacagatgaacagtctaccaaagaattttacttaaatgcagcagatagtgtcatcgatcactttccggattggcaggctgcccgttttaaggaatgggacaatgcaggtgcagcttacatacatattatttctgaaaacttagaagtctttaaggaggtttctaaagaaaggataaatcgttttcaaaaagcctctcgtacaaaattgagggattattatgcgaaaattagatctcacgaggtacgctggtgtcttctagctgtcccgagcgttgaatgggcaacaaaagtattccctaacctaagtaaagaagaagctttacgatcattgtgggaattaattttaaaagcgtctcgtgcagatgggaaaaaccctataaaaggttgggagactcacaatagagctttcgaatctcgaaaaatgatcctaaacgaaagccaatttgaatctctgcattttacaaatagatacggaactgatttatcagttggtctgcctaaaaatcatctctatatcggtgggggagtcatagataaaaacggaacaccgttctttccgaacattcctacggaagaaatatttactgctccccataagtataaggtgaatggcaaattggtaggtactaagcctcttatctatggaggaagtgtcatcgatgaattttatctgatttttaataatgggcggattatcgattattatgctgccaagggacaggaagtgttacaaaatctcatcgaaacagatgaaggatcacattatctaggtgaaattgccttggtctctaataaatctcctcttgctcagtcggatactctttttttcaataccttgtttgatgaaaatacgtcctgtcatattggaatcggaaatgcatctccctccaatattcaaaatgggattgaacaatctgaggaagagttgaaggcggagggtctaaatacttcacttttgttagtcaatgtgacctttggtaccgaagatatgaaagtagtgggcattaaagaaggtgaaacggaagttctgctaatgaaggatggggatttccaattctaatacgtctacaacttaaaatagagaaaactgattactggtggattatacctagtgctagacatagtgaaaacaaactggtgcattagaaaaaaatctgtatcaatatctcgaaatcaagtcttccatataatcggagcgattaaagaataaatatttagtttaaggagggaagtatggaactaatatttgtacgccatggtcaatcacaacacacattagatacacctaatagtttacagatgaaaaatccttccttaacgaaagaaggaaaaaagcaagcatatttattaagagatatttttcatctaaaaagtgaagacacgctcattattagtcctactcaaagaacgttagagactgctcagttatggaaaggaagcgcggaagttaaaaccattgttagtcccatggcatctccaagaatgtttccgcaaaaaaaagaatggtggacgcttccttgtgacgtaataatgaaacgggagaacattgaaaaggcgtttcctgcatttaatttggatcttaactgttctgaagagatttggaaagatggtataaatactttgccagaaaaagagtttcgaattattggagaagcatttttgagatggtgtaaacaagaaaagagtgggaatgtttacgtcgtgtctcacgatggaacgatcacgtcatatcgtcagttaacctcaaaacgtttacttactagagatgactttcctaaggatgctggttggataaaagttcagtattaaacaatctcggagcgatcctgtaatatcaaagcagcgtaatgttcaagaacgatactcattaatcagacgtaattccgcactaaggaattacgtctttttttcaaaaagaggttgagtaagtgatttggttttgaaataattggaattgattagtagtagtttaatcgaataatatcacttgaattgcttatgaaattaccatacaaattactaaagtagaaaggtgtattctaatggaaaaaattaagcagactttctatctggaaattaaagagattataaaaagtgaaaaaataaatgttccaacgtttgcctattcagtattggatggctatattaagggcgaagtttatacagagtctaccttatccaacacaatactaatagaaacacagaatggaatatattttgtatgtggaagtgaaaaaaatgaaggtttcaaccaggatcttattaacttatatcgagagaagaaaagtgacaacctaagattcactttatttagttcctgtgaaaaatggaattcgataattaatcgcctacttaacaatgaaatcaaacatttaagacggtatagctataaatttggagaaggaaatgaactatcaggttgacacagccttgaaaataatattaggccaagttgggactgtgatgtttctaataactcatcaataaatttagcagaaaaattaggatttaacgacccggttgagtattctatttttgtttaagaaagccaatctcattgttcatcaatctcggagcaaatcaagagtaacttataagtgaattaatagggggcgggggagtttaagcatggatcaattatatctctcattaaagaaagctggtttgatatttaaggataatagtgagcgtggaaaagttgattttattcttcttgaaacctcggaagactgaacgacaaattcagtagatgtgattactttcgaaacacttttcggtgatgtaaaaacaaacccaacttatgaagctctgtcagggtcgcatacctttaagattaaggataagcaatataccatgacagccactgaaatgggctatcaaaagtattttgatcaatggtttgcgcaagggttatttaattaactaattatgtagcagcatatcttcaacaatctcggagcgattgttcaatagagcattagccctttattacataagcacaagtagtatcagtggtttaacctatttaactgacagagcagtaatcattaataagtaatatgggttataatttaagtgaatatatatggaggtatagcaatgtgggcaatattaggggtcattgccatagtagtaactgttataaacctttctttgtatgtagcaggaaaggattataagcttgctatggcgatggcattatcatttacagcattaacaatttgtgcagattacagttatctaaatcggtggataaaagcagaagattgggcggctttatcggatgtagtacctggtatggcaagggcattttggtttttgacaattgtttctatcttactaaatataacacctatatttttagaacgaatacgtaagaaataatgacttaatatcacatcatttattcaatattcaactattgtgtaagtctttatgtataactaaaggggctaaagtacaagaacagtaagagatatctcgaatccgagtcttacgtaaactcggagcgagtatagatgattttagagaaattccaaattaaactaagaaacaaaaagatagcagggagtggcaatgcattattctttttataacgattttagagtgtcgaaaagaggtgtgacctatgatattagtgagttcctgtttagctgggttagaagtaaggtatgacggtcaacatagtttaaataaaaaagttagaaaattagtagaagagaataatgccgtaacaatctgtccagaattgcttgggggatttttaactccaagagaacctgcggaaatagtaggtggggatggaggagacgtcttagatggtaaagcgcgagtcattgaaagatctggaagagatgtaaccgaactatacataaaaggtgcctataataccttagataaagcgatagaaatatgtgcaaccattgttgttctaaaggagaatagtccatcttgtggtagttcaatgatttataatggagaattcacaggagaaagagttgggggtaacggggttacttcagcattattaaaaagaaatggattaagagtcatttcagaaaagcagtttgcagaagactcattctagagtatttcaactagtaccagtctccaacaatctcggagcgtttgtttattaagtaagtgctctgtaggtttagagaaggtacttgaactaagataaaaacaaaattcatagtgttgtacttgctgttataaaatgtaataatattgaaaaatctataggaggtttttttatgaaaataaaatctatttctactcttgtattagtgggagtttttgcactttcagtaggcagtttgaaagatcttcaaagtaccgaagtattggcacaaaacgatcgacctaaagtagaagctgtacaagcattcagtaatgaaggcgatgttataagagttgtaacagcagaagaacaaaatatgatagagagttcagcagtatcatcaggatttttacaacaaggaaatggaacaggtgtattttttgaaaaggtcaagtaaaccgtaataagataggcttctttttaattaaatggctatgttaaagttttaatgtgatacttcacaaaaaataggaacttccagttttatggaagttccgctgtggtatattttgcttgttaactaaagcaataggttaattaagtggggatatcattttctttcaatcactgaagatatccttctcccagtcaaattcccctaatccttccgttcgtggaaaaaagaaatgttagatattgaactttgttaacctaagtgtatcataagttttttgagtagtattttcaatctacagagccaaagagaggttgtcactctctttattttaacttcgtgtataatcttagttttacgaaaatatagatcatcctccccagcaatgaaataatacatacagcaagcccccacactctagagtgtgggggcttggatcattttattttaattggaggggaaggagttatggaaacttcttgtagtaaagaaaacgtaatgaaaataataaaagaccaataatgttgagcaaataaggtaatcttagtcgagttggaaaatcttataaaaaaattactcaataaatatttattgaaaaacgataaaaatttatttaaaatgaatataatgataaagaatcgaggtgctttttatgaaaaaagtaacaacattgtttttaaaaatagctgtgattctattgggagtccccgttcttgctctgtgcatctttttggtgcccgagatagcggatctttcagcagaattgtttcccgagttcattttaataaaagttttcgtctacatcgttttcgatggatcagcgatccctttttactttgctttgtatcaggctttcaaactcttacactatattgataaaaataaagctttctctgatttatctgtaaaagctttaaagaaaatcaaatactgtgcgataaccatcagtattttgcatgtattagccttgcctatgttctatctctttgctgaagtagacgatgcaccaggcgttgtcattgtcggtttggttgttccatttgcttcaatggtcatcgcagtttttgatgctgttctccaaaaacttttgcaagaagcaatttttatcaaatcagaaaatgacttaacggtctgaggtaaaaattatggcgattatcattaatgttgatgtgatgctggctaaaagaaaaatgagtgtaacggaactttctcagaaggttggaataacgatggcgaacctatcgatattgaaaaatggaaaggcaaaagcggttcggttatctactttagaagcaatttgtaaggctttagaatgtcagcccggcgatgttttggaataccgaagtgatgaagatcgttaagcatgggatgaaaaacgtaatctaattattcttagggaggtatgatgatgagttgtagcaatttggttattgaaaatatgactaaaccccatgagctggagggactgtatcgaaaagacccgacagcttttaaaaaatcgttttcacaagcatgggatctacatcctgattctctggttcttggtgtctggcatgaaagattgcatttcagggagacggcaaatacaactaaaccttcctggcttcataaaggtttcttattcatgggccttttagcgattctggccgggataagcaccaggattattttccattttgtcgagcaggaagcaatcgccccgataaacctggcttttggtatcattccttttatcgctgcctactttgtttacagtagtccgccgaaaagaagcattatttattcccttgcagcgttgttcatcatttccggggtttatcttaatatgctgccattaaattataaagacagtatcatccttgcttatttacactttcccgttttcttatgggtattgctagggcttgcctttacaggaaacggctattcaaaagggagtagaaggttagcttatattaaattcaatctggaatatggtattctctacgccagcatggcgttcagcggaatggtgctagcagcattaaccatgcagttatttagcttcgttgacttggatattgaagatttttatttcagtaatattgtattatttggtgctgctgctctcgcaattgtggctacctacctagtctcaatgaatcttaaacttgctaagaatatcacaccatatatagcgaggatttttagccctctagttctggtcacattgttgacctacctggtcacggttatatgggtgggggaaaatccattcctggatcgcaatttcctaatcgctttcaacggaattctccttggtgtattggtcgttaccatattttcaattactgaaagagatgcagatgagaaaaagaccatttctgattatatcaatgttgctttgattgcccttgcgctcatcatcgacagtgtggctctgtcagccatcgtcttcagactttcttcctatggcattactccaaatcgaattgctgttttgggggtaaacatgcttatctgggcaaatctaatttggattatgttctcctatatgcgttacttacaaaacaaatcaggagtttcaactatccagaatgccgttactaggtatttgccagtctatggactttgggcagcagtcattatatttacttttccaattatatttaattagaaagattatgctatatagagttacaaacatgcaaatgttttaaaactttattagaggctggattttgcttcacttctagttacccacttgtgataactccttctcgtggcttgtaatttatcatcttttagtttaaaaaggaaacattttttagagggtgtttttaaatcttttactagtaagaggtgggagtgttagagtatatatcggaacaatcggtcatttctataattcaacttcatgtataatcttggttttacgagaatatttttttactgtttccacctcttctacatataaataaccctgcgtaaagattaagcagaagcccgcaataactatttgttaaatgttccattatctcggagtactaacttaataacagtatgtgctctatgtatgttcagagatataactggcatgcaccctcaccagtcgatataatgggtgtagaataaaaacaaagggtgatgatggctatgatgccttatattgcaacagctcatgcaaagtctattggttagactagcgatactttgcatgaggttatccgtggcttagaatcgcttttacaaatgctaaccacagactttgcaccttccatttatgtatttaaataaagagaagggactgtctgtatgaattatgtaaaagctaacgatgtccttcccaaggagctcattgaagaaattcagagatacgtccagggtaagactctctatattccaaagccgaaatatgcttatgaaaaatggggaacttgttctggagcaaaatcttttatgaaagaacgtaatctttcgataaaatcagactttaaagatggcatctccatcgatgaacttaaggagaattaccatctatctgtagaaacaataaagaagattgtatatacgaaataaagtggaagacctgctggcagggtcttctttttttatgtcatttttaattctaaatgaaactctgcattggagcttgaggggatttctcgtaaaattaaatgtataacaaacataaaggtggagtttatatggaaccgtttttggccccttatcaatatcattttctaaagtcacaaggtgttaaattagtgagcgcacggaccagctcaacagatactaatgttattaacgcggttcggggaatagttgaggaaagcattttttatcaatttcagcattgtgcgaaggaagaaatgcaactggtggaacggatgaatgctgttaaggatgagcgtgaaattgagcaaatattggcagagctgcaccctttcattattccttttcaaacaacagaaaatcagatcaaaaaactgtttcctaaagtaaaaaagcttaaagtccctgatttggaacatatggatacaaagcaaatcacatatcttacgtggtgggacccgggcacacataaaaagtttatcgtcacagtaagggatggaaaacagtggggtgtgcatggtacttttcacaaagaggcacagaaagggatttgctcgatttgcgggcagcatgaagagaccgggcttttcttagtggaacgaaagggaaaagaaataggcacgtacaagaaaaaaggaaattatatttgcagtgacggagaggcttgtaaccaaaacctgactcgtcttgataagttagatgagtttctggctcgtttaagtcgttaaaattggttggaagcaattactcaaagagaggatgtcactctctttgttttaattccatgggcaatcttatttttgcgataatataaacatctcttcataccacatataatgagtgaaaaaaaagcatgccctcacatcttaaagtgtgaggacatggatcatactgtattataaactttaccaatttagcataggaatttcattttttaagaaggtaattattaaacaaaaaacctctatacttcaaattcttaaacttttagtcgataatataaagagattatttaataaggggttttggaagtgagtagttggaaaacaccagaagagatagcctgggaaaagaaacgtgctaaagcatgggcatatgtcttattacctgtttgcgccatattgctaggtgtacttattgcaattgttgctcaatagatcttttttataagagaggcgccactcttaacataatagcgcctcttactaaccaggaatggcaccaacaagccaaccgaaaataccaccaagctacgtacgcgttttaaaaaggactttggcttacaaagtccctttttaagcctagggagggttagctcaaagatggatggctggttaaggtatgctaaatccttcattttatacatttttgccttctatttattggcttgattccaaatcctctttagatttaaaggaacataaacctcgtcaccgtgtacttgacgatgaagaattggcttttgaaatgagtgatctataagggagtaatcttgttgtcgtcgtgcgcgataaaccgttccaagtaacttatcaaagtttgctgaagtggatttcatatgtatatcgctcctttggttattagagaggttaatcctaatatatccagaagggagtattttattattcagcgtttataaaataacttcgtgtataatacttattctgcgagaaaatagaatccatctcagtgccaagataatacacacacagcaagcccccacacataaagtgtaggggcttggatcactttatattattttaagggggaaggagagttaggggaaactccttggttcatagattatcataacaagtagcctatcttaagaatatgattaacaatatcggaacaattcaagagtgtatattaagtgcatttacagtttatggatcaatttttgatcaatggttggcgcaagggttaattaattaactaattatgtagcagcatatcttcaacaatctcggagcatttctttaaaaagtagaagaacactttttcaaagaaataagtgttcaaaataaagattactgcagtaaaataaggtatattatattgttgaatagattctcttgtaagagaagaaaagtggtgaacaaagtgggaagatatcaattggatcacaaaggtaaggtagctgtgacaaagtttcatgaaaaacagacgactgccaaatttgataaaaagaatcatcttgaaaaaatacgtgcggagtatttaaaaaagaagcaaaaacagacagataaataatatgatggataacataggaagattaaattcttcctatgtttttcttatgaaaagttttatttcgatatcttctgcaatctcggagcgagaattgaagttcagaggagtaatattacttcttccaactattgttaggataggtggattatataaactctttcaaaagggtaagttgtaaaataataaatgattggcggtttgatgtcacgtatggaagtatctagagaaggaattgggatcagcatcattcttattttactaatagttttatgtttttactgtacactcacattttttgaatccttgcgaaaaggtgatgaacgtataattaagcaatcgaaatttgcagcaatcatttgtatggcaatagcgctgattattgggattatttattaagcagtagcccgtgataactatttgctaatgtttccattatctcggagctaaagttgaacaatggttggttctctcttctaaatatatagacgaaaaatattaaaataacggagcagttttgtgttacagggggtggtaacaaatgaatagaaagatgaatactatacaaaatattgtaggtgtaatattttgttttattttatttgctgtaagtatgttttatgctgagcaaaacgcattctttatcctgttcggaattgcaggacttagtggggtgagttactttgtattccgtatggtgaagatcgcattagagaattaaaaatagtaatatatgttttttactaacgggtccaaaagtaaaagaacagtaagaagtatctcgagtccaagtcttacataatctcggagcttatctgtaatgggataggcttcttgttgtatattatcgaattaccataatagatttttatgttaaccgattgacatatgaaaacgcttactatatattggtttgtaataagttgctttcttatatgtcaaccggttgacttgttatggtggaactaccttgtctaaacgaaaaagtgtggggaaaagaaggtgatttgaggtaaaggaagagaagcaatcaaattaaatatgaaaaggagttttgtttttgaatcatgtaatgaaaaaagaaaatgtcgttcgcagtttgtttttattcattgcaatcggtttaatcatgactttactaattttcaataaagtaatggcaacagagcaggaggaggtttcagcaatgaaagcaacaacaaatttaaccgattgggttattcatggtaaaggtacactcgaagatactatacaaggattaaagcttacttctgaaactaatgagaatgtaatggcgatttcaagtgttcaatcagaagattttgtatatcaatctgatatacaaatattggatcaatcttcagatgtaactttgttactccgatctagtgaagagggctgggattcctatatggttcaaatcgtaccggaagcaggtctgattcgtctgcgtgatgctcgggacgaaagtagattactagaagaagtagacgtaaacattcaagaaggggggatctatcatttaaaagtgaaagtagtggaagataatatcaaagtatactgggaaaatcaatatacccccgtgatagattccaatgtatcgctttatgattacggataccttggactccatgtgtggaatggttctgcactatttcaaaatgtgaaagtgagtgaacttgaatcaagtttggggccatctctatttgaagaagggaattgggaaccaaacataaagggattaaaaggaatagctggagagaatgaaatagctaaaaaagtgtatgacacacaaaccaacaacttcgtgttagaagggaatgtctcctttgatgaagaacaaacggagggtggtttgacatttcgtgtgaataaggatgggacagagggatatcaagctttgcttaagaagcaaggggatgaagtagtagtccaattacaaaaaatagatggtactgtactcggagaatcaagtcgaagtttcgaatcgcaaattaataccaaacaccatctggaattaatagtgaatgatgagcaatttacaatatatatagatggctacacagatcctgcaattgaagtaacagacagtagttatacggatggcttggcaggattgaccgttttaaacggtgcagcgcattttcaagatatttatttagtagctgcggagagttattataaagagaattacagacccgattatcattatacaccagctcgaggatcggccagtgatccaaatggtcttgtatattttgaaggtgaataccatctatttcaccaaaatggcggaaaatgggcgcatgcagttagtgaggacctcattaattggaagcatctacctatcgctttgccttggaatgaatatggacatatatggtctggatctgctgtagcagatttgaataatgattccgggcttttttcagattcagggggaaaaggattgattgcctactatacttcttttaatccagatgctgataatggaaatcaacgaattggacttgcttatagtacggataaaggtcggacgtgggaatattcaaaagagcatcctattgttatagataaccctggaagtaatggggaggatccaggtagttgggattttcgtgatccaaaggtggtgcgtgatgaagcgaatgatcgctgggtgatggttgtttcgggaggagatcatattagattttttacctctcatgatcttatacagtgggagcatacccagaactttggttatggtgattatattcgtggtggagtatgggaatgccctgatttgtttcagcttgaagttgaagatacaggtgagaagaagtgggttctcatgctcagttcaggggcaaatccgaatacagagggatcggatgcagagtattttattggagaattaactcctgacggccaattcatcaatgacaatctacctggagaggtattaaaaacagattacgggaaggaattctatgcatctatgtcttttgcaaatatgcccgataatcgtcgtgttgcaatggcgtggatgacaaattgggactatcccttttcattcccaacagaaggatggaatggtcaattaactattccgagagaattacggctgacatcaacagatcaaggcgttaggcttgcccaatctccaattgaagaactaaacaagattcgaacacccgtttttgaaatgaataataaacttgcatctccagacaatgcccccaatttattaagcaaggtaaacgaagcttcctatcaaatagaagcagaaatagaaatcccagctggcagtgatgtgacagagtttggttttcaagttcgagaaggttcagaagaaaaaacggtaattggatataataaatcggaagagcaaatatttgttgaccgttccaattcaggcaggacagatttttcgaataagtttacaacagttcatgcgacagatttacaaccgaaaaatcagcgaattaaattgaatatcctggtggataacgggtctgttgaggtttttgcaaataatggagaaactgttttttcagatctcatttttccggatcccacaagcagaggagttagcttctatactgaaggtggcaatgttcaaattatttctttgaaagtacactctttcgaggatatttgggatcgagatattgaagatggcccccagattgtgctcgatacacgtgaaaaagaaatgaatattggggatacgctagctgttcatgcggcaacgataggttttaatggaaatggaacgaaaaatcttaaatggaaatcatcggattccgatatagtgagtcttcgatcttccactaataacaatgctttaattgaagctactggtgctggaaaagcaacgattacagtttccacgccaaataacaagatgtctgagagttttaaagtgaatgtatttgaagggaattttaagactaatcttagtggttggaagtcagatcttgataccgtcaagtggattgccactgaagaaggaattcgcgggttacataccggtgattccaattatatggctgaggatactggtggtgattttgtgtatgaagcagagatgacacttcatgaaacgggaggtgccggatccattctttttcgtgcaagtgaagacggtagaagtggttattattttaatctagatcctaatatgaacgctttccgtcttttttataaaataaatggaagctttgaagaacggatggtcatcggtaacgttccagcattcattcagcccgggaagacctatactgtgagaatagtagctaaaggtccccatattcaaattgaagtagatgggaaaaaagttatggatttaagagatggaacctttgcagaaggacattttggtttaaacgtatttgggggcaaagctacctatcaaaatgtaaagatcagtaacgtttctgaagctgccttacaagaaacgaccttttcaaatcaaaaaacaggtcaatcactttatgtaacttcatcacaaaacggagtaccagtcactgctgacgaagagatgacaatgtggacacttatacctaccggtgatgatcatagttcatattctataagaacggaagcaggtaaagctattgattttgatgcagcccagaagagaattcaattatatgattatctcggttatgataaccaaaagtggatcattaaagaaaatgataacaaaaccttaaccatcttatctgtgtttaatgaggaggcattgacactatccgatgaagggaacatcacgattcaaccatatgattcatctaactcacgccaacagtggttaccatcgtattaagaataaaagatattgaaattgcagtatccaccagcaattctgtggcttgttaaataaaatgggaagtttagagacttcccattttctatctattaccttgagttcctccaatccaagctttaaaatatgtaaaacaaaacgttttaataaaatgaaggaactgtgactgatttatctgacttgaaggttctcctacagtttttcttcagcaaagatattcatcctaaaggaggagggcaataataatggatatgtcacgctggtatttaagacttggtaactgggcgtttaatctgtttttgttaaatttattatggtttttttgtacgtgtgctggatttgtcatactggggttctttccagctactgcggctctatttgccgtgcttcgtcgctccattatagaagataatgatattccagtattaaagcttttcgtaaggagttttaaagctgaatttttaaagtccaattttttggggtatctttatgttttatttggtttattgttgtacgtgtattttcaagttgttcagcttattcctaacaatcaattccaaagcgttttggttaatataacggttgttatgagcgtagtctatttcattacattcttgtatgtctttccgttatttgttcattttgaccagaagagttttcagtacctgagaaatgctttaatattagcagtaggcaggccgatacgaacgatcataatgctcctaggtttggcagtgttatcgtacatatgtatacatattccagttctcattcctgtaattggcattagtttgtctggctatgttatcatgtggacggctttgaaatcgctaccaaaggaaatgaaaactactgattttaactaaatataaagtagtaattaatagggtgaagatgtgaggagaatggatgatgaaaagggtaaagttagacgatgttgcaaaagcagccggggtaacgcgaacaacggtttcaagagtgattaataatcgtgggtacataagtgaacgtacgagaaaaaaagtaaaagaagcgatggaggagttacattattatccaaatgatttggcgcggtcgctttataagaaaaagacacgctttattggattaattgttcctactataagtaatcctttctttggagaattgacctttcatgttgaaaatattttagctgatttaggctataaagtgattttgtgtaacagtttgaataatccagaaaaagaagaatcttactcggaaatgttaatacgtcaccaggttgatggaataatagtttgttcccacaaccgtggagttagtacgtaccaacgtcaaaatattcctgttgtggccattgacaggtatctatcaccaacagtccctgtcatctcttcagataattacaaaggtgggaaaatggctgtcgagcatttgatcgataaaggatgtaagaatattgtacatatcaatggtccttctcagcttgagacgcctacacagttaagacgaaaagcctacgaggatattataacaaacccaatcacatatgaaattcaagatgtatttgatgggcagcaagctatagaacttatacgaaagatattctcagaggttcctcaagtagatggcatttttgcaagtgatgatatgattggtgtttcttgtttaaatgtagctagggaaaaaggaattaaggttcctgaggaattgaaggttgttgggtatgatggcacaaaaacactaatgaacattcaacctaacctaacaactattaggcaacccattgaaagcttggcgcagagcacggttagtacccttttgaaattagttgatgatccggaagcaaacgttgagttggaaaccatactacctgttaaattattggaaaaccgaacaacttaaattttttccagcagcttttcttgtgtcaaccggttgacatttgtaagcgtttcctatatcatatgaagaaataaaataaaaaatggagggggaagacaacgcaatatgtcaaccggttgacttatagtttgattttatatgaggggggagttttttggagaataaaaacgcactatctagtatttttcctaaaaccagtaaagccacaaagtacaaagaaaagacgcgcacaaaacatcatcttagaaaatatatgcgtagtaattatatcctctatttatttttactgcctgcgatcattctgacacttatctttcattacgtacctatgtatggaacaattattgcatttaaagattttagtccaattaaaggaatttggggaagtgattgggttggattggagcatttcacgaactttttaaattcacccaatttcttgagtatcctgatgaataccataaagcttagttcttttgatttgttaatcggatttcctgttcccgtcattctagcactaatgttaaatcaattaagacgagctagagtcaagaaaaaccttcaattaattctttatgcgccgcattttatttcggtggtagtaatttccggaatgctgtttatctttctatctcccacagggcccataaacagtatcatgaccctttttacaaacgaaccatattcatttatgtctgatccagatgctttccgctccatttatattttttcaggcgtatggcaaggtgctggttttgcatcaatcatctatgtggcagcgctatcaaatgttgatccacagcttcatgatgctgccacgattgatggcgcatctttactccaaagaataaagcatattgatcttcctactttaaagcctgttatggctgttctgttcatattggctgctggaggcattatggcgatcgggtttgaaaaagcctacttattgcaaacaagtatgaacttgccagcttctgagatcataccaacctatgtttataaacgcgggctacaagcaggagactattcattcgcaacagcagtcgggttattcaatgccattatcaatgtcatcttactgtttactgtgaatcatgtcgtcaagaaacttaatgatggtgaaggtcttgtgtgaaaaacgataaaggggggagattatgagccgtttaataaacaactcaaagaaagaccgttatctactgttaatcaacaaaattcttttatcatttattgttttaatcgtgttagtgcctcttatgtatgtcctgctgggatcgttcctgcagcccaatattttattaacacaagggttttcactgaacccggaccattggacgattgatggttattcaagaatttttgcggatggaactataatgaggggattttttaattccatattatatgcgacttcttttacggttatatctgttttagtagccattcttgcaggctattcgttatctgttgatagtctggcttggaaaaaaaccattatgtttttcttcttgcttaccatgtttttcagtggcgggttgattcctacatacttggttgttcgtaatcttggattgttagacacgatgtgggcaattattttacctggatctgtctctgtttggaatattattttggcaagaacttattttaaaggccttccaaaagaattaaaagaagcagccaaaattgacggtgcttccgattttatgatcttcctaaaaatcattatcccattatcaaagccgattatattcgtattagcactctatgctttcattgggcagtggaatgcttactttgatgcaatgatttacttggaagatcagagcaaatatccgttacagctcattttgcgttctatcttaattcaaaatgaagtcgagcctggaatgatctcagatcaacttgccatggcggaaatgcaaaggatatcagaaatgattaaatattcatccattgtactggctagtttacctttactaattatgtatccgtttttccagaagtactttgaaaaaggcgttatggtaggatcattaaaataatgaaaagaggagaagcgtaatgaaaaagttaaaaggtgcgttgtgtggagtagtattagggtcattgcttctatcgggatgctcaaatgaacaaagtgctgcgaaggattacgagctatctgatatttctttccctgtagaagaggatgtcacacttaattttatgaccggaagctcgccgatggctccggaagatcctaatgataaattaataagtcaacgtttggaagaagaaacgggagtgcatattgagtgggatagttattcaggagaagcatttgttgaaaaaagaaatttagctatgtcaagtggtgatttcccagatgcgataatgaattctggatatagtgactatgaattattaaaccttgctgatgatgaggcaatcgtcccagtcgaagatttaattgaggattatatgccaaatttgcaagaggtgtttgaacaagcgccggaatataaagaaatggtaactgccccggatggtcatatctattctttcccatggattgaagaattgggtacaggtaaagaaaagatccaagcagtaggaggcaccggttggattaatgtgaaatggctggaagaattagggctagagatgcctcaaaccacggaggaactagaagaagtacttaaagcgtttcgtgatcaagatcctgctggggatggtcagaccattcctatgtcctttattttaaacggaggacaagaggaccccgccttcttattcggttcgtttggtgtgggggacaattgggatcatacagtcgttactaatgataaagaagttgtatacacgccaaccacagacggatataaagaagctattaactatttccatggtctttatcaggaagacttaattgacgtagaggcatttgaacaggattggaacaactatgttgccaaaggtggaaatgaacgctacggagtatattttacctgggataaaaacaacatttcgggtgaaaattatgagatgttgcctgctctagaaggtccggacggtcataaaaatgtagcggtaagcaatgcgctcggttttgatcgatcgaggatggtcattactagcgctaatcagaatttagagttaacagcaaaatggattgatcaaatgtatgctccccttcagtctgttcaaaacaattggggtacgtatggagacaaagagaaacaaaatatattcaaatatgatgaagatgaagatatgctaaagcatgtggatctggaaggaacagcgcctgtggaattacgggaacaaacagcgcttggtgggccgttggccattcttgatagttactttggtgaatttacaacaatgccagatgatgccgcctggagactggatttactccatgagaatcttgtaccatacatgaacgcagattatacgtatcctaatgtattcctccaattagaagagcttgaaacaatttctaaaattgaggcagatttgttcccttatgtagaaagaaaacggtcagagtggattgtcaatggaaaagtgaacgaagaatgggatgctcacttagaggaaatgaagcgtttaggtttgcaggaatggatggaaatcaaacaaaatgctttcgatgattatatggaatcacaggaggagaagtaattgccaacacaagacttgctaacatatagaccgcacttacattttgcacctaaaaaatattgggtgaatgatccgaatgggatggtttactttaaaggtgaatatcatcttttttatcagcataatccgaacgattgtatacatggccccatgcactggggtcatgctgtaagtaaagatatgatcacttgggaacagttagatattgccttatatcctgatgcgcttggaacgatattttcgggaagtgtagtagtagactggaacaacacttctggattttttccagaagaacctggcttagtagctatatttactcaccacttacatgagggaggggaagaacctgttcaaagtcaaagcctagcatttagccacgaccaggggaggacttggacaaagtatcaacataatcccgtccttgttgatcatgccaaaatagactttagggacccgaaagtgatatggcataaagataaaagtcgttgggtgatggttttggccaccggtcaaactatatccatttattcctctaccaatttaatagaatggcaatttgaaagtgaatttggagaattagtaggttctcatgaaggtgtatgggaatgtcctgatttgtttgagctacctgttactggaaaaaataaatctgaatgggtgttgctagttagcattggagataaccctgatcttgatagcggttcacggactcagtattttgtcggctcttttgatggccaaattttctcgcctcatcaagaagatactaagtggctggatgcaggaaaagataattatgctggggtcagcttttctgatatacctgagaaggatgggaggcggatttaccttggttggatgagcaattggcgctacgcaaatgacgttcctacttatggttggagaagtcaaatgacgttgcctcgcgttcttaaactccatcaagaccaggatggttataccattattcaaactcctgtagaagagttggatttttatatggcaaaagcccaaacgctaagtgatgtgattatctcagataattcaccaattcagatgaagttggatgagccttattttatcatggattttgttatcgaaaatgtggacgctgcttcttatcaacttattttacatcacacagctgatcaatttacttccattcatattgatatgggaaagggtgaactatcgcttgaccgaagtacatctggtaaagtagatttttccgaaaatttctctcatgtccaaaccgtaaaaattgaccgtacagatgtattgaaactttacgcagtagctgattcttcttccatagaattatttattaatgatgggaaatacgctttaaccagtctggtctaccccaataaaattagctcagagattaccttatccagttctggaggtaaagttaagatagctgacggcactattttaatcccagctaaatagaattgtctttaaagaaatgagcttaaggagaacgtattcatatcatcagtttatactcattatttgagtttaaactttttattaaagaagagtattgaatagagaatctttataaactattttaggcggcagcactgacagactgatcagaaagcccaaaacgctttctgtcattctgtaggtgtagtaaagggcccgataacaacggtctttaagttcttgctaacagtccgtaagttcctggtccctttgcgtaaaccgccggaccgaacgagccgaagagaacagtaccacggaaggcagcctacgggctgcctcttttttgtgcttttttcttttgccctgcggagcgtacaaaagcgccatccgactaaggatcaatccgggcatgcctcgatctcttcccgatttgaacctaagacggatcaccagccagtcaaggggcccaaaactttttgactaggtgcctgatggataaaggtagaaagggatggactttgaatgaaagacatcatcaacttaattgattcaaagaaacctggtggcgtgatgtcattggagatgcgtacgaattcttaccgaaatagatataaattcaacggaagaaaaattaaaagtggctttcccgaaacaatacaaagaactttttaaactatctaacaggctattttctgatgaagactcccttgtatagcttcaatctttttagaactaatcttcaacaatctcggagcttatctgtaagaagataagctcttttatatatgaagtaaggattgagttctatgtgcagatttgaaataattggtattaagttgttgaacaggattgtgggaaagctaaaacgagttttcctaattacataagtgcaagcactattataaatgtattttaaggagtgttccaagtgtttaaaagcaagataaccttcattatggcagctttagctattactttgataggttgttttcaggttgaagaagcaacatttattgaaggagagataactaaaatcaacaatgaaagtggggaaatcgaagtcgaatcttggtcaacaattagcgatgcagaagagtaatggataggaatagtcttaatatacttacgagaatttcctactttattggatgggttactgttacagggattatagtatttatttatttatattggaataacttcggaagagagtgctaatacgatcgatgatattttagggttttatgtgttgcttacttttcttttgtctttgttttggtattccactgagtattgtttcaatgtttagtaaagataaattaggaaaaagaatattcgctttcatagtaaatttatctccattaattgttattacgtggggtttcattatggaagtaaattagagaattctccaagacacccatttagaaaagtagctataagatgttgttccataaaatgggctctgttctaaacaatggtgtgtaactatgcggatgaaagaattgaactaatggagctgtttcggataattaaccctacaaaatggtgcacaaaatgtcggatgaatagagcaaactcctgttattctattgatgaaaggaggtcatattaatggatttgcttaagcaaatgaatactgcaatgaagtatattgaagaaaaccttactaacgaaattgactacaaagtagtggcaagtatagcttattgttccgaatatcattttaagagaatgttttcttttcttgcaggaattacgttatcagaatatattcgccgtagacgacttagtttggcagcatttgagcttcaaaatagtaatgttaaagtaatcgatgttgcgatgaaatatggatacaattcaccggactcctttactagagctttttttaatttacatggcgtcacaccaacagaagcaagaaacaaaggtcagcatttaaaagcatatccatttatgaccttccaattatcaattagaggaggaactgaaatggactatcgaatcgaacaaaaagaagcatttaacatcgttggcattatgaaacgagttccaattgttttcgaaggagaaaatccggaaatagctgggatgtggcaatccttgactatggataaaatagaacgattaaaaaaactttcaaatgttgaacccaaagggatgattcaagcatctagtaacttttcagaagggcgtatggaagaaaaaggggaacttgatcaacatataggagtagcaacaacccaagaatgccccgaagattttactaaacttgaagtacctgcattaacctgggcgatattcgaatcaaccggaacattccctaatacattacaagaaacatggggaaagatttattcagagtggtttccatcttccacctatcaagtaacagaaggacccgaaatcttgtcgattaaaagtaaagatttaacttctacctctgtaaaaagtgagatttggattcctattaagaagaataaatattaaaaatattactgagctgttttaagcagctctttttctaatgaaaataatgcaaaagttctcgtagtgatttttgtatttctacctttaatggttattggaatgttggtagcaacctttatctggaaaaatattttgatatcaagacttccacaatctcggagctaaccataaaaatggttcttccccttttctaaaacttttgatgaagatattaaactatagagaatggtcctataataaaacaacttcttaattttcctgtgttattgtacattcaggagtttaaaaaaatacaaggattaattacaactcatgaaaaagaaaacgataattagataattattagtacaattctgttattagtgtttctgttgttttttggtacttataaattgatgaattgaagaacgtttcaactgtatggaggattaacatataaagtggaaacgaaccagaaagtagtggccttaacttttgatgatggcccaacagagaatgtagatgacattctcacattgttaaatgatcataatataaaagctacattttttctaattgggaatgagattgaaaaaaatcaggaagaagcaaaggcaatagtaaacgaaggtcatcaaatcggaaatcatacttattctcaccaacgtatgattttcaaatccccctggtttatcaaagaagaaattgaaaaaacagacgaattaattcgacacggtggttataaaggagaaatagattttagaccaccaaatggaaaaaagattgtaggattaccctattatttatctacgcataacaaagagactataacttggaacgttgaaccagatactgcttatacagatgttgccaataaaatagaatttgttaagggaaatgttacacctgactcaattattttaatacatgccatgtatgacaagactggtgaagaacttaaggctattgaaggaataatacaatcaatacaatcattatcaaataagggctataaatttgtaactgtcaatgaacttcaaagtttaagtgttaaatagtataaattatttgtccaactcagcgatatcttgcagtattatgaaatgattggatttagaggacagttatatgaaacagagatggtcatacgtgattcacaaaagaccattttgttcaaaacgaggcatctcaagtattgagatgcctcgtttttggttatctcaagtcatgatttgagagattttgaagattaattgtatattacgaatttaccttggtcatgtaacttttttatagatgcaagcatatgatttatttcttcatctgaatgtctttcccatgaacttaattcagctacaattttcaagggcgattttgacctataagaacgtgtggggtttccaggggattttttgtcagttacgtttggatcattttcaaaatcacctactggctctacaatgtatattctttcttttgatgtagatgttgctaattcagccccccatttagcggcatttaatgttgcagtgaaataaatatagttcgcttttttgttttggtaattagataagtgttgcggtactaatagctctccaattttaagttctgctttcgtaccatgaaagaaaggaccatgatctaagatatcttttttgtcattcattcgaatacacctctcttttttgatttgtataaaacagtatagagcagcaatgatagaaatagtagtctataatttagtgggaattagcagtataatataagtagagaagttgtagttgaacgaaaagtaactattgtttatgttttaattagcaaaaatcaatccgataaaaagaataacttaagtgagttaaatcaacttctccaagaggggtggaaggttgtttctcagagtccagttggattagtaccaatggtttcttcacttattattctggagaaaaattagacaacatttcttcgggatttgttgaagaatagttaagattaccgccttttcagagggcgtttttttgtgttgagaagtatatccatgttctctcaggaagggttgtctcatagaataaacgttcatgtgtaaattatcagaatcttctagagagccagatgtatttaaaaagacgatacgagtttccaatcctgaaaaatatgttgaagagaaatagtacatatgaaagttatcaaaaattataaagaagaagtgtgggatttagataggttaaaattcgaagtagaaaaagtagcatagaatattaatctacctttagaaatggcgagattgagtcttcttgggacatttattgcaatctcagtcgtccgacaagagttgaaactaacatttgctttggggtaccttggcgtttgggtattagtggtggttagtaatgcgattttcgtgctttataagagaattaaaaataaccaaaagtagaacaagaattatagcgcagataagtcggtccctaaaagaatgtccgaacactcaccttcatagacttagagaaaggaagggaggtagtctcaatgcttgagtggagtgctacgcttgtagccgttgcgtttattgttctcgtggtctttttgattttgacattaagaaaagttatggcaacactagctgaaacgaaggagacgctgtctgacgttcggaaatccgtaaacggcgttacagatgaagcagaagaactaattcatacagccaaccaaatttcggatgatgtaaaagggaaaatggaagcggtggatcctttaatcgagtccgctcacgatgtgggggatatgatacacgatgtaacgagcagaataaagagaacggctttgcaaaagaatagtaggaaaaccattcgtacacaaaaagaccagccagtgcaaattaaactgaagtaggaatagtggtttcatcatttgaaagggatttttccaatgatgctccgagtttattagccaaaattccgtttattgtctaaatctgaaatttattgtccaaaatgaatttatattagctaaacgttaaaaaagttgaacgcgactgtatcgccgcgttcaactttttttgttaatgggtggttccttgactcggaacagtggcatagctttgaagcatcatttgcatatcttgttctgaaagttgaggtacttgatagtaattatgcttattttgataaaggaaaatttcataacttaattcaactaggtttggtacactgtcgctaacaacccgacgtaagatcgggttcgtcatctcgagagcggtcatggtgaataaagacgctagtgattttgtatgtcctaacatatatgctgacaaacctttatccgataggtcattgactgactgattcggtttttttggtgggccaggcttgataccatacacaacttcattcgattgttgcatcgtatattgtcctgtaggtaccatcgggtcttgtcccgtttgaaagctctgcacaatcgtattatacatagtcgtgatgaactgagattgatgatgtaaaatgttctttaattcagggtcttgtatatgttgttcataaatctgatagttgtccaatagggtaatgacgccggcaataacctcatgtgcgtcgaataattcgtgaccaccatgatttgtgttcaccgtgttttgtaaagggggttgtgcatttggcattccttgatttagttggtttggtctttgttgttgcatgttcatcctccttgtaatttaaatctaaaaattaaaaaggaacagagtgccctcaaccttctgatgactagtccatggctccctcatcgaagaagcacaacgtttatcttttactttactgttgaaattattcatggaaaatagaccgccactcaaacgtattcttacggcgtgtattggaattaattaaccacccttaaggagaatatattaatcaaaactttcaaaaacttaaagaatagatgtggcttgcttatttttgaaaacgaaggaataggaggaaaaacgtgcactcattagataatgatttttcgaagacacaccttcccttaactagtatgaataatgggaagggtcatgaagtttgtagggatcttttttattggacgaatcagattgtaaatgtctgtttttatggagatacaaatgagacggattgggtgttgattgattgtggcatgcctcattctaagcaggcgattatggatgctgctgagaaaaggtttgggcattctgaaaagcctaaagccattgtattgacgcatggccattttgatcacgtcggatcattagaaccgctcttaaaagaatgggacgtacctgtttatgctcatgaacaagagattccatatttgaatggagaattggattacccgaaaggtgatccaaaggctgatggtggtttggttagcgaactctctcctctatatccccatcatggaattgatataacaccatacctgaatcctcttccgtctaatggtgaaattccatacatggaaggatggaactggatccatacggcaggtcatactcctggacatgtttctctttatcgagaaagagatggtgttttgatagcaggggatgcatttgtcactgtaaagcaggaatctttatatcgcgttgtgcttcaacaaaaggaaattagcggtcctccaaagtatttcacgatggattgggaggaagcgagaaaatcagtagcaaaattagctggcatacatcctacactagccgtaactggacatggagaatcgatggaaggcgaagagctagaagcggctttaaaaaaattagtcgaaaattttgatcaaattgcattaccggctaatcgaaagccgcattaaaattgagaagtggctagtcacttctcttttgaatttggcccagcacttcacgtttggttctgatacataagtggaaaataataggtagttaatcaggaaatacatttaggagggctcgctatggaggaacataaaagcatgccgaaggataagggtttagatcatacgctaagtgttttaagggaaggttatgaattcatttttaatcgaagcaataagtatgaatcaaatatttttgaaacgaaggtattaggtaagaaaaccatttgtttaactgggaaagaaacggcagaacttttctatgacaatgataaatttaagagaagtggagctgcaccaaaacacgttcaaaaaacactttttggtgaaaatggcgttcaggccctggatggggaagagcatcatcatcgaaaggcgatgtttatgtcactgatgacgaacgatgcgctcagtgaaatagccgaattaactaagaagcatttaaatgcgtttgctgctcaatgggaaacgaaagagaagatcatcgtctatgaggaggcaaagaaagtcttaacgcatgtagcttgtgaatggacaggagtgccccttcaggacgacgaggtggagctgcgaaaaaagcagcttgcagatatgtttgaatctgcagcttcgatcggtcctgaatactggagaggacgaaaatcaagaacgtcagcagaagagtggatggaggatttggtacaaaaagtgaggaatggagagattaatccgccttcccatcgtgctctgaatcagttttccgttcaccgagatctcgaaggtgagttgttagacaagcaagttgtggcagtagaacttctaaacttattgcgtccgatcgtcgctatttctgtctatatgagtttcactgttctagccttaattgaacattcggacgaagtatcatcactgaaaagcggaaatgaacaagataagcaatacttcatccaagaagttcgtcggtattatcctttctttccttttgccggtgcgagagtgaaaaaggattttacgtggaaaggatatgattttgaagaaggaacactaacgcttcttgacttatatggcacgaatcatcatccagaagtgtggcgagaccctaaagtgtttattccagcgcgttttaaatcgtggcagggaagcccatttgattttattcctcaaggaggcggggagttcgactttgggcaccgttgtgctggggaatggctaactcttgaggtattaaaagaaacggtgaactatttcgtaaaccatctcacctttgatgttcctgagcaggattttacgtatagcatgtctgaaatgccaagtttacctaaaagtggggttcaattaacaaacatcgtgcgtccaacaaataggtaacagaaaaagggagaccgatgtagtctccctttactaatcctatttttcttttgaataggtagctaaaacaacagcgacttcatcttcaatgtccttaatgtcatcctcttcaacaaattgattcagcataatggaaaagacaagtccattgccctgttctacatagcctgaaagagaagaaacgccagttaaagaaccagttttcgcatgaacattttgttctgccgccgtatctctcatgcgatagcgtagcgtaccgccctcagatcgatctgaatcgcctgcaacgggaagagaatgataaaacgaatcaaaccagcttttatcttgtacacgatacaggaagtcagacagctggttaggcttaattaacgaaacgtgtgaaatgcccgatccatctcttagtcgcatctcatccgtgtctaggccaacctcttttagaaaatcgttcatcacttccaatccagcttcccagctgccttcatctttcttcactttccccatctctttcactaaaatttcagcatgtccgttattgcttagcttcataaaaggaataagcagctccgatagtggcattgatttcttttcaatgagaagagttgcgtcttcaggtgctttgctttgttgaatatcacccttgaatttaattcctgcttcttttagtgattgtttcattaagctaagcgcatattccgctggattccagaccgcaatccactcgcgcttacgcgatgcatcctcagaaatttcaccttctactaaaatcgtattcgatccatgttctcgtgtaatggttaattcagcatcctcgtctgctttcactgttttagcacggttctcaacttttatcacatctgaagagggagaaagtcgaacatcaactggatcgccagggtgtttgcctgggtagacttctacaatgacagtacctgcatcataatcttggttcggtgaagcagttagcgccgatactttggcgccatagtagttatcttcatccgaccaggagagatcctgagaaagagcttcatcatcataccagctgttatctccaataaggtcgcctttaattttatgtacgcctttttcttttagcgagtttgcgagttcatcgaagtcttctttgaggagagtggggtcaccttttccttttagatagagattccctttcaaatcattgttttttacttttccgtccgctagaagttcggtggtgaaacggtaatcaggtcctagcgattcaagggcagcgcctgcagtaaataatttcatgttcgaggcaggggtaagacgtgtttcgccgtagttctcataaatcatttctccagagctcgccgatcggacacttatcccggcaatggcaccatccaaacgttcatctgataaaatctcatttaactttgttgaaagtgtactgtttgttttgtcggcacttgcatcttgattagaagtgaaagggggaaggataaggaggaatagcagcgtcaggatcaagctggttttcagtgtttgtttcaattcatcatctcctctttatttagtatgatcaaatgcgcattcatctaaaagacatgaaagcagcctcattctgacttgaacctttcgtctatcacactccattcccttttcaattcaaggaatttggatctttttacacatgcctatctgaggaaatagttaaataagcctatgctaaaaagacgcaaaaaagcagctgcttcataggcagctgcgctcatttcattaatagactttatctccgttaaagatggagttctttacgacaacgtaatccactgtacggattgattcgagcttgtctccgccagagtaagaaatggctgactggagatcctgttccatttcagtaagcgtgtcttgaaggttccctttatgttcaacaaacattttcttaccttcaacatttttcttctcgcctttttgaaattcagaagcagatccaaagtactctttgtatcgcttgccatcgcgttcaacggtttcgccgggggattcctcatgtccggcaaaaagagaaccgatcatcaccattgatgctccaaagcgaacggattttgcgatatcgccgtgcgtgcgaatgccaccgtcagcaataatcggcttcgttgcagcttttgcacaccagcgaagtgccgctagctgccagccaccagttccaaaaccggttttgatttttgtaatgcacactttacctggtccgatcccaactttcgtcgcatctgctccagcatgctcgagttctctaaccgcttcaggtgtaccgacatttccggcgatgacaaagctgtctggcaagttctttttaatatgaccaatcatctcaattacggcattcgagtggccgtgagcaatatcgattgtaatatagtcaggcgttaggccttgttcttttagctgttcaatgaacgtgtattcctcgtcttttaccccgacgctaatggaagtgattagctcacgtgaattcatatcttgaataaaagcaatacgtttctctggttcaaaacggtgcatcacgtagaaataccctttttcagccaacgtaacggcaatcgtttcatcaataattgtctgcatgttcgcaggtacgactggtaatttaaatgtatggttgccaagcgtgacggaagtatcacattctgatcgactgtttacgacacatttagcgggaattagttgaatatcttcataatcaaatacgttttccatgagatccactcctaaaaacgaataatacgttttgttttgaattaaatgttcgtccatttgataatgtacaggatatttcatacattgtcaaagtattttagatgcttaatgtaaaaaacaagataattggaagggaatctatctctccatattgaaaagtacattaagaaaaacgacgagaggagttggtgagttgggaaatcatttgcttcgaatcggttctacctatctacctgtttcagacgtcaaacgagcgacggattggtacgtcacaaagctaaatgctgagcttagctatcaagatcaacagaaagcgattttaaatatggcgaaccagagtttttttcttgttaaagcaaaagaaaaggaaagtgccaatttctatgatagcgaaggaaaggagtgcttttctctaacgtttgaagtcgatggacttgcggcgcttgagaagctccgagatgattttatttctgaaaatatacccgttggtgagttggaaaacaggggtcatgcggggaggaactttgttttctccgatccggatggcaatctgtttgatgtgtggagtgaaataagtccggagtttaaagagcgttatcttattccaaatccgataggtgaggaggaagcggattgatgagagggcaagacgtatacattgaaaaactggaagagattcacctcattggcataagagtttgttgccgggcagaggagtatctatcagaaataccacaagcagcgaaacgattagaagagcggaagcatgagatctcacatgtcacaaaccctacacagcaaatgggtgcctttgttgtagaggcttcttctgaagaggaggaaggatattgggtttgcgtgcaggtgaaaaaggtggggcagattcccaatgggatggtttcgttaacaatcccacctcaaacctatgcggtcatgaagcatagtgggccgaacacgacgattttacatacgtatgatgaacttcataactggattggaaaaagcagttggaccaggaaattaggtgcctggcaccttgagcgctttcatcattttaagaataaggaagagatcgacgttgatttgttagacacgattcagtaatcgaataaaagggagatgagtgtgtgattcgtattggtagcgtatttattccagtgacaaatctagaaaaagcaatcgtatggtatgaaaagcatcttgacgttcagaaaattgaggggtggggagaagggattgggaaaggtgcaggattttattttccaaatagtccgacccagcttggattggttcaggttgaatctaatcagccgactgattttcaagtgcaaggtaaacatcgaaatagctatttcaatttccttgtagaagacattcatgctttttatcatcagctgaacgatgccggtgtggaaacgactgaacttgaagatttcggaggtatgacgtgctttgatttctatgatcttgatgggaatccgtttagtgtcgtaaatgaagtggtagactctccatttcattcagataaaatcaaaaagcttcaggatcaggctaatttttaggagaggaacttatatggcaacggagctatggatgaacttgcccgttaagaatttgaaaaagtcgaaagcgttttgaaatagtaggttttcgtatggctggctctatgggatgggttttattgatttagatggtcatcgatggaacgccctgcatatggatatggagagagtgccatagattacaaagaaggtaactcgtttcgagttatctttttttttattcggcttgaaaccttccccctttttctatcgtacgtattagtagagtgtaaataagcaaaaaacgaggcgataagatgagaagtaagtggttggcgtttgcgctagttctactccttgcagctggctgttcaagcggcacagctagcgatcaaacagcgatcaaaacgattgatgacgctcatactgtatctatacttcaatacagcggaacgtacgtgggcaataattcggatgtactagctctacttagtcacttgccaggcggagaaacagttgggaagttcgatctatcggatgaaaagataaacattacatatgaagtgaaaggtaatgtttcagaagaaacgtttcattcttactggttctctgacaacgataatgaccaaaaaaccttgtattacaacgcgatttatttaagccttctcgttccaaatgcaaaagggtatgagtttcatgttcaagaaaaaagtatgagcatttcaaaagagaagatgaaggagattcttacagacgaattttctgatcttccaagcgatggtgagcttatggaggatgagactgttgaggcatttgtgacaaaacataaggaagagttagaaatgatggcgaacaactttgaggactattttaatgaaaactaaaaagggccctaggcgtgtgaaaaaaattactttattattgcttttcccaattggcatcttttttatggttggggtgggatcctattttaatcatcaagtgatagacacagccgttgaagggtgcgaaaaaagaggaggaaaagtaagcttggaaaaagatttccttgcgataaattggagcttttcttgtggaaaataaaagaatgaggggggctgatcgtgccaacttgccagagctgtggatacatctggcggtggaaggaagcgatgagattcatctaccgtcagaaggccacatgtccaaactgtaacgaacagcaatatctttcagcaaaatcgagaaagcgatcaagctatacttcgatgctcgtagttattccacttggggtgacatcgatatacaatctatcattatggttttatttgggtttttcatttgccattctcgtcttgattcttctgctttctccgttttactatacgttaagtaacgaagaagagccgctttggtgaactgggtacaaaaccgtgcacatacatagaggagaggtcgtcatatacatggcgacctcttttgttgatgcatcttaattcctattattatatatattccttagattcaccgtttaataaacactactaaatagacgaaaatagggtagtttataaacaaaagaaacgattacaaagatctagagtggggggtggcaaagtgaaaaagtatgtttatcgaggaatgatcggcttgctcaattctaggaggtttggatattttattaataaaatgagccgaactcgattcagcaggtggctgattcctctatacgtgaaattctttaacatccaaacagacgagttggataaaaacctgaaggagtttacgtcattagaagcgttttttataagaaaacttaaatctggttcacgttctgttaaaggagaaggtagcgacatagtcagtcctgtggatgcgaaattggagcagtttggtgagatagatgacactttaattgaggtaaaagggattgcgtactcgattgaggacttacttgaggataaggaaatgattgttcgatacagacatggcctattccttgtgttgtatcttagtcctagagattaccaccggattcacgctcctgctgatgctgttgtaggaaaacagtatgaacttggtggaaagtccactccagtcaataagttaggtatgactttaggaaagtcgcccctctcgacaaactaccgcattgtgtctgaattaaaacaagaagatgggacatttattgctctcgtgaaagtgggggcgatgtgggtaaatacgattgaattaacacaccctaccttaaacctagaaaaaggagaggaagtgggcttttttcgttttggttccaccgtggtgctcttgtttgaaaaggataaggtctctctttctccaagtttagagcggcaagcgtcgatcaaagccggggagccattagcaagaaaaaggaattcaaaagatggagtttttcatttgaagattaagaaaagttttaaataatagtagtaaaaatatttcttctaccctttttttacaaaatatagtaaactataacatggactgttttaaatgaacgactttgatagcgttggatacgaaagttgatcgtgattttgttcgggtgaaggaagacctttacgttcactcactccttaatatccacttataaaacgctgtttaaatctacttctgtttctactacaatcattaaggaagggaagcgttgaaattgcctatacaatgttacacgagatcaaatcttctagctctcattgatcagaaaaaagtagttttaacatcaaaagtgttagcgcatggatttacacataaacaaactgtcatggccagtcaagagcttgataagctccttaatcgctatcaatttggacaatatgaaggaagtcaatcgaggtatttagcttaattgccattatttcattttatttgcaatagaaaagagccaggaagcagatgatgcgtcctggctctttgtggtataaaattctatttttaagcgtgagttccaagcaatgcatcgtttgctgaaacgtactcatagcccaggtctcttgcgacagcttcgtacgtgatcgcaccgtttgcaacgttcaatcctttttcgagtgccgggttggtttggatcgcagccgttacgcctttattggcaatttgaagcgcataaggaattgttacgtttgtaagggcgattgttgatgttctaggaacagctcctggcatgtttgcgactgcgtaatgaacaaccccgtgcttttcgtatgttgggttatcgtgcgtcgtgatgtgatcaactgtttcgatgattccaccctggtcaatggcaacatcaacaagaacagatcctggtgtcatgctttttaccatttcttctgtcacaagcttaggtgcttttgctcctggaattaacaccgcgccaacaacaaggtccgcttccttaacagcttgagcgatgttaagtgggttcgacataagtgtgttaatcgcatttccgaaaatgtcatcaagctgacgaaggcgctcagcgcttaagtcgagaattgttacgtctgctcctagacccattgcgatcttcgctgcgtttgttccaacaacgccaccgccgataatcgttactttgccacgtttcactccaggaacgccgccaagcagaatgccttttccgcctttaggtttttcaaggatttgtgcgccgatttgtgaagccatacgtccagctacttcactcattggtgtaagtagtgggagagttccacgatccacaaccgtttcataagcgattgccgttacaccgctatctttaagcgcttttgttaattcgggctctgctgctaagtgaaggtaggtgaagagaatgagtccatcacggaaataagcatattcagaagaaagtggttcttttactttcatcaccatttcttggttccaaactgatgcagcatctgttgcaatcgttgcgcccgcttcgcgatagtcaatatcttcgaaaccgcttccaattcctgcttcagtctcaactgttacatgatgaccagccttcattagtgcgatgacacctgctggagtaatagctacgcgattttcattatttttaatttcctttggaataccaatatacataatttcatccccttagacagtgtttaatgatcaagtacctccgattatagacgtcctcattcgatttctcattgtgtaaatgagagaaaaggtcataaggtgtttgtgtaattacacaaacaccctatgatttcatttgtacgatttttaaatccagataaagcgttactttttgattggcatcttttaagtcaaggtttgccacatcagcgatacgtttgaggcgatagttcaacgtgtttgtatgaacgtggaggacttgagcggcagctttcacattgctatcgtgttgcagataagtatcaagcgtttcaagtagctgagtatgatgaatgccatcatactgctttaatttttcgatataggggttttgatagtgctgacgctctttataaaggaggtcaataaattgataaatcccaagatcctgatagctatagaccgccgtaacttcctttttaaatcgttctttaattgacagcacatgaagggcttcgcgatagctgttctttatcgaaagagggctttgatagagcgttccagccccgccttttaacgtatcaacaccaagacgattactaattttctcaacaaagacttgaacaaaactggtaagctgttcagctgtgttgtgttggtctgaaggacgaacgagtaaaatgagctggttttgatctaacgtactataaattaattcgatttgatgagaagcctgaatgtagtaattcatatgacgctcaagcgattgctgtatttcatcactaaattcaaagatcacgatcgccatctcgccctttaatttcagctgatacgtggaagcttgctgatggagattctcttcttttgtgtaatgccccgtgagcaacttccagaaaaactcgcgatgcccttcttctgactgtcgcttctttatttctaatttcaggatttgatttttaacaacttttgctgctttctttagaaggttcaactcgtcctgggtcacttcccaattcaattgagcccaaataaaaccaaggagctcttcatttttccgaacggatatagcgactctttggcctagcccaacttctggaatcgccgggatgataacgggatcatcactttcaaatagctgtggaataatgccttttttccagagacttttgatcacttcttccggtactttccgtttcatgatagtggcaatacgtgccgggtcgacattctcatcatgtgaactatatgcgagaatccgatgatctgaatcctctatcgtaacgggacaacctaggttttctcgtatgcagtcagctaaatcttctaatgtacggaatggtccctgaaaagggttatgactttcttgatcggtatgcatttatgaccactcctttcttaatctaaatactcgtacttagcgtctgattaaaagtatacaagaaaatcgccccctttgtgggatttcacaaagagaagttaagaaattgttatgattcacaattgaaagaagatatggcacttaacacaaaatggaaaaagtgacaaacgtaagaacaaagggatcataattaacctttttaaaataaatagtatgacataatttaattaatgtgttattctaataatcgaatctagtagggaggcgttggattaatggtggagcaaagtgcgattcgatggtttcatgaaataagaaaagaggatattgctcttgttggtggtaagggagctaatcttggagagcttacgcagagcggtgtacacgtaccgcctggtttttgtgtaacggctgaagcctatacagcatttatcacggaacgagaactcgatcagtccattctagaaaaaatgaaaacgcttgattatgaaaataacgatcagctcaatgcagtgagtgctgaaattagagaatggattctgcagacagatatgcttgaatctattgaagtagaaattcgtaatgcttatgcagcgtttagtcagaacctcaacgtaacggatccgttcgtagctgttcgaagctcggcaacggcagaagatcttccagaagcctcttttgcaggtcagcaggatacatatcttgagatttctgggatcacagagcttctttatcacattaagaaatgctgggcgtcactttggacagcacgagccatttactatcgcgaaaaacagcagttcaaccattttgacgtctccctctgtgcggttgtacaactgatggtaaatagtgaaaaatcaggtgtgatttttacagcgaatccgattacaggtgaacgcgagcagatgatgattaatgcgagctggggacttggggaagcggttgtttctgggatggtttcaccagatgagtacatcgtcgataagagaacgttcaaactaatcgaaaagcatgtagccgaaaagaaagtgcttgtcgtaaagaaagcaaacgcaatcggaacggatacggttgcggtgaaagaatatttaagtgagggccacgttaaccaacagtgcttaacgcaagctgaaatcgctcacctttctcgtgacgcggttcgaattgaagaactgtatcaaacgcctcaggatattgagtggggtcttgattgccaaacgaatgaactatacattctgcaagctcgtccaattacaacgctaaaagaggaggaaacaaaagtggttgaaaaagtagaaacgccaaaaaagatgctcgttagaggattagcggcttcacctggatctgctagtggaaaggttcggaaaatcaaagatattagtgaagtttcccttgtggaagaaggcgacattctagtgaccatcatgaccaatccagatatgattcctgccatgaaaaaagcagcagcactcattaccgatgaaggcgggcgcacgtgtcatgccgccattgtttcacgtgaattcggtattccatgtattgttggatcttcgattgcgacagatgtgttaatggatggaatggatgtgacggttgatgcgacgcgtggagtagtatatgaaggaattctaaaagaagctgaaccagtgaaaaagaaagaagcggctaacgaagcgacgaacagcactgaaggattcaatgaagcgcttcttcatcagctggctccgattacaggaacaaaagtttatatgaatcttggagagccagatctgatcaacaaatacaaacatctgccgtttgacggcattgggttaatgcgaacggaatttatcttttcaaatatcggtattcacccgatgcatttgcttaaaaccggacaggaagagatgtttattgaaaaaatggcagaaggaatcacgaaagtggcgcaggatatctatccaaagccaatggttgttcgcttgagtgacttccgctcaaatgaatttcgtggactcattggtggagatgaagtggagccggttgaagcgaatccgatgatcggctggcgcggcgtttctcgctacatctcacctcaatatgaagaaggcttccgtttggagtgtcgagcgattaaaaaggttcgtgatgaatacggtctaatcaacgtttggacgatgcttccgttcgttcggacaacgtgggaagttgagaaagtgaagaagattatggcagaagaaggactagttcaaaatcaagagttcaagatctggatcatggcagaggtgccttccgtgatttttgaagcggaagaatttgcccagcttgttgatggattcagtatcggaagcaatgacttaacacagcttattttaggatcggaccgtgactcgggcattctaaacagcatgggctactttgatgagcgtaacccttctgtaaaacgagcgattaaacaactcattcatggagcacataagcatggtaaaaccgtctctatttgtggccagggcccatcgacttacccagaattcacagagtttcttattcaagaagggattgatagcgtaagcattaatccagatacggtggcagcgacaagaaggtcggttgcgtcggttgaacagcgcatgattctaaataaagttagagggttataaataagtatttacacggtgtaaccgtactggtattatataacaaaatcaagtgcgatgatgagaagagtagatgatgtgatcttacacagagagctccgttagctgaaaaggagttaaggtaacatgattgaaccaaacctctgagctgtacatcggaaccgaatgtggggatggtgtaacgggagctcccgttattgagctagggtatacgcagcttctgccgtacctgataagagtgatgtggcgacacatgactgaaccggggtggcaccgcgataagcaatctcgcccccgggactatacgtcctgggggtgaggtttttttattggttcaaaaacttatcgcgattggagctgacatgttatgaagcgtctaaatgctactcggaagaacgatctgttgctgctcacatcaatgggcattacaaatatcgggggatggatttatcatattgcccttaatctcatcctattagatcaaacgggttcagctcttgctgtgacaggactgtatttactaaagccgttcgcaactctgttcacaaatccctgggcgggcagtttgattgatcgcgtgaacaaacgtaggcttatgattttggtgaatatcgctcaggcattggtaatgcttattctcccgctactatccagtctatggacgatttatgtctttgtttttctgattaacatgggtagctcgatttttcatccaacatcaatgacctacatgacgaagcttcttcctaaagaaaggcgaatccgcttcaattcccttcgaagcctggtcgattcaggtgcatttgtgatcggaccagcgattgctggtgtgttatttatcatcggaacgccaaccaatgccatttacattaatgcagtagcattatttcttgcaggtctgctatttttattgctacctgatgaagaaacaggaagtctcatgaatagatcaagtacgatttcatttcaaatgatgaaagaagattggcgcattgtatacacgtttagccgaagcgcgatttttgttattttaatttactttctagtgagtgcagttggcataatgagctggggagtagattcacttgaagcaagtttcgcaacagaggtccttcatctggcaagcaccgaatatggatttctcgtaagtattgctggaatcggagttcttctaggagccattctcaataccgttattgcagaaaaaggagaaccgctttcgttaataggaggcggagcaatcgtgctttccatagggtatctgatatttgctttatcgtcatcattccatttagctgcaatcggctgctttgttctttccttttccctttcgttcatgaatacgggtttctacactttttatcaaaacaatattcccgttgacgtcatggggaggattggaagtttgttcgaatggattgaggcaatttttgttatcgctgtgatggtcggctgcgggatcgctgcagagctcatatccatacgatttagcgtcttagtaggctcaagtgtgatgctaagctttgctttacttcttgttggagttgttatggtcaaacgaactagtatgaggtccgaggaagaacaccggttggctaaatagtagcaatcaccctaatgttttttaaccaatacggcaataaaaaaacgatcaaaagtacaaaagtcaaggcagaacccctgtcttgattttaatgtgaatattgtttctattcttactgagaaagttcatggaatatccaaaactgtttctaagttgccattgaattcaccttaagcgtttttcataatggaattatgctgttgaggaatgtgatgattagttaattattcacacattttattttatgttgtttatccgattcactctgcttacatgaaacgggtgaccatgctgctaacagaaataaacaatggaggatcgatcatgaaaaaaatagtagtattaacgattgcatgtctactcatgtttgggaatttaacttacgcccacactggaatagaaagttctaaccctgaggatggaagtacgatcacagaggagttaaacacagtaacgctcactttcgaaacagaaatagaggaaacaagctcatttgaattacaaaatgcgaatggtgaaactgtagctgttgataacatcactgttgaaaacaatacgatgactggaacgtttgatcagccaattgcaaacggagattttgaagtgccgtggaaaattattggagttgatggtcatccgatcgaaggaacgttttctttttcagtagacgcacctgaatcagaagtggtggaagaagagtcaacatctgaagaagcaacgaacgattcagaagcagaagatacggaagaacaaatggataaagaagaagagacaaagacagatacggctgaagaggaaagttctaacggtactgtaatgggcatcgttattgctgtcctggttatcgtactcattggaagtgttttgttgatgaggaggaaaaaataatccatgttgattctaacagtaatcagtgaagcgctgctttatattagctttgcgctactgattgcggattatcttttctcatttatttcacatgataaaaagccggttattcatgttcctaaaaaagttcggcttttggctgcagtagggattgcggttttttccttcatgccgattttggatttacttctttatttatatgaggactatggaataggacaagcactgtcgtcggtattagttacatttaaagtaggtcaggcttggagttttacggttcttctatccattattttaagcctatatattctttttgttgatgatggacaggagaagagatatccattcatcggtatggttcttcttctgtttcttattctaggactagggtgggcgagccattcaagctctcttcatcctgttaaaggattcatcattcacacaatacactttacggctgttattacctgggtaggagtactttttgttataagctggttttcaaaaaacgcggcaaactggacgcaatttctgaggtggtttcatccaaccgctattatctgcttcacagtagtagggatcacagggctattgttaatgcagtttgttgttccattacaagattatcctgatgcatggatggtttcttacggacaaagtttattaatcaaacacttgctcattgttccactacttggatacgccttcctgaatggcgtcatcatgaagaaaaagcttaaagagagcaatgcatttgatcctagaccgtggacaaaagtagaatccgtgatggtgttactgatttttgccgctacgggtgcgatgagtcactcttcacctccaaacaatctggcttctctcattagcctcgaaggcgtatctccgctgtttacgctatttacaaacggcttagttccacctggtgcctctgttgaattagtcgttaacgtaaatgcgctgttgcttggcactttagcagtcgtgtttatggtggtgatgattgctggatttatgaaaaagatggcaccacttttttcgtttctaatgagcgtattgtttatcatatcaggctatttagcgttgttacaaagcgttcaaattatgtaattatgaaaccctcgagagcactgctctcgagggtttcgtattcaatctatctattcgctataatcgctctatttttttggatttacttcttttactaaaagcgagaaagcaggttgaatgaaaaagcacgcgttgaacgaaacaatggttcaacgcgtgttaagtaagatgaactaaaccttaaaatgcttattgtcgagtagaagtactttttcagtcgtttggtgagcttgttttttcgtatgctcaacgagatcataaatgagcgggctgcattttttcgctcctttaataagtagcggtacaccgagagcatctaagccaagtcctcgggaaagaccgcctccaatggacataacaaacggtactgttggtgacgtgtttgagaggataacttgatcttctactttaaaatgatcaaaaagcatgaccgtcatatcaattatggccggcacaattagtttcgatgatttttttccaattgtgtagactttatgatcatctgaatctcttccgtgaaaaataagtcgtccctcgtccttttttgttaatttgttaaagaagggcaccgacagaacttcttcacttgttaaaggaagagaagaaggcttcaaaagctgtaaatgaaaagcggctgcaatcgaggtggtgtgtgtcccaccgtagtcatggtaaatgtaaatcatatgctcatccctgtaattgaatttactaacaagtattgcctgattacagggaaacattccagtgaaagaggataagatggttattagcttttcctatacggctccaactagccataatactaaagggacggtaattatacttgccactgttgttaggagtgtactataagaaacaagttgtggttctgtattaaattcaagggaatacatcgtcgtgttagcagcggttggcatggatgcaagtacaactaaaatactactaagcaaaggatttaagccaagtgccatagtgagaagaagtgcgagtacaggagaaacaatcattctaatggagaaaaccgtagataaatcactccatttgacacttcctctcgttagtgaagcgagctgcatcccaaggacaatcataatcgttggaatcgtagcatctgcaactaggttgactgcttgcatgacgaactctggaactttgaagtcagtcatttgaacaatgatgccgagaagcacagcatgattaattggcattcgtgagatttttattagagaatctttcaggctatgtgttgctgtgctactccctttcgatgcataataaagtccgactgtattcatgagcaatgactgtatgaccatcataataatcgcatagtgaacgccttcttccccgtatgcaaatagaatgatgggcacaccatagttgccgctattcataaatacggaagaaaggatcatagcagcggatttagaacgtttcaatgctttgattctcgagataatcgtaacgataataattagaatgatcattaagagaaagcagaatataaggatataagcataatccatcgtgatgtcgtttgtataaaaggtttgaaaagcgagaaacggatacattaaatacagcgcagaagtcgaaatggatttacgatcaaatccgattttcttctggccaatatagccaatcgcaaagataataaaagccggtaaaacaattagaataacatcgatgatcttcaccacatttgtttttagtttatcgataaatgaacgacgtgaactcccactatctttgcggatagtgggagttcttcagagtataccttggtcaagcgagaaagggtatgattaaacctgctaacaagagaattaatgctccgccaagtcgggatgatatctgagcaaatggcatgagttccattcttcttgaagcggatagaacggctacatcaccagttccgcccatattcgccatacataacccagctgttatagcagcctcaatcggatagaatccaaccaacttaccaattaagccggaaccgataattgcacccaaaacgacaccgaatacggttaaaatatattgtagagtaagggcttcaagtaccgtgtttaaatcagtataagcaatcccaatgccaaacagtagagcaagtgtccagttacttgcgacgaatttgtaccactgacttgctccatcaatgacgttctttggaataatgtctgctatttttgcaatagcaacgataataatcattagagcatacgggtgtagaggaatgaagtctccaagtaatccaccaatcgcaaagaaggtaatggcggctagtaatccaattcccatcttttgaatatcataagtttgtttctcctctttgtattgaaacccttttattaattgcccgttacctgtaagggaagggaatttgttaccgagtaggttaagcatgctagcgagcacgatggcaaatacgttaccaagagcaagtgcaggcacgagcatagaaatataatatgccggatcattgcccattaactcggaataaacctgactcatcggaacagcaccagcgcccatgccaccacccataattggcattgtgattacaaggatcgcgtctcttaaagaaaagcctacaagagaacccaataaaccagcgacaacaattgcaccgataacggcccccataataggtaagaagtagcgcagaccaacctttacgaggattttcttgttcattccaaggatacttcccgtaatgagcgcagcaatatagaagttcaagaatgccccatctttcatgaatgttgtcattgtcgcgatcgaagattcaggtaaccaaccttcataaacaaggaatgctgcaccaaagatggcgataatggcgccacccccaaggtatgttttgacgattggcgtatgatcaccaatccaacctagtaattctccaagtataatcataataagtaaactaccaatcataccgcctggaagatttccagtatagagactagtaagtgtaatggccgcaaatatcacaaaccataggactgggagaccaaaaattttaatggatttcttttcttgacttatattttcggacgaggggtcaggttgattctcataatttaactctttagcagcttgcgccaatttgttcactccttttttaatgcgttgtcataaaaacagcaatatcgtaaacgctttcattgattgtttttatcataaaataattgacagaaaattcacatgttatgtaactattgatagtaatgtaattaaaaaaagcaaccagtaaggttgcttgttaaaggtaatggcgaatggtagattgtttctcaggattaatcgcatattggtaaataggtcggcctaccccataagttaacgtctcttccaaatagccaatactacttagaaactttaaatattttcttacagatactcttgagatgttcgtagttgttgcaatatcatctgtagaaaactgattagctttaagtgatagaatggtcgtgttgatcgtttcaagtgtgttttttgttaaacctttaggtaaaagacgattatctgaaggttcatgaacttcttcgggaactggaagtgtggcccggagcatgtgatcgagttctttttgattcatctgctctttatcgttaagcttgtagtaattccgtttatagttcagaagtgcttcttgaaaccgatcgaattcaaaaggcttaatgagataatcaatggcaccaagccttaatgcttgctgaatttgattaatttcggaagaggctgttattaaaataacatctacatcccgattttgttctcgtactaacttcagaaattcgataccgttaactcctggcatatagacatctagaagaacaaggtcaatctttgtggaagctaatgtcgataacgcttcgttagctgtttttgaaaggtggcttggcgtaaaaccatcgagttgctcaacgtatcgcttgttcaattgtgcaaccattggatcgtcttctactatcataacttgaatcattataaatcctctccctgatcaaaaggaacaatgatcgtaaatgtcgttcctttacctaaaaccgaatctacgtcgattgaaccttctagtttatcaatactttgcctagtaaggaatagtccaaagcccctgtgtttgccgtctttcgaagtatgtccttgcagaaagatgtcctctagtttgtcttcaggaatcccttctccagtatccgctatcgtcatgcttaataagttatcaatataagagaatgtcatgcggatttcttgtttttcacttgtagaaacactatcgatcgcattatcgatgatgttaccgagtatggtaatcagttcatgcgtgatttcaggacggccagcttgaggaatctctgtttcaaagtcgatcgttatggcaacatgtgattctcgtgcatagctcattttccctatgataaaacctgcgaatatggggtccttaatatactttgtcacactaccaatttcatctgcttgatgatcaaccaacttgctaataaaataagtaacctcttcataatcttccattttaattaaaccgaggagaacttgtaattgattcctaaattcatgagattgcgctcgtaatgtatcagcgtacatctgtacacccgtaagttgttcagctaattgatttacttcggttttatctctaaaagtggcgatggcccccacaacatgaccattcacaattagggggacacgatttgtaataatcgagacaccattaatcaactgctcttgatctagttctgcttctcgtgacataagaatatcttctagtcttgtccctggcaggaaatcgctaattttcatccctagaggatcagatgccttcaaactagcttgtttaaaaatgcatcgtgctgacttatttacgagaagaatcgtcccggttcgatcaatggcgataatcccttcatgtacagaatgtaacatggtatttcgttcttcgtgtatacgagcaatcgcgtatggttctaacccaaaaaggctgttttttatatatcgtgctaataaaaatgctccaataatgcctatgagtactccaacagttgaaccgataagaattttcctgtggctctgttggatggatgccgttacagcatctaaagaaatacccaccgccacagcaccaatctggttctgattattgtcgtaaatcggtgtgaacgcccgtaaggatttacctaacgtaccagttgatctagatatgtattcatctccattaagcgccctttgttcatcgccacctacaaaatgtttccctattttttgaacatcaggatgtgttttacgtataccttccatatccatcacaaccacaaataggacatcagaagcttgttgaatgtttgtcgtgtattcctgaatgcttatctcttcatcaggtatatctgttaatccatctttcacaatttttgattccgcaatcgttctggaaacggtaattgctttatcctctaattgattttcaatcgtttcactagtcgtatttgtaactaatagatccgtaatcaatagcgacatgatgacaaccgtacaaacgaagataataataatggtgcttaatttaaaacggtacttttgcaatgttttcacctctgcagaaaaaagaaaaaattcttatctctagtgtaatcgtttctggtgaagatgaacatatgtcgtgatctctttaggaacagaaaaaaccgctcagaattatgtctgagcggtttcgtcggtgactaatcgtgaatcttctacgtattcacaggtttcggaaggtcttgattatcttttagaggtaccttatttgtttcctctgttttctcaaaaggattgtttttcttaatgaaaaatgaaagcacaagggcaacaattgtcagcgcaagtatcacaagaaacgcaatgtttacgccataaatatctggtcgtgagatagagggctgctgctgagctgtttgagctgttgtcgtcataactgtcacaaggatcgccgtgccgactgatgcagcgatttgccgcatcgtattgttcatggctgctccgtgcggaataaggtgcttcggcatttgattcaaaccagccgttgtgaccggcatcatcaccatcgataaaccaaacatacgaatcgcatacatcactgttaagaacgtaatagttgtcgatgtgtctagaaatgagaacccgagcgttgcgccggttacaattattaagccaacaattgcaagaagacgcgcaccgattcgatcaaaaatacgtcctgtaattggagacataaaggctgtaatgacggctcctggaagtagaacaagcccagactcaaatgcggtgaagtctctcatgttttgcatgtagagaggaattaatgtttctgagccgatcaatccaagaaacatcatcatcccgattatggtcgtaatggtgaaagttttatctttaaacactcgaaactcgagcatcggttttgataggcggagctgtcttaaaatgaaaatcgtcagcgtcacgataccaacgataagaacaacgatggttctcatgctgctccagccaatgtttcctgcactcgtgaacgcataaagtaatccgccgaatccgattgatgaaagaataattgagatcggatcgacttttggaaacgtaagctctgttacatttttcataacgaaatgggcaactgcaataatcataatagcgagtggtaacatcgcccagaatagtaagcgccacgaatagcttgctgtaatccaacccgataaggccggaccaatagcgggtgcaaaggaaatgacgagtccaatatagcccatagcagcaccgcgtttattcactgggaaaatcataagaaacacggtttgcataagtggaagcatcacgccagcaccggcggattgaatgacacggccaattaacaatacgccaaagttcggggcaaaaccgccaacaactgttccgacggcaaaaatactcatcgcggaaataaatagttgtcgcgttgtaaatcgctcaagaagaaaagcactgattgggatcataattccgtttacaagcataaagacggttgtcagccattgtgctgtgttcgctgtaatgttcatttcctccatgatcggtggaatcgccgtaatcataagggtctggtttaaaattgtaataaacgctccagctagtagaagggctgaaattaacactttattataaggtttggtggtcacgataggacctcctctcgtaatctcttattattttcattattagtagttgagtagttttgcctcaatcaattatcaaattatactctcatcatcgtctcgttacaaacgtcttgattgtaaaaatttcattacggtcgagtggggttggattccatataatggtttaattaggtagaatgattctagttagctaataaaaattgattttggccaatatatcccgaatttggccaataaaaccgcattttggccaataaatcttgaatttggccaataaaccttccgcgggcacgctctcgcacgcggaatatttgctctggcgtgtttttgggaggttcctcgctttcggatctagaagtatatcaaaagcggagtcttcagggcggcctgggatttacagaagagaagctgagtgccatttttcaacagaatttcgagccaattgaaatgaaagagatgaaacgggtcgatactggaagcggaatgtttggcgttagtggtctctggaccgcgcgatttagacttcggagttcatgatgatgaggtaaggggtgaagaaaagtgagaaaagtggaagtgcaggaatttaaagagatttggcgtgaactttttttgttagaagcgagaaagatcgagcaagtttatggcgataatatgattgaaattcatcatattggtagcacggcggttgaagggttaaaagcaaagccagtgattgatctattgcctgttgtgaacgatcttacattagtggatcaaaaaaatccggagatgaaaaaacttggctacgaatcgcttggtgaaaatggacttactggtcgccgcttctttcgaaagggtggggatcagcggtcacatcatgttcatctttatgaaaaaggaaacccggatattgatcggcatctggcctttcgggattatttaattgcgcatcccgaagaccgattacgctatggtgagaaaaaggctaagttagcagaacgttatcctaatgacatggaagcttatatcatgggaaaggattcacttgtaaaagaaatagaaatgaaagcactcgattggtattgatcaaaataaggtagtggatataaaaaaagagagaaaacgagccgtaaactgggccgcgtttctctctttttttatttgcatccatttctgatgaaaatccataaataggttgcgcgatataatgataatgattatcattataaattagataaacatattaacagcgcttgaagcaaatctagtaaagggaagagtgagatgaaaaaaaggtatctaatcagtgtatttattttattatcatttatatccctgtttatcggggtgaaaagcatgtcgccactcgaggtgtttaagcttacggatgaacagagtcaggtgttttggattagccgtgttccaagactcgtcagtattattatcgctggggcaagtatgagtatttgtggacttattatgcagcagcttagtcgaaacaagtttgtctctccaacaacggcaggtacgatggatgctgcaagacttgggattcttgtttctcttattctattttcctctgctagcttaatgcaaaagatgatgatttcctttttgtttgctttagcaggtactttccttttcatgaaggttctcgaccgagtgaagtataaggatgctattttcattcctttagttggcttgatgttcgggaatgtgatcggatcagtgaccacgtttttcgcatataaatacgatttaatgcagagtattggatcgtggctgcagggagatttttctgtcgtattaaaaggtcagtatgaattgttatacataagcattcctggtcttattattgcttacatatatgcaaaccgatttacgattgcaggaatgggggaggatttttccgttaatcttggcttaaagtataaacagattgttaacatcgggctcgttatcgttgctttggtgacaaccgttgtcatgttaacagtaggagccattccgtttctcggtttaataatccctaatatcgtttcgatcatgatgggggataacctgaaagctaatctttttccaactgccatgatgggggctgtgtttgtgttaatctgcgatatccttggaagagtgattatttatccctatgagatatccattggtcttatggtcggcgtcattggaagtgttttatttatttacttgttgttaaggagaagagcttatgtctaaacgtatgaaaaacagtctcctttttgtgctcagtctattgcttataagcgcgtttgtgttggtcgacctgggacaaaatgtgggatacattctgccaagacgtgcgatcaaaattgtcgccattattgtaacaggaagtgccatcgctttctcaacggttatctttcaaacgatcacaaacaaccgtatcctaacacctagcattattggacttgattctctttatatgctgatccagaccttaattattttcttatttggatcaatgaacattcttatcctgaataaaaacatcaattttcttctatcagtagttttaatgatggtctttgctagtctattatttaagcttctttttcgaaaagaaggacagaatatctattttctgcttctcatcggcttaatatttggaacgctatttggaagtctctcatccttcatggaaatgctaattgatccgaatgaattccaggtcgtacaagatcggatgtttgcaagcttcaataatgtgaacacagatgtcctgcttatctcaattgctgctttcgctattgtactggtttatgcatggaaatacataaaatacttggacgtgctttcactagggcgagatcatgccataaatcttggcgtcgattatgattacatcgtgaagcgattgttgattgtcatttccatccttgtttcgatatcaaccgcattagttggacccattacatttctcggattgctcgtagtcaatgtggcacatgagtttcttaagacgtatcgacatagctatttaatctcaggctctatctttattagtatcattgctttagttggagggcagttgatcgttgaacacgtctttacattctcaacatccattagcgtcatcattaattttattggcggcgtgtactttatttaccttctacttaaggagagaaaatcatgattgaaatcaaaaatgtctcaaaatcatatggtaagaaaaaagtcgttcagaacgtttcactcactgttcaaaaaggcaccattacttcttttattggtccgaatggtgcggggaaaagtacgcttatttcaatggtgagtcgcttgttatcatgcgatgaaggagaaatctgcattgatgggaataacgtcacaaaaaccaaaagcaatgagctcgcaaagaaaatatccatattaaaacaagccaatgagttaaacgtacggctcaaggtgcgggaattggtttcatttggccgttttccttattcacagggccgactgacgaaagaggactgggcttatgtagatgaagcgattcgctatatggagcttgaagagatgcaagatcaatttattgatcacttaagcggtggccagaagcagcgagcttttattgctatggtcattgctcaaaatacagaatacatcattctagatgaacccttaaacaatcttgatatgaagcactctgtacagattatgaaagttttaagacgattggcagatgaattaggtaagaccgtcttgatcgttattcatgatataaatttcgcgtctgtttactcggaccaaatcgtcgctcttaaaaatggagcgctaataagagaaggacgaacggaggatatgattacaacagaggctcttcaagaaatttatgatatgcatataccgattgaacagtatggtgttcatcgaattgggatttatttctcttaaatacaaaattaatgttgacaaatgatactgataatcattatcattaagtcaggtgattccagtcattcttttttataagtttgattgagaataattatcatttgttagtccttaaaaaagaaataaggggagaagaagaatgagaaagtggattttaatcttagcgctatcagcgttagcgatgattgtatcggcatgcggcacgaataattcagaagcaacagaagcgacagcatcttctgaaacagaagaagtgatggtgaagcacgagctcggagaaacaacggttcaaaaaaatcctgagaatgtcgtagtctttgattttggtacattagatacactagataatttaggtgttgaagttgcaggagtacctcaagcaaatatcccatcgtacctttccaaatatgaagcagatacatatgagaatgccggcggtttaaaagagccagattttgaacagatcgcagaaatgaatccagggttaattattatttctggcagacaatcagatgcctatgaggaattaagtaagattgccccaacaatttatatgggcgttgatacaacggagtatatgtcttcgttcaaaaagaatgtaacgactctcggtgagctttttggtaaagaaacagaagcagaggaagagctagcgaagattgatcaagaaatcaaagcggttcaagatctaactactgaaatggatggtaaaggattaattacacttgtaacaggtggtaaggtaagtgcttacggagctggctcacgtttcggactgattcatgatgttttaggagtacctgaatcagatgggaatttagaggcatccacacatggacaaagtatttcatttgaatatattgcagaaaagaatccagcatacctctttgtagtcgatcgtgatgcggttgtcgatggaggagaaacttctgcgaaagaagtaattgaaaatgaacttgtgaaaaatacagatgcttataagaatgataacattgtctatttagatccgaactactggtatttatctggcgggggacttcaatccgttacagaaatgattagcgaaattaaaaaaggaatcaaataacttgaaagcccccttcgaaatgttcggagggggcttttgattaaggctgatacaccttaccttttgcatcaatgtaaaccgtgtgaagaatcgttcgctcaaacgatgcgcccttcgtcgttttaccatttacatcaagcataatgtggtaaactccttcacctgcatgtttaattggaaagggttttagtgagttgaattcttcttgtgagactttcttttgcttcgtttttccgttttgactatattcaattacgatcgagccttcaatggatttttgatcaaccttttcgctgtctacttgaagcttcacttctttcgcgttactcatctgtatttgaaggtcctggtttagctcactttcataagcaacctgcattaaataactttctttcttgggctgtttcacctttagtttccacgtgcccggcgtcgggctgttcactttcatttgatgatgaaacgctccttcaaacatgccgtcatcttgagatgtgtttgttaccgtatacgttttttgatcgggtccttggagggtaattacagaatctttgttttgactcatccaatcaattgcgatgctttttgtgtttggttcgatctgtaccttttctacttttgttccgttaaattcaccacccctaatgagaacactggcttcctcagaagcagccgtttcattgatagaagtgagcggtgcaaatgtagggatagactgtgttaagtaaggttcaaatgaattaaacgtagcgcttcctgttctaatggaagagtgatcccaatttccaacgcgaacctcatttccataggggagtctggagctattaacggtaacagccccgtcgttgggaccatatggcctcaaatacaatccaccccagtagagcgcgcctccaaaactgccccaactcgttcccacaaatgtataatatggtgtggcggaaatattcggtttcgaatcagttacggagcggaagtagctcatgtaaccggtctggagcgaataagtcgcatcattccgattcccaatgatggcagctagccacccggcccagttgctgtgggcaaggtcagcaagttgggatcccttatgtggtgtggagagggtgattactttatccacatactgctgcgcatttgcatgaacgatggcagcctgggcatcaacaccgcctttactgtgcgtcacaagaatgactttctttccaaagtaagcgttcatttctttcagtttgctagcaagcagctgtccgttatcccacatgtttttcgtaggatataaatcaatgtaagccgtttggtagttcttgctgtatgtaagttcatccatgtcgttttgatcaatccaggttttcgaagagctatttaatccgtggacaaatacgagtggaagagagccagacttaacggaagtgggttcatctccaatgtaccattcgccgggtgttccagttgcatcacctttaccaataattccggcttgtgcgtcatgggcgaaggggggagcaagcaggaacgtcaacaccaatagtgacaccaaccatttcttcataaaaccctcctatttgaaatgagtcttatacctcctcaactatatgaatattcagtctattaatcaaggagccttttcactaactttcttagttggagaataggtcaattgaacggaaagcgctgttcattcgacgggtttctatgaagttcttacaatcgtttcttctctctttgaaaagctgtgtcaaaggtactaaacaacgttccacataaaaacgatccagacctttaaatgtctgaaccgccaattctttcgtttctactcgttacctttttcaagaccattcttttcaataatatcatctgaaaggcgaagttgctctgctaccttttcgatttgatcttcacatttatcaaacgatactttctcttcactagaaacgtcatagcacgtgccgtttccagcttcctcagttaaatcagcttcgtaataataatctttataacggaaggacccatctcgaaatgcggttaaattggattggtcatcaagaagagagctccccatcatatacggcatatccatatttaacatgtctagtattgttggagcgatgtcgatttgcccaccgttttctttcatcacctggccattaccgtcattcggttgctttatgaaaagtggtacccgacgatcaagttcaaacgcatctacagcactttcaacattcgcttcctttctcatctcgctaccttcgttcgtcagtccgctatcatggtcaccatagaaaatcacgagagagtcttcccatagtcctttttgctttaactcgtcaatcattaacccaacggcctgatcgacataatagaccgtttgataatatcgttttaacatcggatcatcatatcccgataaatcaagttctcgctcatctttaggtatctcataaggcgtgtgactcgtttatgccaccataaacgcaaagtatggttcttttaacgtttccatatgttcaatcgatgtagtgagaaagtttttgtcgtttaacgccatcccgatttttttcttgttcggatagtctttgttgctaaagaagtgattgaatccaatgttctcatacactttatcacggttccaaaatcctttgtcataagcatgcatggctgctgtgtcatagccattttctttcagtaactccggtaatgaaccaaactcattttctggaaaacgtgtataaacggagccggatttcaatgggtagagcgacgtatttgttataaactcagcatcagaggtccttccctcatgcgtttgatgataaaacgaagagaagtacagcgtttcatcttttagcagatttaaattgggggtaagctctttgccgttgattttttggtcaatgagtgacccttgaaatgattccaattgaatcaaaaggatatttggtttcttaggagacccttctgtgttttctgacgcatttttctggagcattttttgttgttccacggttaaattgtcttctgagttaagcgcccccctcacacctctccaaagatcaataccgtgatagccccagaagccaagctgataatagtctcgcatatctgaaacggattgatttagccacttttcttccttaacagcgctataggttatcggtgtcgcaaacaaaacggccccgataagaaatgtgacgcctgccgttatgctccgtttcttctttgttacttcatacgtcttctttctcgtgaaaaagagtatcaaaagaaagatcacaacatccgcgaaaaggaagaaatcttggaagctgattagcgccataaatccaccgccaacatcgctcatctgaagcatctgtgaaagaagggacacggaaagcaaatcttcaaagtaacggtaataccagagatcggatattaaaagaagactatgtaaaaacaaaagcgtgagccatatccatcggcgcttcttccattgaatgagaagtgtccagcttgataaaagtaacatgccggcaacattcataaggagaaactgcaatggaaaagccgtatttgtataaaagctaaagagaccaaattttagaatacctagaagtaaatagatagcataaccgaaaaatatcatgggatcctcctaacgtctgtcatcattgtcgactaatctttaccctgaaaggcacagtaaggaacgttagaatgtgttatatgtgtattttttccaacaagtgtaaggagcttacgtcttttttaagaagttttattataatagaaagtaacaagacggggaggggatcacatgacgctttctttatcgttacaggaaatcgcctggaaacggatcattttctttctgcttatcatcattgtgccgaattatcttgtgatgcaaatgcaggtggttggtcctattgatgatcgagtgggcatcggaaccgctctagatcttatcgtgattttaccattgctactctattttttcgggtttcgaaaaagagtctcatggattctgttgtgtgggtttattttctctggagtagtgcttgccaattggatgatcccttctcatgcggatgctcatctcacgtattttaatgccgtggttgttgttcttgaagtaggtgtgatcgcttttgagctcgttctttttatcgccattcttaaaaggatccccttattaataaaaaactatcaaatggagaagacgatccatcatcattttcttctaagcttttcaagagcgatccaacaaacgtttatctttcaaaacaaacgactaaataaattcggttttctacttcgattagtagcgactgatcttgccgctatttactattgtttatttagctggagaaagaaaaagcaagcaagcgttgaacacgtaaattcgtttacgtttcataaagatggaggttaccttggcgtattttacatgcttgttcatgcgatggtcattgagataattgccgttcacatgatggttgcacagtacagtcatgtcgcggcatgggtcgtgacaatttttgatctttatgctctcctttttatcatctcagactaccaggcgattcgcttatctcccgttatccttagtaacaaaggcattcattttcaaaaaggcattcggcaatacggatttatcgagtggaatacggtgaagggaataatggaaaacaaaaaatctcctgaagaagtgaagcaggatcgagcaagcattgagcttgcccttcatggacttgaacgagagcagcttccgttcgtaattgagctgaatcgatcgatggaaattaaccaggtttttggttttaagaaaagcgttgagagattgtatgtgaaggtggatgacccttatgcgtttcgggataaggttaatcactatctaggaatgtgaaggtagagagttaaatgtccttgctttgtttaccctgagcaacatactgggaataccctccaaaaaggagtggtaccaatggcttttgattatgatcttgattttgacaatataaactttcgagaacagcctgagaagtaccgcgttggtcgcggtgagcagggggttctcatggtagagccttataaaagtgaaatccttccacactggcgttttaaaacacctgatatcgcaagggaatcatcagagaaaatttatcaaatgtttcgcgagtatcaggaaaacgatgatttcgtagggatggacatggcccgcaaatttattcagatgggctatacgagagcccgccgctatgcgaattataaaggtggtaagaaatacgacagcgacggtgatgtgaatgagcgggatattgatgaagaaaaggccgaatcagcgaggatttttgaagagaagtggaagattgtgcgtacggatgaagcttatttaaagaagaagaaggagcaccagaagaaatatgggtaatgggcgcgttgatagtagtttcgcggaattaatttaaatatcgcggaaataacggtgtaattcgcggaattaatgtgaaaagcgcggaataaattcgtttttcgcggaattctcgacaaataggaagctttttcgtttaactcagctcgcggcggctgagtttttactatgtttgagccactttctttagagattttcattcttatattgtctcaatagggaaaataaggtattgtatatggaaatatctgaaaaaaggaaggtgtagagatataaaaacgaatcgcctacacactacacgtcgcttacatggaataggagagacagaaaatgagattcaaagactttcacaagaacattaaaatccgtctgatcgaaaactttattagtcgctttatcggaagtatgatttttccctttatgtcaatttacttagcggttcactttggagcaaaggtcgcagggctccttttattggtcaatgtgtttatcgggataggcattaactttctcggaggttatttcgcagaccaatttggtagaaagaaagtgatgctctttgcggaaacgcttcgtttcctcgcttttttaacgatgatgatctgcaattcgccgtggtttgaatcagcatccattacatttgcgatgatgactgtgaatagcatttgttgggggctagctggtccagcgaaccaggcgatgctgattgatgtgagcacaccgccacagcgaaagctgatgtattccatttcgtattgggcaaataacctttcgatcgccgtagggggaatacttggcgcgttcctatttaaagactacttgtttgaactttttctatctcttagtattgcagcagcagtcacagcattcttagtcgcattcttcattgatgaaagtcataaaccagttgtggaagaactgaaaccagctcaacacgtgatgcaattattatctacctataaaagagtgtttcaggatcggctgtttgtcctctttaccatcgctggggtacttattctttcaatggaatttcagctaacaaactacataggcattcgccttagtgaggaaatgccaactcagcaatttcttctttgggagttcgatggtgttcaaacgatggggtttttaagaagtgagaacacgattatggttgttattcttatgctgattgttactagaattccgcattcactaaaagataaatcggtcctcgtttggagctgtttcttctttacaatcggatacggtgttctagcgtattccaataacttaacgcttctttttctaatgatggcgttattaacgataggagaagttttcagagtccctgtcgaacaatcgtatatggcagccattccaccggacgatgcaaggagttcttacatggcgtttggaggattaaagttcaacctctcgatgctcgttgcatcggtaactgtttcgcttggtgcggtcttttcttcgatgctgatggcaatcgtgataacgagtattggtttaattggcacgctcatctttttcatgatcactcctgaattagatgctagaaaggaacaggcggaattaagacaagcgggataatcgtcatataaatgcacttttaacagaaaacactgacattcatttcctggaaaatttataatgaaattattcgaaccaaaggagatgatgaagctgaagaaaaggccagaagtggtaatcaatgtattcgcttcaatggatggaagaatgacgacagcgccagggcataacgtgatggaatggacgtcatacggtgtggacggtaaggcgaatgatgaagctcataaactatatgatgaattaaattgtgatgcgctcgtatcaggaagtgaaagtttaattgtttggagctcagagtgggtagagcttgaaaatccaattacgacgccacaaaaatcgaaagcgtatattgttttcgatggaagagggcgaatggattgggctcaaacagatggactaatcgttgttacaagagagaatgtgagccaggcctatattgagcagctagagatgaagggaattacatacattaaagcaggtgatggagaaaaaatcgatattgaacttgctcttgaacagctttatgaactaggatttaggcgccttggtattagtggaggcggtacgatcaatggggctttcttaagagcgggcgttgtcgatgaaattagcgtagtacttgcgccgttagcgataggaggtcgaacgacgccaacgatctttgacggtgaaaacctggattccattcaacaagccgttccacttgaactgattgaagcaaagcccatcggtgatgctgtttggctttattatcgggtaaaaaaataggtgatgatacaaaaatgtttttatccaagtcctcgaagtaaattcgaggattttttacttcatgcctttagggaaaatgtaaatggtggtaacatatgtaaataggtcagtattcactaaatttctaagttagaaaggaggttatcgatgctttctaactacactgatctacgtatgaaagaagattcccttttgaaaagtcaaagtagagaatacagcctttatgcgggtgagcgtttcattggtagaattgaagaaatgaagacttcaatagagttgaagaatcaattattgaaattaatcaatctgcatgccgtatcgagtaagcatttttatgtgagtgatggtaatagagaagtggttgctcaacttaaaaaagccaggggcttcgatagggaaatagaggttttcggagctgatggtaggttgctttcggtactaaagcaaaagttaggaatcaaaaatcaaaccatttcggctcaattacctgggggaaagccttttttaaaagcggttggagaaaatgattccttccacttaatagatgaaggaacaaaggaaatcttggcatctattcacaaaaagtcggctcgatcaccaacattaaaggaatatatgttttctggtggggattatcatcttcaccatagaaaaccacccaattcattagagcaaatcatccttatcggaatggctgtcgttgtaagtgatcaattacatcatgcttaaatgctaagataactttaggatgaaaatggagatttcctcatgacaaaaacaaaatgggcattggtccttctcgtagtgatggacgtggtgctgattacaatggctcttacaaactacgtctttttattcttgaaaccaacgggtatgttgatccctctcatcattcatattctcgtattcgctttgattggctttcgctcgcctcgaattccaaggtggcttacgattattttcatcgcaatcggagtgttcttcctacttatttctagtgttatggtctggttaacggattacagctatacgacgattaagtcacaaaagaatcaggcgcttacaattgaatatcgagattttacgctaggggaaacgacttatctttaccacttttacaaaacgaattacggaatgatcggcaagcgtcttgatgatgaatccattcgcatggttgttcaaagcgtaaacaacccggggctagatgtggaaacggcgctcggtttaaccaatgcagtatggattggagatcatacggttcgttttccgacagcgcaaggaacgaaagaagtccacctcaaatcttcttcttcctcaaacacggcagaaactaatagtgctaatatagaagcatttatcaaaaaggtggaaaacaaagaggatggcgaaacgataacagtaaatgggtatcaattagttgttcgctatgatgagccgtcaggtcaaagctggattgacgtatcaagtgatgatagcgagggcgcaataccaaatcagcagtgcactcgcattgtgcaaaatgaagaacgaggatattttatgctagaagagtgtacgcatcgatgggaatatgaattatatcctatagaagaagcaccgtgacaagcgtttaaatatgataaaaggagtgatcattatacttcgtttattagaaaatgtacaagaagcttcagtattacttctactaatttgcgcctttttttactatcgtcacttacaaaaaacaaagcgtgtaagaaagctttctgtgcttgaactttccatgcttttcttaacgccgcttgcctatctgctttgggcgggaagttatttgctaattattctcgataatgcatagaaaaaagccacgccctaattcaaattaggatgtggctatcgttcgttatcgtcttaacttctgtagcagatgaagaatctcgatatacaaccatacgagcgttaccatgagtccgaatgctccgtaccattcgaggtgctttggagctccgcggtttgcgccgttttcgatgaaatcaaaatcgagcacaaggttaagcgctgcgatcgctacaatgaacaagctaataccaattccaacgagtccgttcgaatgcaggtaaggaacgttggcatttaagaaaaggttgaggccaagatcaatgatgtatacgacgaaaatcgcaagcgtagcggagacgatcattaatcggaagttctttgttaccttaataattcgagcggcatataagaagagcagtacgcccatgacggaaaaggtaagagcggcagcctgaataacgataccagggtagcgtgcttctaaaatggctgatatcccaccaattgcaaagccttcaagcgttgcatagatcgggcctgtaattggggcagcacgatgaaagaaggtggtgatgagggcgaaaatcaatccaccaatcgcgccaatcaccatcatcgtatacacatcttccccttgtgcatagcgataccatgtataaatggatgacccaagcaagaagagaaataagaagaacgtttttgcgacagttcctccaatcgtcatcgcttcaccttgatcacgtgttctgttaaatgtgttgttctttaaaacgggatttccgcttcgcatcatataaacttcatccttttttttgtaataggtttatcttaataggtatgttccctatttcgattctaacctaacttacgatgaagcattttgaaaagtttcaggaagtttcttcctcattaaaacatgggggatgccgtcctccataaaaacgtctgaacgagtttcgtagccaagcttatgataaaaaccttctgcttgaacctgaccatgcagtttcacgttcgtaattcctttcttaattgcgagctcttcaagcttatgtacgattaaattgccaattccaagtttacgatgtgaagctagaatgcaaattcgttcaaatttcccttcgccttctacaatccgccatctagctgtaccaacggctttcttttcatctaaaacgagaatatgttcggctgtatccagcgtatcaaattgatcgtattcttcatcctcaggtgttccttgttcatcgataaaaacgtcttttcgaatgcggaacgcttcctctaaagcttcttctgtttcaattctaactgcgatcatgattcttatgcctccttgatggatcagttctatagattgagtataatcattcaagacgctttctgtaaatgtaggagtatttgaatatatctagataggtggtggaagagaggtttcttgatgaataaagcgcatcgtgtataattaccgtgagatccgtgcattccttatataaggagtgagcgaaaatggtttttaactttgttgcggcgtttctaattccgtggattgctggcatttatgtcgtgaaaaaggatgttaggctttttctattgattgccccttttgcagcatttgtagcgattgtttttgatgtgctcggttttcacttcggcttctggcggattgatcctgaatatgaaacggaagccattgcagcaatgccaatgtattttggcatttatcccattttagcgggctttttgtttctaaccgtccaacgccttcgctttcatccgttggtcgttatccttttcttctcactgatcacgacaatcattgaaggtaccggtgtttggattgatcttgtacactacgctaacgggtggaccatttattggacctatgtttcctacttagttgcctatgtggtgtgctatggttactatctattattgaaaaaacatgttcctctatagaaagaagcaaagcccttcctcatttgttggaagggctttgcttattggtaaaatgaattaaagcttcactttaagttcctgaagtccacgtagtaaaaacatatttcgccattttgcatcttcagctagctgaattgaaggaaaggcttgaagtaacttttggtatgcgattttaccttctaatctagcaagaggagcgccgagacagaagtgaatgccgtagccaaaggcaacgtgcggatttggcttacgtgtaatatcaaactggttaggattcgtgaatttcttctcgtcccgattggcagaagagatcgaggcaaggaccatatcacctcttttaagctggactcctttaaattcaaaatcttcctcagcccagcgagcggttgagaaatcaacgggactataatagcgaagtgcctcttcaattgctccttctattaaagaaaagtcattttgcagtagcgctagctgatcgggatgttcgaagagcgcaagcatgccgtttccgattaagttcactgtcgtttcatgaccggcaataatcaataaaaagaccattgaataaagctcgtctgaacttaatttctccccatcttcttcgtgtttaataagattggaaattaaatcctctcgtgggtcagcttttctcttttcaaaaagagaggtgaggtattcggtaaattcccgaacatcgttcataaattcaccttccatgttatcggaagcagaaacgatagagtttgaccactttctaaatttatctcggtcttccgttggaacaccaagcaattcagagataacgattattggtaatgggaaagcgaagtcgtcaattaaatcagccacatctttttgtttcatctcatcaattaattgatcagcgatcgcttcaatacgaggagcgagttccttgatcgcttttgggttaaaaccaggttgtaccagtttacgtaaacgcgtgtgatcgggtggatcgacatcgagcatcatatgatgaaaaatcttcgtttcaagcggctcttcttcgctacgagcactttttgaaaatagttttgattgatctttaataaaggaaggacgttttagtagtgtaaggacatcgtcataagtcgtaacgagccaggtgttgtttccatttgagcttccaatggatgtaataggctcatctttacgcaatttttcatagtattcatatgcgccttctttaaagtttgattgataaacagcttcagcagattgcatacgatgttcctccttcaatattcataatctggtgtaactgactggtcagtcaatacacttagtatagaggaaaaggaaatgtttctcaacaaacagtatgaattgtcacactttcttttgatttcaacgtgatgtcgttttcattatgacaaaacggaaacaagttatcggtgtgacttgttgaggtgagcgttcagttttacactaatgatagataatgtgaaatattgaacgtgtgaatggagatgagggagatggagaaagaaacaatcgagaagatttgtacgagtgccgtttcgaagcgagatttgcttaaggcgagtatgcctcattatttgcttcgcgcgatgttagcaggagcatacataggatttgctctagtgttaagctttacagtcgggcagtttttctatgaggttcattcacctgctacctatgtcatgacggctctgttttttggaattgcttttattctcattgtgtatgggggaggggaattgtttacatcgaatacaatgtatctgacaattagctctctgaaaaaagtaacgtcctggaaggaaacgcttctcgtttggatgacgtgctatggtgggaattttctgggaatcctgttatttacgctattgctttactttagcggggtttttcaaacaattggagaagatcatttactattaacggttgcagaaaagaaagtgacacttccaacttcttacttgttttttagagctatatttgccaattggctcgtgtgcttagcggtatggttaccccttcgtgtgaaaggagatatcgcaaagattatcatcatgatgcttcttgttttcaccttttttacatcaggatacgaacacagtatagcgaatctcgcggtcttccttatttcattcacatctcctcattctgaactgatcaacgtagcggggtttattcataatcttattcccgttacccttggcaatattgtaggaggagggttctttgtaggcataatatttttcttcttgaacgaacccataaaaaggaaggagatccaaacaaaaccagttttaatcgcttccacaaaaatatttaataataaattgtaaaaattcagtttttcttgttggaaggtggcgataagagtggtaggtttaagtataagggagagatgctcctctcttctctcatccaggagaggaagtggccgacgctcgatgagtcaacagctattaagcaaatatacaaaagtcttgtatcaggcactggtagccattcaattcattaagcagcataaggaaaaggcatgtgacatacgacaaatctccatactgacaggcttttcagaagaagccatattggaggcgatggaatttggggaatatgaacagcataatcggcacggaaaagctctttaacaaacgatcaggatgaggaagagagtgagcgtcctcctaatggaaggaatgttttctgtcgaagcgtataagctaatggaagggggagttactatcagaaattgattgtaactctttttttttgatgaataagaggtggtgggtaaatgacagcgcttttgtccacagatcgaattgtgttacgaaaaatggaacatgaagacgtggattctcttctggaaattttctcagataaagaagtaatgaagtattacccatcctgtaaaaatcgacacgatacggtgaagtggatcgagtggacgttacatcactataatgtgtatagctttgggatgtggatcgttgaagacaaagaaagtggtcaatttctagggcagtgcggcctcgttcttcaaaaattgggtcacggtgttgaggtggaacttggctatctttttgcaaaacgacattggggaaaagggtatgcgacggaagcagctttcgcatgtaagaaatatgccttcaacgagttaggtctttcaaggcttatctcattcattgattcacaaaataaagcttcgctaaaagtagcgaagcgaatcggtatgacctatgaaagtacggttacgaaatggaataaacagctcgatcgatatgtctgtgaataggatagggaagtggtgtggcgatttttatcctctcccagcctggaaagcgggataaagtttcattccaccgtcggcaaataacgtaatgccagtcacataacttgcttcatctgaggctaaaaaagcagcgatggaagcaatttgagctggttccccaatttctttcataggaatcatggatagcacgtctttcttcgtcttaggatctgaaaatttttcttcattaataggggtattaatggctccgggaccaatattattcacacggatgccatatggcgcatattcaagcgcaagcgtctgagtaagcatcttcatcccacctttgctcgaagcgtaatgaacaaagtgaggccacgggacaacttcatggacactagacatgttgataatcgatcctttgatttgatgttcgatcatatagttaatcgctttggttgagccaagaaatgttccggagaggttaaccgagatcacttgattccaatcgtctagcgtcattttgtgagaaggaatttctttttgaatgccggcattgttcatcatgacatctaatgtgccaaaatgcttatgcgcagtagcgatcaagtgctcaacctgatcttctttcgacacgtctgcttgaacagctatcgactctccaccagcgcgtttgattgcagccactactttctcagcttcatcttcttttgacaaatagtttacaacgaccttcatcctttcttccccgaaccgaatcgcaatggctttcccaagtcctgaagcagcgccggtgacgatcgccacctttccatttaactccttatacaccaaattaacgaacctccttattttttggtgaagccaagcatgacgccaccgataataatcaaaatggatcctagaatgacaaatatgagttgtttctttgtttttcgttcacctaggagaaaaatcccgcctagcgtcgaaatgatgataccagtttgagaaagcgaaaagctggtagctgttccaacgcgaggaatggacaaaagaagagcaaggtttccactcgcccacatcagaccaggtatgccgttacgaattgtatatttgttaaagggtttgtgatgaatgctttgaaggagtgcgcctacaaccataccaattgcctgaggcagaatggcagtccatccgtcaatagaaaaccacctgataataaccacgtagccgacatatcccgcagttgagagaagtaagatcgtaaatccttttgccaaatcactctttccgtctgcttcacttttgtccgacttctcataagaagtgaaaatcaccccggttacaataagaacgagtgcaccgataccaatcgttagttttgtggttgaagaccactcgccaaatgccatgaccccgaacaatgatgtaccaacaagttgaagtccagttgaaatggggagtgtttttgatacgccaagaaaggctacagctttgaattgattcatttgcccgacagaccagaataagcctgaaataaagccaacaatcaatgctggcgttgtaaaattcggcgtggtaaaaaagtacaccacaatcgaaaagagaagggcaccaatagtcgtaccaacaacttggttgtatggttcaccgccaagctttgtactaacgagaagaatacttccccacatgaccgcgggtattagagcgattagaatttcgatcatttaaccacctgcttattttaaaaaggatgggatagcactcttaacgtgtcactttattaacgtttttatccgttcgtggtaagacagatatcgatatgaaagaatggcaataaaatacatgtgggaaataaagaggactttaggcatgaaaaaagaatttttactatgactaacttactaatttcaaaagtgtggtgatgctttcaatgctacttacagccaaaaatttacttctaaatctcttgctcgttttcgccccgctaagtattattcaaattctttatttgttgaagcacacaaactttttgaaaaaatcatccggttggctacttacattatttcctggtgtagcgattatcttgtgtatggtttatcccgttgtcgtggatcataattttatcttggattttagaagaattccgtttattctcggtgcactatacggaggtaagtgggtcgcaatcatctaccttatcgtgacacttgcctatcgttttactttagggggaacgggtttttattcaaccctgctatcgtttactctcctcaccgtagtcgcgtcaattgcctcatcgcattttcttaaatacagtttgaagaaaaaacttctcgttgcagcaagtatcgatttaatggtaggtgtatcatcgactgttatttccttaacgttctttgatacgcaaatttatacgtcttcttggattcttttcaatatgacaagtcttttgggagtgctactagccacacttgtctatgaagtttttctaaatcagtttaaattattgcagtcggtgatggaaggtcagaagttagaagtcgtcagtcatttagctgctagtatttcccacgaagttcggaatccattaactgttagtcgagggtttcttcagttaatagaaaatgaccttaaaagtaaacaaacgaaagattatatggagcttgcgataaatgaactcgatcgagcgactgaaatcattaatgattatttaaccttcgcaaaaccgtttcctgaagatatagaggaaattgatgtcgcaagcgaaatcgcctacagtgtaagtgtcattacccctcttgctacgttaaaagatgttaccatcacgacgaaaattgaaatgccaccgacaatgattcaatcagaaaagcgtaaattccagcagtgtttgatgaacatatttaaaaatgggattgaagcgatgcctgacggtggcacacttacagtcattactgcaatagaaaatcaaaagctaaaaataagtatagcggacacggggattggtatgacggaagagcaattaagtcgtatggggcagcctttttttacaacaaaagaaaagggtacaggtcttggaatgatggtttctcacagcatcgtgcaagcgatgaatggggaaatcatttatgttagtaccccaggtgtgggaacgaccgtacatcttatatttgagatatagacagaaatagaatgagaggttgaccgaattatgaaacttttagtagagtaattcgtaaagaatacaagaaacaattaaaacaaatggaggcattcacatgaaaaaattctataaatccactacaaacaaacagttatcaggtgttatcggaggagcaagcgaaatctttaatattgatgcaagcatgctaagaatcgcttattttgctttatctctcttcacttcagggctcttcgtgcttatctatattgcggcagcgattattttgccaacggataaggaagtgcaaaataaccagtagaggcgcatgctgcccattcttttgtgagggctaaaaaaagttcaaaggatagacaattggatgaagtggacatttaaaatatcatgaaaaagagcgacgcattgaactacgatgggtcgctttttgggtggcttgggaagcttgtatttttaaaatgaagaaattaaagtatagctgattcatctataggagtataaaaaaaggtgaaatttattttttaagggatgtgaaattgaattgaagaatactcatatctgtatggatagtattgaggaagcagactggaatcaaattaaagccatttatcttgaaggaattgctacaagaaatgcgacatttcaagaggaagcccctacctggaaagaatgggctactagtcatccgatcgagtgccgaataaaggcatgtatgggtaatgaagtattggggtgggctgcattaagtcaggtttcgaatagaagtgtgtattcaggagttggcgaagtgagtgtttatgttagtcaaaaaagtaatggtaaaggtattgggagtacactcttacagcacctaattgaagtaagtgaaaaaaatggctattggatgttgcaaggggggattttcccagaaaacacaagaagtcttctcttacataaaaaatgtggttttcgagaagtggggagacgagagcgtattggaaagatggatggcgtttggcgtgatacgattttggtcgaaagaagaagtagtaaagtagggatcacttaattggagatataaaataaacacggggagaggtctacaagataagggggaattaattttagtacgaaaaaagcgaccgaataggtcgcttaacaacaaggagcacaacaagtatttgattgagaggcggcgaatttggtagagatataattagttaaggtgataaaaggatttttgttagtagaatcgcttttttggtatttccaagcattttcattaatatgatgtacgagtcgcttatggtcatttaatatcgcttcaaatagtatttgattcattttttaacgctccttcttttccttcgttatcttgtttcgtgaagaaaaattcccactcgtttccatccggatctgtgacccagaatttatcttgcagcgcatagcaacagttggtgttcatttcttctctcgcaaagaaaccaagctcttgaagcctgtctttttgatttaatacttcttcaaggctagcgacttgaatcccgaagtgaccaacttggtttcctgtaacgacttctttagaatttaaagtgaagttaagcgctaattgttcaggtaagaatttggcataatcatctttcactttaacgggtgcttcattgaaaacttttgaatagaaatcaatagagctagctaaatttgttacgttaagtccaacgtgcgttcttaacatgaaaaccactccttaaatcaattttttttgatgtattaaacaaaaaattaacaacgatcattcgtacgaaagagacaacaaagttcttcagatagcaaatgattgacttcagttgaattaagcctgtaataactccatgttccacgcgtttcctttaaaattaagttagcatcgatcaagattttcaaatggtaagagagctttgattgaggtaaaacgagtttttcagtgagatcacaaacgcataattctccggcttgcgtaagttcatacataatgtgcaatcttttgtggtcagagagtgctttaaacttcttttcatacgttttaaaagactgttccagttgttgatcaaataaaggaatttcaagatccatgtaaaccacttccttcatcaattttttttgattaattttagtttacgtgtaaattctaaaaatagcaacagttaaatcaattttttttgattaatgattttaaggaaataaagtttctacatttacttataataaggaaagggtgaacgtttctcaaaaaatctataattcacacttgagaatataagaatatgcttatataatgacattgggacggaggtgatgagatggaaaaaacactgattgaagtagaaactgcagcacaaacgctgaagttacttggggataaaacccgattaaccattataggccttctaaaagacgatgaatgctgtgtttgtgaatttgtagaagtattgcaaatgagccagcccgccattagccagcatctaaggaaactgcgtgacgcaggtcttgtgaaagaacagcggaaagggcagtggattttctactcgctaaatcaatccagtgatgtttatccaattatcaaaagtgtccttgatcttatcccagaacaaatggataagttaacagagctcgagaataaaggattgcgcattagttgcgattgatggaggtattcgattgactttattagcaacgcttatatttattgcaacattagttcttgttatatggcaacctaagaatttaggaattggttggtctgcctgtggaggagccgttctagcacttattgtaggagtagtcgatttccaggacgttataacagtaacaggcatcgtttggaatgcgacgtttgcttttattgccatcattatcatttcacttattttagatgaaattggattctttgagtgggcagctcttcatatggcaagagtggccaaaggcaatggattacgaatgtttgtttatgtcacattgcttggcgcagtggtcgccgcattgtttgcgaatgatggcgccgcattgatccttactccaattgtactagcaatggttcgaaatcttaatttcaaagaaaaaatgattttaccatttatcatggcaagtggattcattgcagacacgacttcactaccattagtggtaagtaaccttgtgaacattgtttcagctgacttttttgatatcggatttgtggaatatgcttctagaatgattgtgccgaatttattcgccttaggagcaagtatcctggtactctacttgtatttccgcaaggatcttccaggaaaatacgatgttgagcagttacgggtaccacaagaagccatacgagatcataagatgttccggctttcttgggttgttcttggaatccttctagttggttactttttaagtgagtttatcaaggtgcctgtttcgattattgcgggtattgtcgcaattgccttcttgcttatggcgagaaagagtcatgctgtcgaaacgaaaaaagtgattaaaggcgcaccatgggcgattgttttcttctcaatcggcatgtatgtcgttgtttatggactccggaatgtggggttaacagacattcttgcagatgtcgtccagggagcagcagatcaagggctatttgttgctacgatatcaatgggctttattgctgcgattctttcatccattatgaataatatgccaacggtaatgattgacgcactggctattgatgcaacgaatacggccggaagtattaaagaagccttaatttatgccaacattatcggttcagatcttggtccgaaaataacaccaattggctcacttgctacgctgttatggcttcatgttctttcgttaaaaggtgtaaagatctcatgggggtattactttaaagtaggaattattttaaccgttccaacactctttattaccctaacaggattatacatctggctacttattatttcgtaacaacataaaaccaatacaaaaggagttttacctcatgtctaaaaaacctattatctatttcctatgtacaggcaactcatgccgaagccaaatggctgaaggctttggtaaaaaatatcttggcgacaaatatgacgtgcattcagctggaattgaagctcacggtttgaatccaaatgctgtaaaagctatgaaagaagttgagattgatattacagatcaaacttctgatgtgatcgattctgagttattaaacaatgctgattttgtggttaccctttgcggtgatgcaaatgataagtgtccgatgacgcctccacatgtgaagcgcgaccactggggatttgacgacccggcgaaggcagaaggaacagaggaagaaaaatgggcatttttccaacgagttcgtgatgaaattgctgaacgcatccaacgttttgctgctgaaggtaaataaagtacaaagaaagccgagaatttttctcggcttttttttaacaagtaaaggaggatttctccactaaataattggttaaattttcatattatttcatttcaagataatcgctttgtttattaatggttcttcgagtttatcattgatataatttaatctaatttattaaatttatttctagagataaagggagagtagaaagtggtaactagagaacgtctagaaactaatcaagtgtgggtttatatgattagtttaattatagcaacgatatttggttttctcatgcccacttatgcggaaagcctaggatcgattatttcaattgttattgcattcttaatgtatagtatgttttcacaaataccatttacagcattaaaaaaagcatttggaaataaaaggtttatgtatgccttactaacgataaattttataattgtaccaattgtggtttggttattatcacaatttttacctgacaatccaaccattctgattggtttttatttggtattattaactccttgcattgattacgttattgtgttttcttccttaggtaaaggcgatgaaaaactggtattaactgctaccccaatcttgtttgtggcacagatgttgcttctgccagtctatttgtggctgtttatggggaaagatgctgtagggattgtggagccttctccattttttgaagctttttttggtttgattattataccccttgtgtttgcgttgttattacaaatagtagctaaaagaagtactattggagtaaaggtattaggtggatctgcttggttacccgttccttttatggctttaacactctttgtggtggtggcttcccaaattattaagctctccacgtatggagatcaagttataaaagtgattcctttatatgtcatgtttatggtgataatgccaattataggtaaatatgtagcagcatggttcaatttaggaacgggagcaggtagggctctcatttttagtggctccactaggaattcactcgttgtacttcccttagcgttagctttaccggaaataggggatgtagttgcagctgttatcattacccagacgattatagagctcttatttgagctggtttacatacgcgttgtgcccaattttttgttgcaagataaataagaggctcgtgatttattatggattcacagttgaatgatataattagaaaatcattaatcagaaattcatgaaaggaaggaaggcttatgaacaagcataggatttatacaatgagtttcgcaagcgtctatccacactatgttacaaaggcggaaaaaaaaggacgtacgaaaacagaagtcgatgaaatcatctgttggttgacagggtatagccagaaagagttagaaactcaaatagaaaacgagacagactttgagaccttctttgcggaagctccacaactaaatccttctcggaccatgatcaaaggtgtggtctgtggtgtacgagtggaagacattgaagaaccaactatgcaggaaattcgctatttggataagctgatcgatgagttagcaaagggaaaagcgatggagaagattttgcggtaagaacaaataagacctaaataaaaggaaagaagcgcgattctccattgagactgcgcttctttcctttttgtctctaactaagaatccgaatatcacacttaactaggattcacttttactacgggttttccccataataaagctcacaattaacactaaaatgatcgctcctatgatagcagggataatgctgaatccaccaatatccggtccccaactaccaagtatgagcgtacctagccaggcaccaacaaatccggcaataatatttccaataattccacctggaacatcgcgacccgtaattgcaccagcaagccaaccaataataccaccaatgattaaactccaaataaatcctatcggaaacacctcctaaatacaaaatctttctgtattgttttatccgaaaaaagtaattctattcgtaatcataaataaaaattgctggttgaaaataatctatctgatctaagacttcttttgtccttcaataaatcgattgcagattaccgctccttacctaagcatggcatgcctcgatccaagttcagcaatttgtttacgagttattgttgaggtcataattgaataggtgaactaaaaaaaaccgtatcttattccccaggggataagatacggtttttagtatgcaatcacctgtgaattaatctcttgttaacgttgcttccgaagaaatagcctgagcaaggttggatgtaatacgtatttcaccaaaatcaattccgagttgaacggctgtttgcgcaatttcaggtcgaatcccagataaggttgccgtcactccgattaacttaagacctgtaattaactggaatatttgctgcgctactcttgtgtcaacaagatagacccccgacaaatcaatgaataggtgatcaactcgcttcgttgtacagcctactagagtattttcgaaaatcgctgttgcgcgatctgaatcaatgtcaccaacaagcggaagaagggcctttccatctggaaggtcgattagcggtgagctgagttcattaatcgtttgctgctgttcctcaatgcgagcatttaaatgcttggatttttcctcaacgacacgcgtcatgacaacatcaatcgcttcaatgatcgcacgcttccagatatcaagatttttttgtgacacgaggtcttcggtggttttggaatattcctcgataaaatccaagtattgttcacgcacgcgctggaattctctcataattagatgagtaggcgtattcaagtgttcaggatcacgtcctatttcctgaacccaatcatcaaattcatcgaaaaaggcgcttttttccattataaatattttacataaatgcttatgaaactcgaaattttgtgattttaattcgcgtataatctgaggatcagttgaggcatagacgcccgttccgctcttgtctaatgacgcataccaatcttcagttagctgttctgcttttgttaataaaaattgatgaagttctttgttacgttgcatgcaaatatgctcctctcgacaatgaattcgttctttatttagtagtgtgaatcatttcatccacttatatatgcgtccatgatgatggcatctcttatgttggaacagtataacggcgacaggatagtaactacctttacataggttatataaccattataacaaccctttacaaaatccacgaacttaattgcgtttttcaaaataacaattgtgtaacacgccgaaaaatgagaagtaaaaaggggaaatcgctagtattaaatgaaggaagaatgataccgatatcatctttaaaaaaatcgtcacttgttcactttggatcgttcaatcatgtgattacaaaacgctagtaaaaggtgatttcgttaatgtaaggcaaagctttgttatggctatagaaaggtgtttttcattgctaaggatactaggagaagtccagattgtgcggaaaaggtgggtaatgattttctcatgatcgttaggatctgtcccggaatttgtgagtaggcgtgaaaggtgaagaatatacgtatcatataattcattcaatgagttttgatctttctcgactattcgttgaatgatctccttttgagtttccatgttgtttctccttattttggcagtaatagtttttcaaataccctactataattatttcaaactaataattcttgaattaaagatattatatggtgcagaaaaatgcaaaataaaaaaatggatatgaaaggtctttaacgtaatcgcctgaattttcttgcttttaaaaggatcctattggtatagttaaattggagatgaatgggaaggggactgtgaacatgtgtggacatatcctgtaaacgttgcacaaattgattagcctatttcaagctgtgagataggtctgtcaatgtaacgaagacaggagggtcaccacgttcatgattgattaaacgaactggacagataccttaaggaggttctgtcatttttttacgatcatctccattcacgagtgtgcgggtgctccttcataagggaggaagaaaacatgaatcaagagagacgaattgcggttgtaacgggtgcaagtcgtccgagagggataggggctgcgctttgtcgtgaacttgctcgggaaggctacaatctattttttactcatttttcaccatatgattataaaacgggctatgacgatgcagaagcgaactgggccaaagcatttgagaaagagttaaagaaccatggtgtgagcgtggattcgatggaactggatttaagcaaaagcgatgcacctgatcggctattggaacgcgtttttaaaatgccaggacagctttcaattctagtgaacaatgccacccattgtgtagaaatgagtcatgaagaattaaccccagacgttctggatgagcattatgcggtaaatgtgagagggacgtgcatgctgtcggttgcatttgcaaaacaattaaagaaggacgacctcagcggacggatcatcaattttgtttcaggtcaggacaaaagccctcaaccggggaatcttccctatattacgaccaagggggcgatctctgcttttacgacttcatttgcaaccgaggtcgcttcccatcatatcacggtcaatgcgattgaccccggtccgacgaattcaggggcaatggataaagcgacgcaggacttcttaaaacctaaattcccgaccggacgaattggaatgccagaagatgcagcacgcttagtgattttccttgcgagtgatgcagcgaattggataacggggcagattattcattcagatggtggctttcgggattaagagaagaactgaaaaaagggtgctgacatcgtgtcagcacgctttcctttttagaataaaacatatgaaacaacgacatagagcaaagccatgacgagcgatggggcagcatagcgccatgaactacgcacagttgatggtcgaaggagcaagtacataatcacgatcgtcatcaacagtcccaggcaagcgataaagatatgagacatatcaaccgcagcaaggatagcaccatctcggtaaagcaaatccgtgagggccagaagttggatgttgaataagttactaccaagtatggaaccaatcgccatattgtagtttgctagtttaaaagctgcgagcactgttacgagctctggtaaagatgtcgaggcagcgatcagaaaactacctacaaagcttgcattcatacccgttgcttcagctaagcgatcccctgcaatggaaaggatactacctgatacgaaaacaattaacgcggcaacaatgaaaccaattacagccgtacgcagcgaaatatcttttgtaggaatgtcgtcttgttcaccgttatcacctgagatgaacttcatcgatagaacatataggaaaacaatgacgatcatctcaatcccaatcccaaagatggaaatggatcctggtattaatagcgagacaattaaaatgacgagaaaaaggagaccgactagagcggaaggtacgttcgccttcgtgtttaccttctgaaataatctccgtcttctgtaaatcaagtcaacaactgctagaattaaaaggttaaagacgttacttccaagcatgtttccaaccgcaatatcagggttatcaatataaacggctgttagactagttgttaattcaggtaatgaggttgctcctgcgataaggaacgtcccaacaacagccccacttaaagatgacttcttactaataacatcaccgaactgattcaggtaaatagcggcaccgacaactacggctgcagcaagaagaaagatcaaaataatcatgtgtaactcctctccgccagcgcatacaaaaaaaccctggcacaacaaaattgtaccaaggtcttgcgtactaaaatcttagcccgatgaaccaggtataataataccgtattgatgactcatcagccgttaccggtcgctactccccttgttaagttaactatagctcggtttaaatttaaagtcaattaaaagggtatgggaaaatgattgtttaataggagatgtcgcttctaaaatagaagcaagcctgccttaaagaaaaacgtttgagataggcttgttcaaatttcattaataaggatcagaaggatgacttctttcctctgcattctgaacagcttcatccatcttttcttcggtagaagtgcgaagtgctttcagtccttccgcgacacgcattccataatccttatcgcattccgttaacatcgaaatcattcgttcctggatttcctcgcggcagtctccgagcgcaatgacgagatttgagatcaaatcatctcgttcccaatccttcattcttcgatacgtttcacccgcctgaccaaagttgttttctctcgagatcttgttccgttgcagctttccttcgacgtatggttcatattcttttccaggattaaccgcttcttttagtcccccaatcaaggaaggcttataattcacgtggggattttggtgctcagcgtaatcttgcctgaaatccatttggccagcactttcattggtagcaacgtgctttgcaggcttattaatcggtaactgcaaatagtttgagccgacgcgatacctctgtgtgtctgaatacgaatatgttcgaccttgaagaagcttatcatcagagaaatcaagcccatccacaagaacgcccgtaccaaacgccgcctgttccacttcagcgaaatagttttctgggtttttgtttaaaaccattttaccgaccttgtgccatggcacatcttctttgtaccagagttttgtagggtccagtgggtcaaagtctaattcaggatgttcaccatcttccataatctgaacgtaaagctcccattcagggaaatctccattttcaatcgcttcgtacagatcctgtgttgcatggttaaagttcgtagattgaatctgatccgcttcttcttgagtaaggttacgaattccctgtacaggctcccagtgatacttcactaggacagcttttccttctttgttcacccatttgtaggcgtgcacaccagatccttgcatatgtcggaagtttgctggaataccccatggtgagaaaagaaatgttaccatctgcatcgattcaggcgtttgacagaggaaatcaaacatccgctccatatcttgcctatttgtaacgggatctggtttaaaggagtgcaccatatctgggaacttaagcggatcgcgaataaagaaaatttttaagttattccctactaaatcccagtttccgtcttctgtataaaactttaccgcaaatcctcttggatcccgcagcgtttcaggggaatgagtcccgtgaacgacggtagagaacctgacgaatacaggtgtttgtttgccaacttcagtgaatacctttgcccgtgtatagtttgaaatcggttcatcacccacttttccataagattcaaaataaccgtgggcacctgcgcctctagcatgcacaactcgttcaggcgttcgttcacgatcaaaatgactgattttctctaaaaaatcatagttctcaagtgtcgtaggaccgcgattcccaaccgttcgaacattttgattgtctgtaaccggatggccctgccgattagttagcgtttcatctaattcatgttcttcatttgattggtttggatctttgttcatttcaagccctccttctctatctcgttcaaattatctccaaataaaactggagtatactgtttatggagttaaattttggttataggcatgtttgaatacgaacagtgttaagagccttctatagaagtgaaactttgtagttatcttagtcgtaaagaaagaaagcggtttaactaagaaaggagaaaagggatgcttgagatcattttaacgattgtttttgcgatcgtttttataattgggatctatgtacaggtgacaagaagaaaacgagcagggttaaccggggtaaaatcagctatttcgcccatttgttttatgattagtgctgctcttaatccattagggtactggttcggcttccttggtttagctagtttactaggttcgatgctgtttctatttcttggggcttattatgttaaagagatgcaagtggaagaagtatctaaaaaggggggatgaaatgaactggaaatcttttttggtcatcctgttgctcatatgtcttacgacgatgaccacggtcgctatttattttattaataatagaacgactgagttcaatattccggtaattgtctccatggtagctggaggcatgtttgtaatactagcaatggtgagaagaaaacataaggaagaaggaagacgatgaagtacataagagtaatgatcttactgatagctattatggctacaagcggaatcgtttggctcgggtttacaggcggccatgaagcttttttccgactgtgcatcagtattgccgtcttcgcctctctctgctttgtttatattgaagagaaaaagaagaagcagaagataacgctaatttttatagcgcttagtcttatttcaattactaccggaatcatgcagttaatgaactggtagcattgcaaaataagcaaaaatagcgtgcaaatgatctttatcatacaaaaaggacgatccccaaatggattcgtccttttttacgttcgtctactgtccgttttgaaactgttgatcgatctcgcgcaatagatcataggattcttttaaatgatcaggaatcaatctgcgcccatgttcccacgcattttcttcgatttcagaaagaagctgttgctgaacttcctcatcttcatacattaaaatgcgaaggtcgtgcctgtgtttcttaaagtctaaataatacccaatttcatgaaacagaaggattaaagcgatattttcttcggtttcttttagtttaaagttcacttttgcttgatagccgttcatttgtaagtagttaaacttaatcgtatttgtcgatacgttatagctcattggagcggttagctcgttgttgaattcatagttgatatctaactgatgctcttctagcgtgtctttaatgattttttcgacgtcccatatatataacatgtttttatcactacctttttgtgaagcttttgctaatgccctattttaaactatccaacgtaatactaccactatttataatagttaaaacaggtgaagggacatttcagctgaaatgtcccttcaaaaacgttagagaaagataaaataaagaataaataagccaccgagcgtatacataatcgggtgaacttgcttccattctttgttcgcgatcatcgcaaaaggataaagaataaagccaagtgcaatccctgtagcaacgctgaaagtaagaggcatcataatgattgtcacaaatgctgggataaccacttctaatcggctccaatcaatctgctttacctcagttgccataagggccccgacgatgattagggctggagcagtaacttcaggtgttatgacgccaagaataggcgagaagaacagcgcaatgaagaagcaggctgagataacgacagatgtgaagccagttcggccaccaacggcaacgccggcagaagactctacgaaagaagctgttgttgatgttccgaagatcgcaccgacaactcctgatgttgagtccgcaagtagggcacgtcctgcatttggaatttgattgtctttcataagaccagcttgactggcaacggcgataagagcgcctgccgtgtcgaagaaagcaacgaataagaacgtaaaaataacggctagaatctcaggtgtaaagatatctcctaaatgctgaaagaccacgccaaatgttggctcaaggcttggtacctgtccaaccacagaagtaggaacttgtacaaggccgatgatcatgccaattatcgttgtaatcacaattccataaaagattccgccgcgaatgccgcgaatcaacatcatcagcgtaataataaatccgaaagcagctaacgcggttgttggcgttgtcagctgtccgattgaaatgaacgtttcttcatttccaacgacaatccctgcatttttcagaccaacaaaagcaataaaaaaaccaattccggctgcaatggcgtgcttaaggtcttttgggatcacgttaataattttctcgcggattttcagtaagctaagaatcataaagataataccggcaataaacacgcctgttagagcaatttcccaatcaattcccattccaatgacgacagagaaggtgaagaaagagttaagccccatgcttggtgcgatacctacagggaagttagcaagaattccaataagcaaggagccaacaatcgcggatagagcggtggcagtaaagagcgctcctttatcgataccggcttcacttaaaataatgggattaacaactaatatataagccatggataaaaaggttgttatcccggctaacgtttcttttcgataattcgtttcccgttctttgaactggaaaaagtttttcatggtagaccctcctgattcaaataaaaaaactctggccagaaaccagagcatcatcacaaggaaatatgaaaaacttcataattccttgtagacaagccattctcggtagctggtagaaacgttcaggccctattcctgaacttatacaaggtttagtcatatgataaatttataacgagaatcataacaatgaagaaaagacgggtcaatcgttttcgataatgtttcagtattcattgttttctaatttgcattacaaatataaaaataaataggtaaatgttaaaaattatgtaatttgtaagaatacaaaacattgaagcctattatatggtaatgtaaatataagacaaatatagagggagagcgctatgttgctgcagaacctagaaaacgaaattcagacgttgcgaatggtgctttatgatctgggacaagaagtagatgactactcaaacgggaaaattctcctgttgagtaaacgattagacgagaaaattattcagtatcagaagctgaaaaaatacaagtgccatcattaataaactttccataaaacgcgaaaaggagcatcctctactatgaggatgctcctttttggattgttctatttattcatgtagcgatcaacttcccattggcttaccataagggaatattcgatccattctttttctttttcttcgatatacactttagaagtatggtcacctagtgcttccatcacaactttatcttcacgaagtgacttgatcgcttccttcaagttagttggaagtgttggcacatcatctgtgtctacttcataaaggttacgtgtttctggcgcaccagcatcaagatcgtgacgaataccttcaagacctgcatgaataacagcagcaagtgttaggtaagggttagctgttggatccgggttacgaatctcaaagcgagtacccattccacgcgttgttggaatgcgaatcatacagctacggttagagtgagaccatgccacactgacaggtgcttcataaccaggaacaagacgcttataagagtttacgttcgggttcgtaatggctgctaggccatttgcatgggaaaggataccagccataaactgtttcattgttttggaaatgccttctggatcgttttcatcgtaaaacgcgctctcgccatcagtgaaaagagaaaggtgacagtgcataccagaaccattttccccagcgattggcttcggcatgaacgtagcatggtaatcgtggcttgtcgcaacgtcttttacaacgttcttaaacgtttggatgttgtcagccgctttaattacgctatcgaaacggaagttaatttcatgctgtccttgagctacttcgtggtgggaagcttccatttcaaaaccgaatttcttaagtgtacgtacgatatcacgacgtacttgatcacctttatctttaggggaagcatcgaaataacctgcgcggtcattcattttgcgaattggataaccgtctttatctagcttgaaaaggaagaattctggttctggtccaacgttaaccgtatagcccatatcttctgcttccttcatcgctcttttcaaaatgtaacgtgggtcaccttcgaatggttgaccgtcgggagtatgaatgtcgcaaataaagcgagcgatacaatcctgatcaacagcgtccggtaggactttgaatgtttcaaggtcagggaagaggtacatatcactttcctggatatcagagaaaccagcaatggaagagctgtcaaacattgcttcgttgttcataacactttccaactcttcaattggaagttcaacgttcttcgtttcaccaagcatgtccgtaaattcaagacgaataaattcgactttcttttcttttgcttccttcatgatgtcctgttgaatactattctttgttaatgtcatggattaaataacctcacctttaatttttttgttagtgttcattctaatgatatttacagataattgtgtttttatgtaagaattcctaacataaaagttcaacacgaaatgatgacttgaatatgtgtgtattaataaccttagtcagagcggaataaaccactatttcttttgaaatttttactaatttattctgaaaacgttaacaaaaccgtaggaataacgtttctaaaatataaaatgattaaaagaatatagacaagtggtaaggaaggtgctatcattctaaatgataatgaatctcaatatcatcctggggggtacatacaatgaaagttacaaataagagaattactcttattctgatgttaatgctcgttcttatactagctgcttgtggaaatgagaacgaaaagagtgattcaagtgaaggagaaagcagtgaagagatgaaaaccttcacgttacctgatgggcaggagttcgatattcccaagaacccagaacgaattgtagcaacggattacgttggttattttctagcccttggaattacgccagtaggagctccagatcaatttgttcttgataatccttattttactgaagagcagattgcagacattgaagatataggcacgccaccttcagtagagaaagttacgtcactcgatccagatttaattgtagtaacggatcaagaacaatatgatttactatcaaaaattgcgccaactgtgcttatgccatttggaacatatgattctctagatgaagaagtaactgctatgggtgaaattgcaggaaaagagcaagaagcgaaagagtggatcaagcaatttgatgaaaaagcagcagcagcacgggaagaattagacggcgtcattggtgaagatgagacggtcggaatttatgaagtgcaaacaaaggatttctatgtatttggtgataactttggacgcggtggtcaggtcatttatgatgcactagaattaaaggcccctgagaagattcaaaaggacgtcatcgaaggcgacaactggaagaagatatcacttgaagtattacccgaatacgcggcagatcatatgttttataccgagtatgccgctgaggataatcaagatgtgctaaaggaaacaaaagaaagtgctctatggcagaatctagacgctgtgaagaacggtcatctctatgaaatgaaatttgaggacatgtattattatgatccaatcgcagtagaaggacaactcgatttgatcgtcaacaagttaaaagaaaataataagtaaataagaagtcctggtgccaggcaccgggacttttttcaatacataaagcaaggagtcttcacatgtctaagaaagctgaaccgatggcaaatacaatagaaaatcagctcgccattcaatcgcgacccgtcacggcgatgctcattcttgttgcaggaagtgcggccctcattctgagtctaggactatcgatcgcacttggagcggcagatattaagttgatgacagtctggcaagcgatttttcaatttgatgcaacttcaacagaacattcgatcattcgtgagtttcgaatgcctcgctcagttgccgacatcttaattggcgcaagtttctcagtagctggagcgatcatgcagggagtgactcgaaatcctcttgctgactccgggttacttggattaaatgcaggggcaaccttgatgattgcgcttagttttgcctttttcccgggtctttcctataccaacctgatgttcttttctttcgttggtgctgggatcggggccacacttgttttcggtatcggttctctctctcgaaatggtctatcaccgattcgtttagtcctagcaggggctgcggtaagtgcactttttaccgcagttagtgaaggcgttgccatacattttcaactctcacagaatcttgccttttggtttgctggaggaacagctggtttgaaatggccacaaattcaaattttattgccttggatcgtgattgcgcttattgtggcactgtttctttccaagtctatttcgctactcagtcttggggaagatgtggctgtaggtcttgggcagcgcacaaaattaatcaaagcgcttgctgcagtggttgtcctcgtgcttgccggagctgctgtatcagcagttgggccaattgggtttgtaggtcttgtgattcctcatatcgcaaggttccttgttggtgtcgattacagatggattgtcccatgctcggctgttcttggcggattatttatgattgttgctgatatgggagctaggctgattaacgcgccgtatgaaacaccgattggtgctattttcgctctcgtcggtgtccctttctttctttatgtagctagacgtgaagggagggagttgtgatgaatatcgactctttatttcatgtacagcggaaaagaaaccgcaagcgctatgtgataatgggtattttcctcttcctcatcattgcgaccttttttattagcttaaatacaggattaacgaaattaagtcctggcgaggtagtgaaaacgttgtttggcagtggtacagagaagcagtcgttaatattatttgaatttcgcttgcctcgaatcgttattgccattcttgtcggcgccgggctagcggtatctggctgtatccttcaggggatttcacgtaatgctcttgcagatccgggaatactcggaatcaatagtggggccgctttaatggttgttctatttatctcctttttcccaaaaacgacggatgcgcctattctccttatgccgtttctagcgttaattggcgggtgtatcacggcaatcgttatctatgcgctttcgtacagcaaaagagaagggttaatgccacagcgattgattttaaatgggatagctgtcgctgcagggatcagtgctcttatcacgatcttaacgcttcggatggatccatttgattatcagtttattgctgtttggcttgctgggaagatttggggaacaacgtgggttcatgtgcttacactattgccgtggatcattggtttatttacgttgattttctataaagctagaacgctagatggattgaattttggggaaaagcttgcgaccgggatgggcgtgaaagtagaaaaagagcgtttcttgctccttggcacttcggttgcacttgcgtctgcatgcgtgtctgttagcggagggattggtttcgttggtcttgttggaccacatcttgcacgacagttagttggaaatgatcatcgcttcctattaccactgtcggcacttgctggtggacttgttcttttagtagctgatactattggtcgaacaatccttgcgccgtctgagattcacgctgggattatggttgcaattataggtgccccgtactttttatatttacttgctcgagcaaaagcttaggaggaacgcgatatggagacgaaggaattgtatgatgttacgatcattggtggaggtccaatcgggctatttactgctttttatagtgggatgcgcgagctgaaaacgaaggtcattgaatatcttcctcaggtcggtggcaaggtgacctatttttatccagagaaaattctccgagatattggggcaattcctggcgtatccggagcagatttgatcaagcagcttgaagaacaggcaagtacatttgatccgacaatggtgttcggagagcgtgtggacgatcttgagcgagcagcggatggtacgtttatcctgacgagtcataacggggaacgccattatacccgaactgttattctggcaattggccacggtacgcttggggtgaaaaagctaccggttgatggtgcggagcattttgaaggggcgaatcttcattatgcagttgatcgagtggaggacttccgaggaaagcacgtgatgatatctggaggaggcgactcggcgatcgattgggcgaatcgacttgaaccgattgcaaataaagtaacgattgttcatcgcagagaggcttttagtggtcatgaaagtagcattacagaaatgaatcgttcagaaacgtacgtgaaatgttcttgcttcgtatctgacttgattggcaaggagaacatcgataaggtcgttttgactcatgtcgacacaggtgaaaaagaagaagtggaaatcgatgcgcttcttgtcaatcatggctttgatcttgatttaggtggcattcaaaactgggggatgaccacaagcgatggaaaaattgttaccgatgcaaaaatggaaacaagtatacctggaatttttgcagtaggagatatcgtcacatacccccaccgtttaacgcttattgcaggcggtcttgcggaaggaccaaaagcattgaacagtgcgaaggcctatcttgatcctgaggcagaagccatggcgatgtattcgacgcaccataaagattttgtggaagtttaagcggaaggagtgagcgtggtgattgaaacagaaaatcttaaaatcggttatcaggaaaacatcattgtggatcagttgaatctatctatacctgaaggagagattacggctcttgttggggcgaatggatcaggaaagtcgaccattcttaaaacactatccagattaatgaagccaaaaagtggaacggtttacctggatgggcgggccattcatgaacaaaaaacgcgcgaccttgctaaggagttagcgattctcccgcaaaatcctaccgctccagaggggctcacggttcttgaacttgtgacgtacggtcgctttcctcatcaaaaaggcttgaaagctctaacgattgaagataaagagaagattgcctgggcaatcgaaatgacggggattggggaatttgctaaccgtccgattgatcaactgtcaggtggacagcgccagcgcgcctggattgcgatggcacttgctcaggatacgaaaattctttttctagatgagccaacaacgtttctcgatatggcgcatcagcttgaggtgcttgagcttttgcaaaagttaaatgttcaagagaagcgaacgatcgtcatggtcgtacatgatttaaatcatgcgagtcgttacgcaggtcatatggtggcgattaaaaaaggaaaagtgatgaaaacgggaagaccgattgaagtgatgaagtccgacatattagaagaagtgtttggcgttcgaagtgatatcatttacgatccacgatcaggtcagccgctctgcttcccgtatgggctatgtacagaacacgtctatgaaatgtcgaattaacctgctccttaggatggagcaggtttttttgtgaaaggatcatcttcttttctagcgaatacgtaaatgaaactcgtatttaggtcgaccattcataggaggacgttatgattaaggaaatgaaaacgaaagaacaatggcatgaagcatttcaagtgttgcaagagcttcgtcatcacttggatgagaaaacttatcttgatttagtagaagaagcccatctgaaagacatgtatcgactctatgcgctttatgatgtagatgaacttgtagcggttactggatttaagccaatgattacgctctactatggaaggtttgtctgggtttgtgatctcgtcacaagcgaacagcatcgttcaaaaggttatggagaaaagcttcttgcgtttgttgaaaactgggctgtggagaacgggtatcaatctgtggctctctcttccggtgttcaaaagaaagaagcccaccgtttctataaagaaaaaatgtcttatgatcaggttagctttgtgttcaaaaaggggttaactccgtagaagcatgatcttaacctatagctgtcgcctggtgctatacttggtgcaagacaaatgaaggatgtgcgtaaaagtgagaaaactaggtcaaacagattacgagatctcgccaatcggacttggaacatggcagttcagtcaggggagcggcttaattggcagttacttttcaacgatatcagaaaaagatatggacgcgatcgtgaaaatgagtcttgatggtgggattaactggtttgatacagcagaagcttatggaaaagggaaatcagaagaagccttatctggcgcgttaaaacgacttgaggttgaagagaaggatgcgttcattgcgacaaagtggtggccgcttcttcgaacagctggttctatttcaagcacgattcaaaagcgaaaagaagccctacatggacgtcggattgacctttatcaggtgcaccagccgttttctttttcttctccagaaaaagagatgaagcaaatggcatcactcgtcaaagaaggtcatattggcgcagtgggtgtaagtaattttaatcgagataaaatggaccgagccattcaggaattgaaacgtcatggtgtgaatcttgcatccaatcaaatgaaatatagcttactcgatcgacgaattgaaacgaacggggtgctggaccttgctaagcaaaatggcgtcacgatcattgcgtattctccgcttgagcaggggattttaacaggaaagttccatcaaaatcctgaacttgtcgcaaacctcacaggtccacgtaaacacatgtctcaatttaaaccgcaggggttagctaaaacactgccgttaatcaatttattaaaagagataggtcatttttacggcgtcggagctggtcaagttgcgttaaactggctcgttcattttcacgatcagacggttgtagcgattcctggcgcgtcgaagttaaagcatgccgaagataatgtgaaggtgcttgggtttaaattaacgcaggatgaaatgaaacgaattgatgaggaatcaaggaaagtagcgaagatgtaaaggggaaaaaggccgcaatcgaatgagattgcagctttggtctgctagtccttatctactaattcaaagccgatgtagccaagagcagcttcaaggttttgaacagttttaaaatgaagaagctgttcgttggctacttcctgttgagcgatagcaggtgtaacccccgtaataattgtttcgatccccatcagttgaatggatttaaacaggtctccgagaatcaatggaaaatagccgtcaacaatttttaagcctgataattcaacaataaaatgattgatttgttgattagctccatattgaaggacttgttgaatgatgttctccgctcttctttcatcgatcactccttgcaacgttaagatggaaatcccctttgtaataggtacaattggaacgctcaagaaatccatattatactttgtttgatcgagttcgattatataagaaagaatttcagccattgattttaaataagaaatatcatcttcactaaatgacttctcttctttatccatcacacaaagcgtcccgaaaacttttcccttggtatccgttagtgtaacgccgagaaatccttttacctttagttgtgaggtaacttctagctcccgcgtaaattcatcatgttccaagttaggcgtatgcatgacgctaccctcattattaataattaaccgacaatatgtatcactatactcgacagcgtatccctctggtataatctcttccttttcgttgaaagaacttacaacggtcatagcattttctccacgcttcgtaacataagctgtattcacatttaaacgatcgctgattaacttaaataatcgtttagaagcgttttttagtgaataaaactccgtagagtctaaattatattcattcgtcatagacaataactctccttaaaacgattatatggcatttactcgtatcccttatattctatagtaaggaaaggaatagaagcaaatagttggaactttctattaggtcagacgtaaaactagtagggaaaggagagattgcgtatggaaaaaagaccacgaatcaagatcgataagacgttaattcagaaagggtttgatttggcggcacttacgtttctttttctaagcatcgtctatctttcgttggaatggtcgggagtacctaatcgcgttcccatccattttaatgcgactggtgaagcggataattggggttcaaagacggcgatcattcttttcccaatgcttggtattttgatctggggatttttcactgttcttgaacgttatcctcataggtataattatgtggtgaaaattacagagggcaatgcagctctacaatatcgaagtgccgtggtactcatgcgttttttgaaaaatacgatcgcgcttttgtttgcttatttaacagtggaatgtgtgcagattgcaaaggggattgaagaaggtctggcttggtgggtgatgcctctctttcttacgatgatctttagtgcgattattctttatattgttcattctattagatggagatagaggataatccgcgaaagcgtatacagttcaaaatcatgaacaatttgacgattttccgcttgaattcccaaaaaaatctgcggaaattgaccttctgtgtatgatatagtggagaagaagtttaaactaaatacatacgtatgacattcatacagctgatattgtaaggttatcttatgggagtgttattgttcgtaagatagctgaatcaatcgtggaataaatgaaagataaaggagctacgctatgctacgccaggaagaagatgtgaaagtgtttgctttgaactcaaatcctgaattggctcaagaaattgttgagacgctaggaattcaagttggagattgttctgttaaacgctttagtgacggtgaaattcacatgaacgttgaggaaagcatccgtggttgcgatacatatttggttcaatcaatcgcaggctcaggaaatgattacttaatggaacttttgattatgattgatgcattaaaacgggcatctgctaaaacgattaatgttgttttaccttattacgggtatgcaagacaggatcgtaaaacaggaccaagacagccgattactgcaaagttgattgcgaatatgttagagcgttctggcgcaactcgcgtgttaaccattgatttgcatgccaatcaaattgaaggctttttcaatatcccagttgaccaggtttctggtattccaatccttgctgagtattttgagaaaaagaattttgaagatgttgttgttgtggcacctgataacagcagtgcccttcgtgctcgtaagcttggatctctgcttgatgcgccaatcgccttaattgatcgtcgttcttatgacacaggcgagccttctacggtaaatgtgatcggagacgttcgaggaaaaacagcaattatcattgatgatatgattgataccggtaagaacgtaacgttcacttcacgcattctgcaagaaaacggtgtgaaagaggtgtacgcaacctttacacatccggttctttctggtcatgcaacagaggaaattgcggattcgacgattaaagaagttgtcgtcacgaatacgattgctcttccggaagcagaaaatcttgagaaaattacggttctttcaatcgctcctcttttggcggaagcgattcgcattgttcaagaaaagctttccattactcaaatacgataagaatttgaagggaactgatcactcagttctcttttttttgtagctttaaaatgaggtgaaaatggagtgactctggatagtgagccactcctgttatcaatttgaattaaacttgcctgaataatataacgatctggtgcagagccgaggtaatcaaacggatagcacgtggtgagtgtgagagtgggggaattcttttccacaatgacgctacgatcatgctcgtctgtaatccacgttttgcggatttgatattcatacgttgtatcgtctaatgtaaggtagagacgatcacctttttttagttggtcaagaccgtcaaaaacggtatcgcggtgtcctgcaagtgcggtgtggcctgtttgacttggtaaagttgtgaaatctgtgtcatacataccaactccctgtttaagcgtttgttcatccgttccccagtagatcgggtaaaggtagcctaattgagggatcgttagttcaccgattttttctccggttttcactttcatctgtggcgtgacgtcacttgtctgaaccacttcttgattcactgtctgttgataatcggtttcctcccagtctcttgaaatagcttgggctttctcaggttgaaaagtagcagcactcttctgagtccaccattcatatccgctccagccagttacaatcatgccggctataatgaatagaatactgagtttcttaaccaccaacaatcaccttctttagaaatcgagataggcgatttccgcctatctcgttgggatggtatgtgccttaagaatgaacgcgtctttttaaaagtaggagagaaccgaatgctgcaatggcaagtccaagcaacatataaaccggatagcttgtcgctgtatcggccatttcagcgccttctgtactgtcagctgcttctgagctgtcttcttcgcttgtcatttcttcatcggaagctgcgctatcatcgctggacgctgcttcttcgtcagaggaatcggagccactgtaggaatgagtttcacaagcttctccatcattatcacgatcaaggtcgctcggatctgcatcagggtcgttgctttcataataattttgcgcttcttcttgagaagagaagtctttacaatccttgtcatcatctgcataccctacgtttgtaaatccaaataccaataagaaagttgctaataaagaaacgagctttttcatcttcttcctccccggattaagtatttttttgccatcccttgttatatggtaacatctaccaaaggaaagatcatgttatttgtcagaataaatagaataaagagaatatattactatagtaaggaaatgtatttcataaaagtatgtgaatgtaagatattttatttttaaattgaagaactggaaagtgggagaggagaaccataccttcacagatgcggatgagaatagtggggatgtataaggggatctcagaaatttccgatccaggaacgcacaagatgaaagtttatgttgagaaggggggaagagcttcatgtgcaaccctatgtgcttgaagtcgcggagaagtagtaattaaagaaaaaggcgcagaggattttctccactgcgccttttttcgacatttattgagctcaatcgggtggtgacaggcacgcttaccccttcagcacttgatcaattgcgtgagcaacgccgtgctcggtgtagtcttttgtgacccagttcgccgcttctttgacgcggtcttgagcattgcccattgcaacgccaaaaccagcttcgcggatcatcgcgatgtcgttcatgctatctccaaccgccattacattctccattgaaaggtcaagccaatcacaaactttcatgagggcagcagctttattaacgccagacggattaatttcaagatttgtagggcttgaattcgtcacttcaaacgcctcatttgccatcacttcatctgtaatgaccttgcggatattatcatctttaatatcaaagccaaatttcaaccacgcgtagtcattgatttcgcgatcaaatggtttttgcgtattgaatacgccttctgttgtagaagaccagaaatacacgtcatgctttacttttaattcccacaaacgctcgacaagctgataatcaaggtgcgtgctgtcgacgaggttcaattccttatcgtagatctgtccgccgtttaccgtaaccaggtaagcagaatgaccaagctgttctgcaatatcacgacagaacggtagtgagcgccctgtacttaatacgacatgaaggcctttttctttcgctcgttgaacagcagcttcgttttcctctgacacctctccgtcatgattgactagtgtgccatccatatctaatgcaattagtttgatctctttttccatctctaccactcctatttttatctactctcagtttaaactaaattggtgtcgaactgtagtatttgcaacttggaacttttttcagatttaacgattataccatagatcgcctgaatcatttttttgataaaaagagtctgtgaacgagattgcttcagctgattaattgaaccgaaaaaaatttaaaaggaatttccaaaaataagttttaccgtttgaaattcgaggaactgaaaaagtggactgttcgaatcaccaatttggtgaagcagctgcctcagaagctgaggaaacatatcgaccaaagaggtgaaagaaaatgaatccagaacaaatcggattcgcattgttgtatattggtgttttcctacttataggaaaaatcattcgtttaaaagtaaaggtgttacagaacttatttctcccatcatccattattggaggatttgtcgcgctgcttctcggcccacaagtgctcgggaagattatgttaaatttcgtttcggaagatcattttcttgcgagtggaattatgacaaatacaattatagaagtatggtctgcgttaccagggttaatgattaacgttgtctttgcctcactatttcttggcgcaacgatgccgaagcttcgtgatatatggacgttcggtggacctcagctagcattcggctgggccattggctggggccaatatgtaatcgggctactcgtagccatttttattcttacaccgtttttcgatattccagcgatggctggggcattgattgaagttgcgtttgaaggtggacacggtaccgcagcagggatggcaagtacgtttgaagagcttggctttgaagaagcttttgaccttgcgatcggtcttgcgacagtaggtgttctttctggtgttgttttcggtattattctcattaactgggcagtacgtcgaggcaaaacgaaggtgatcaaagacgtgaacggcttttccgaccttcgtaaacagggaatcatggaataccaaaatcgtgaaccagcaggtaaaatgacgactcgtcctgagtcgattgaaccgctctcgtttcacctcgctattgttatgattgcgattttaatcgggtggttgatccttcaggggttaatcggactagagagcatcacgatcacaaactggactggctcaagctttatgaagtatatcccgctcttcccgatcgcgatgttcggagggattattcttcaagtcttcttcagcaaaaaagataaatacaaccttgtcgatcgtcgtatgatcaatcgaattcaaggacttgcgcttgatgtgttaatcatcactgctatcgcgacggtgtcgctcgacgtgattggtgaataccttgtgccattcctcattcttgcggttgcaggaatcagctggaatttattcggcttcctaatgcttgcaccgaagatcattcctgactactggtttgaacgaggcattggtgactttggtcaatcgatgggtgtgacggcaactggcttgcttcttatgcgtatcgttgatcctgataatgaatcgcctgcatttgaagcgtttggttacaaacagcttgtttatgaaccattcctaggaggagggttagttacggcattatccgttccgtttattgtgcagttcggtgcggtagcaggactaatcttcgctgtggtcatggttatactcgggattgtatcgggtatttattatttcggtaaaggaaagcatattaaaaataactaaaagatgacgccatttctgacttcaggaatggcgttttcgtttatgaaatggaagaagttagtgtttttttaggaaagcagaagggaaattacgttatgaaaagaaaatggtatagagtgatcggacttggatttcctagggagggattctttgggtacaccagaacttagtcgtgaggacttgaaactcacggaattaagctatgtaaaaataaacgcgctaattttattaatgattttacccttatcgatgattggttatcaatttgctgtttcgaatgaggaaatgtttttcgtctatgagtggtcgcttgttgttctagtcttgatttcttttatacttgcaggagctacgagtatcatttacaacagttctaatacatggctttcttacgccattcttagttttgacctccaatttgctgtttttggtttatttatggggccatacacctcttatgaactcttctttgtttattatctttgttcagcgatagcactaatcatttttatcataacattaaaaaaggtgaaggtatttcgatatcttattgtcattttcatcatcgtcacggttcttttaacgagctacatgatgctgcttcaaagcttgtgggggacgaattggatgtaagaaaaagattcagaaagggtgttagaaaatggcgacagcaaaggaaaactttctaagggcgttcaatgaagcttttattagcggcgatcgtgacgttgtgctcgcgagtgtgacggatgatgtccaatggcatctgattggtatggagaagatcgaagggaaggccgcatttgaaaaggcgtggaatcgtatgcctccacaagatgaagcgaaacttacgatcgatacaatcatcacccatggtgttactgcagcagtggaagggaaaattcaggtgggtgaaaaaacctacgccttttgcgatacgtatcgttttaatcaatttaaagatgggattattaagcaaattcattcttttatcattgaagagcgggatgggatctgaagcatatgttgaacaaatcatgggtgaacaatctgatcgagtgtttgctacttctttcatccgggaggtctttggattcgctcattcataaagggtacggattattagggtttaatttaatttcgtttatcggatgtctcctagcaggtttctattatttctatgaaggctattgtctttataagaaaaatcgcagtgaaacgatgtaagttagtctagtaaaatagtacaaaattcgacctaatttattagaatcttctaaactattgtttaaacttcgtaaaaatcggttaaactgtaattaatcgcatagaaaacgtagaaacgtttctatcaatatgaatggaggattggatgatggagaatcgaaaagtctaccaaaatcagatttcggaaaagagacaggaaatggtcgcgcaactactcgaacacatcaatgcttccagtatcgaacaaaaacaagctatattaaaaaaagaaattgaccaggcgctcgattgtcgcgaccgtgaaacgtttatgcagttaactgatcgtcttaattcactcacataatgaaaaagttggtatatatgttaaaccgcttgcttataatctagtaatcaaacactcaggaggagatgttgatgctagatttagcggcggttttttatgttgtgatggaatggatgaatgaaaataaagggtacaagctccaatccgtctttcttttcggcggacttggtctatcatttgtgacatattttctctggttcataaaaaagggctataaaacggtcgaaagcgtcaagaacggatgagttgagtgagtatttcgtcgtgtgggagagttcgatttccgcgatattttcgttaattccgcgaatcggacgatgaattccgcgaaaacgtcaagtaattccgcgaaaaaactcatttattccgcgaaacgaaaaaaagacaccctgaggggcatctttaaaaagggacggtgatcgattggcccttcgtgagcgtttcttcctttttatcgaacacatcacttgtatgaattgttatggcattcagttgctctaggtcagtcgtatttagaacaaagccaagttgcccggttttttcttcaccagatgcgtaatctccgtaaaggttctctagataaaagtcatcatcgaatcctttcttctcaccgtcactcgtttcaagcgttgaaactggagcaaagttgactgttttatccgacgtgttctttacatggacgcgaatctttacatagttaaattccgtttcatcgttggaatagccatgaaagaaatcgattaagtcaggggagggcgcatatgccattaccttcacatctgaaacggttaactcaacatccccaatcgtcgttttttcgttaaagtcagagcttgtttttaacgtaatagagccgtccgcatcctgataagtttggccaacttcagttagtgagctgtcatcaggtgcctgtggactatcgattaatcctttgttttcgttttgatctgcatttgtttcatcttcttttgtcacggtcatcgtgttctctgtttgtgaaccagcttgttggttcgcattgttagcgcaccccccaagaaaaagagaggcagtacataggatgatcagtacgtgcttcatgtaatataacctcctcaatcagaaagaaaactcccgctgcttttggaagcaacgggacgtttttttacttgtcttttttgtgatcatcgtcctttattccatgatctttttcttgttttgcgttaagaagatccatcaccaattgacctgtttcattgttatcatgaaggccggcgaacttttcggattgtgggccgtacgcatagacattcacgtcgacacctgtatgtccgccagttgtccagccagttcctgagcggatgtcaaagatcttttcaatcgcattatcaatttcaaccacgtcgcctgtttcagtcgctttttcgacagacgcgatttcctcagatgttaaatcaagatcgatgttctcagtaagtgttttttccacatctgcaccttcagcaatctgtgctgccatgtaatcaggtgtctttttggctgctttaagtggagctggatcccacttgtattctccgtcgcggcccatcgcaaatccaccggtagagtggtcagctgttgtgactacgagcgtatgcttgtcctttttcgcaaattcaatcgccgcttcataagctttctcgaaatcttccatctcactcattgccgcaacaacatcgttatcatgaccagcccagtcaatttggctaccttcgaccataaggaagaagccgtctttatcgtcatttaggcgctcaagagcagcgtcagtcatttcttcaagagagggagcatcttccgtacgatcaatcgctttgtccatgcctttaggtgcaaacaggccaaggatttgttcgttatcgtcttgtgctagctcgtcctttgaagtgacatagctgtagccgtcattttgaaattcttctgttaggttgcgatccgagcgctcgaagtaagaagttcctccgccaagcaatacgtccactttatgctctccattgatcatctcatcataataatcgtctgcaatgtcattgtagttattccgcgattcatcatgagcaccgaatgatgctggcgttgcatgattaatttgagaagtagaaacaagtccagtagccttgttcttttcttttgcttcttcaagaacggtcttaacttcatttttatccatatcaacagagatcgcgccgttgtaagttttgattccagctgccatagccgtacccgctgccgccgagtccgttacgctctcttctggatcccatgaataggtttcttgagcaccaacgagatattcatcgaaagctgtcttttccatataaggcgttgttttatcatccatataagaacgatacgccgttgtatagcccggtcccatgccgtcaccaattaagaaaatgacgttctcgatttcatttttagggtttttacttttttcggattttgcttctgtgtcagtaccaattcctgcaaaacctgctacagctagtgatgaaatcacagcgaatggaataagcttcttttttgcctttttcgtaaacaattttaggtccccccggctcattttttctcacaaatcatagtttacttgattaacttgaagtgaatgttaatcgattgtaaggatcgttttaagataatagggtcgattgtcacagtcaaaaaaactagtttagctcgaaagatagtcccatttcttttcaagtaaaagtctagtttttcttactatgatcgtaatgatagcgatgccattttacaagtatatttggatgaattaggtaataagagcgagaggaacggatgcgtttattggcaggagaagcattttgatgtctattctcacacgacctttttcacagaagaaaaaaagagaagagtgagacaacggtcttacgattaggcaatacttctacgaaactgttaaaattatcattataatgaaaaaatgaaaaggggagattggattggacttagttatgaatgattcagtaatctatgattttaacaaaactcataagcctgtgaaggttgtaccatcaggaactagcgttcaaattgtgacgtatgactgttttgagaatcagcttcaaacggaggaagatgagattacgggaattgattggaaccgagtgaatcctgcaactggcccaatctctgtgaaggatgcactacctggagatgtattaaaagtttcgattgaaaagcttgaaattggggatcagggcgtcatggtcgttgggccggatcttggggttatgggacatcgtttaaaagaaatggagtcaaagatgattccaattcaagatggggttgctcgttttaatgatattagcattccgttaaatccgatgattggtgtgattggcgtagcaccagaaggcgatggtgtttcatgcggcacacctggtgcgcacggcggaaatatggataataagatgatcaaggagggagcagtgctctattttccagtgtttgcggaaggagctctgttcggattaggtgattttcatgcagcgatgggggacggtgaagtgagcgtttcaggaattgaagtccctggtaaagcgacggtgaagcttgaagtgatcaagggggagtcactcgttcaaccgatgctagaaaacgctgaagttgttacccaaattgcttcagctgccacgcttgataaagcggtaacacttgcaaccgagctaatggtcgatcgcgttgtggagaaaagcggaatgtctgttagtgaagcaaccatgcttatgagtgcaattggacaggttgaagtgtgtcaggtagtggatccacttctaacggcaagattcgttgtaccgaaatggttagagcagcagctaggcgtacgccttatctgattcgacatatgctgacaaaagttcgggtggtttcgggtggtgcctgtcactcgcatgagatatacttgacgcgggacacggtcgggacgcggtgcctgtcacttgtcgaatttgtcgaattaattggaggaacagaattatgattcgttttggagttattggaacaaataagattacggataattttcttgagggggcgactgagcttagcgattttaagcttacggcggtctactctcgaacagaagaaaaggcgcaggcatttgctgagaagcatggtgcagaggcgacgttcacgagtcttcaggaaatggcgaatagcacgctcattgatgcagtctacattgcgagtcccaactcgttacatgcagaacaatcaatcattttcatgaacgctgggaagcacgtgctttgtgagaagccgatggcgtcaaataaacatgaagtcttacaaatggtcgagactgccacgcgtaacggcgttcttttgatggaagccatgaaatccaccgtgatgccgaacatgcagatggtgcgagagaatttgcataaaatcggtcaaattcgtcgctttgttgcgaattacggccagtattcgtcgcgttatgatgcttataaagaaggaacggtgctaaatgcatttaaccctaagttttcaaatgggtcactgatggatatcggcgtatatggcgtttatcctgtcgtatccatgcttggcatgccgcagtcgattaaggcagaaggcgtcatgcttgagtcgggcgttgatggagaaggcagtattttacttgggtatgaagacaaagaagcggtgattatgttttcaaaaatcacagattctcatcttccatccgaaattcaaggggagaacgggagtatccttatcgacaagatcggttcaccaatggatgtgaaaattcattatcgagatggatcgattgaagacctgtcgcagtcgcaatcccatacgatgatgtatgaagcgaaggagtttattgaactgatccaggctggtaaggatcagtcttcgatcaactcacatgaaaattctctaagatccattgaagtgatggatgaagcacggaagcaaattggagtcgtttttccggcggatcaccgataaaatgagagagttaagtttatctcagctgtcacactgtacgtgtgacggctgtttatttatcaaaaagagtaagccttttcatccagcccgtttgaactagtttcaaaagggtacgatattaatagaatagaaaaatatggagggatgaaattggttagtaagtatggagaagttgtacaggagtcgctaaattcactactcgaggatcaatcgtttttaccaaatttcaaggatgaagatcgagaaaatgcgttcaaatcccttgaatcgattctctcaacaccgaaccaaattcagaaatcatttctccgcgttcctctcgagaacggtaagattttacgaattcctgctttccgcgttcaacacaataatgcgataggaccttacaaaggcgggattcgctttcacgaaacggttgaggaagatgaagtgatcaatcttgcgacgttaatgacgttaaaaaatgcgcttcatgatgttccgtttggcggggggaaaggtggcgttgtcattaacccacgcgaattttcggaaaaagaactacatacgatttcgaaaacgtacgttcaaaattttagcgatattttaggccctgataaagacattccagcaccagatgttggaacgggtgaacgggagatggactggatgatgggtgaatataaaagcatacatccggggcgcccgtatcgcggaagttttacaggaaagagtcaggtgaacggtggttcgctaggtcgaagagaagcgacaggaaaaggcgtttactatacgcttcgctacatgcttcataattttgttaaagaaaatgaagaatggtttaagaaaaacgataatcgctttgccaaaacagctctcgagcattcaaagcgcccgttaacgatcgggattcagggatttggaaacgttgggtccgttgcagcgcttgaatcgtatagttgcaactacctgaatacaaaagtggtggcagtaagcgaccggaacgttacgctttataatggtgatggccttgatataaaagcacttattgaattcacatccaatcatggaggagatttaccaacgacggatgaagcgctgaccgagcataacattaaggcagacattgaaggtcgtgaagatgtgctttatctcgatacggatgtgctgattttggcagcgcttgaagatcaaattcatgaggacaatgttgatcaagtaaaagcgcgcatgattgtggaaggtgcgaacggcccaattacacttggagcggatcgaaagctaagtgaagatggtgttctagttattccagatatacttgcgaacgcaggtggtgtcatcgtttcttatttcgaatggcttcaaggaagggagacgcaattttatagtgaagaagaagttttctctcttctttttaaaaaaatgaaggaaacgatggatgaaatatatccacagtttttcaatgatccatttgcgctcagacagaattgctacatccatacggtgatgaagctttcaaatattctttatcgtcatgggaagctctactaaggcgaaaagccctcttccattgaatggaagagggctttccttatggggattaagatgcaggtagcgtttctttaaactctgtcagtttcatgatcgtttcatcaattagctcggtcattttatccgtatcaggctcatcttttttcccttcatcaatgagagggtaaaggctttcttcaatgtttttgtattcatccgggaattcttgttccacttgagcttccatcttgtcccagttttcctcaagcgtcatcgtctgatcattaatggctttgacatcatcgctactattttcgagtgtggttttaagttcctccaggttcgataatgccgtatcaacaccagcttcaagatcgatcgtttcttctgaaccgctatcgcccgagtcgttcattccttcatttgttccttcgttcgttccttcattttctgaagcgccgttttcttccatgcttgagttatttgtggcttgattaccagtgttatcctcagcaccgtttgatccgcacccagctagaagagaacctgaaatgatgcaggaagcaagaagaatagggaatttcttttccaacaatatccactcctttcagttacaattattggttcccagtaagcgttttattcaaacgaagtcaaaagttgtgtttttttttcggaagatggaatgaaggaagatcgtcttaggacaattcggatgtttttttcaaatgacaagattgtcgttatgatccaggggccttaatggcgatttacttgagtgcgctgcaccgtttggggtacaatgacttcttttctcaaaggagctcgccatctttctatatcctatcgttcaaccccctcaactactatcttgagaaggaaactgttataatatccaacgaggtgacaaaatgtgacaaattacgggaggtgacaggcaccatcatgaaagcagttcaagtaataggttatggtgatgtagatcagttagaagtcgtagaacgagagattcctgttccgaaagagaatgaggtactcgttaaggtaaaagcatgcgcgattaataatacggaaatttggatgcgagaaggggcatatggaacaggaacgaaatcaggatggcgtcctgaaggtgttcagtttcctagaacaccaggatcggatattaccggtacgattgtgaaagtcggtcaacaagtgaaggaggggatgatcggaaagaacgtcgttctctttccttttacttcgagcggagagccagggtctgaacatatttcagaagatatgtctttcattggatcagagtatgacggaggatatgcggaatatgttgtatggccagcagaactctgttttgacatgcctcttgctgactatacagagagtgccgtattctctgttagtgggatgacggcctggcatatggttgaacaaattcagcctaagcagggcgagaccgttatggttacaggagcaaacggtggagtaggttctctgaacgttcaaattgcgtctcgtgtatttggtgctaatgtgatcgcgattgtaggcgatctcgctttggaagatcagttgaagaagcttggggcaacgcacgtgttttcctacaaatcggatcagcttgctgaagaaatacttgaagtgaatggtggaacgattgactcagtgttagatgttgttggagatgcgttgttttcaacttcgcttcatgttttaaaaaagggcggcaagttttgtacttctggctctgctgggggacagaaaacagaacttgattttagaacattgtatttgaagcacataacgctctatggctctgttcttggtacaagagaagaatttaaacggatgcttgaagcgatagctgatgggaaaatcacaccagtgattgaccgaacgtttccattagaacaagcgagagaggctcaacgttattttaagaaagcgggtaaactaggaaaaattgtgttacttcctgaagagtaagatgaacgattgaaacccctatccactatttggagataggggttttcctatgtcaggtaggtgagtgcgccaataaaaacgaagaatggctcaccacttttagggaaatacaggaataagcgatgcggctaacgaatatgtagtgtataaaatcatagaggtgatggtgtgaagaaaaggggtttcttcaaactttactcgatgctttgtctgcttagtgtttttgggtattcctactgggccacttcttggacggcaagtcaattgccggcactttcgaattggaaaagccatcttattttcacaccgaggacggttgtagcttctaaagacatttatgaaattgatatgtttttgtatgcacttaaagtagtgcctctaatggcaagtgtttgtcttctttctttgttgatgatgattggaattgggatatattatgtgaaaaagcagctgtcatacgttggggaaaagaagatcacaagttcataaggaatgaagagtggggcatatgcctcactctttttgttttaagaagatgaaatgcctcgttccgataagttcagagttgttcgactataattgatgtttttgagcgaaagcgggcggtgacaggcactcgcgcatttgcctaaatgccaataaaaccactaataaaagaaattggttttattgcttattcaaacgggtaacatcattcgagtgaattcgagtaaatgtgggtggtgacaggcacccaagagtcgacttttgtcgatttagatttgccaggattggacatagtaaaacagacagaagatttttgaggaggcaaatcagctatgattagtattattgttggtctcgctctcttaatgctcctcgcttaccttggatggtcgattatttggatcgcgccattggtatctggaattgttgcattattgagcggaatgaatattcttgaatcctatacaggaacgtatatggaaggattcgttgatttcgcgaaagcgtatttcccaattttcttatttggagcgatttttgggaagttaatggaggacactggggcagcgcagtccgttgcttataaaatttcaaacttaatcggagagaaacgtgcgattcttgggatgttgatctcagcagcgattcttacatacggaggcgttagtctctttgttgttgtattcgccgtatatccactcgccgtggcaatgttccgccaggctaacgtttcacgtaagcttcttccatcaacgtttgtgctaggtgcttttacatttacgatgacagcactgccaggtacaccacaaattcaaaacatcattccgattaatacgtttaaaacatcgacgatggcagcgccgattcttggaattgtcgctggtttaattatggcagtaggtggttatttctatctgaaattccgtgagaaacagctcgcgaagaatggtgaggaatttactgaacctaaagggtcaaacgaagtaaaaagtattaatgaagatgagcttccgaactggattttatctgtgattccgttaatcgctgttgtagtgacgctaaatgcatttgaaaacttaagcattttgattgcacttggcatcggaattcttctcattatgctctttaatattaaaaattacaagcagttcattaaagcgattaatggcggagcatcgggatctgtaatggcgacaatcaatacaagtgctgccgttggtttcggctcagtcgttactgcttcacctggttttgaagcagtgaaagatctgatcttcgcgattccacttagtccgtatttttcagaagcctttgctgttcagcttttagcgatgattacaggttcagcttctggtggtatgggaattgcgcttgaagcgctcggtagcgaatactatgacatagcaattaataacaaccttagtttagaagcgttccaccgcataacagccgttgcttctggggcatcaatcctgccgcataacggtgctcttcttacgttatttacggttaccggactaacgcacaaagactcctataaagatgtatttgtggttggtttaattatcccgatgatcgcaacgatcgccattatcttcctcgcgatgatgggcattaactaattcatccgatcatacgaaaatcccccgttcacccttatcataagggtgggcgggggattttttgtgcttattgagcggtataaccaccatcgataacagcagcttgacctgtaatgcttttcgctttctcactaactaggaaaatggagtagtcagcgacttcttgtacttggattaaacgcttctgaggaacgagtggataaatgacttgttctaacgctttctctttttcgatattacgtgttttcgcaaggtcttccaattgattttgtacgagcggtgtatcaacgtaccccgggcatatcgcatttacggtaatgccgtagtctgcgccttcaagtgctgctactttcgtaaggccaatgacgccgtgctttgcgctgttgtaacctgcttttccagcaaaaccgatcaatccattaatggaagccatgtttaggatacggccatatccttgctctttcataattggaaatgcatatttgatgccgtagaatgggccctttagcataatatcaagaattaacccgtacttttcacttgggaactcttcgattggcgccacatgctggattcctgcattgttaacaagaatatcaatacgtccaaatttcttgacggtttcttcaatagcattcttcacatcttcttctttcgcaacattcgcaacaacgccttcaaccgtaaagccttgagatgttaagctttcaacagactccttaagggtgtcttcattaatatcattgagcattaccttagctccggccttcgcgaattcagtagcgatctctagcccaattccttgaccagatcctgtaattaacgcacactttccttcaagcatagttgtgtcctccttaagtatcatcagctcttaggatacccaactttcctcaagatatttcgactttttcctccataaaccgggtggtgacaggcaccattaaaaaggccctctcccgaagggagagggccagacgcgttatttaatgattttttgatctctagccatttccctcgctacttttggtgcgagccaaaccattggcagaaggataagcgagactggaacggctgttacaacaatgaagttctgtaactgcgtaatgccgctgtctcctgtaataagaagaatgactgcgacagttcccataagaattgcccagaatacgcgaagccatctttgtggatcgccttcgcctgtgacggccattgcaattgtataagacattgagtcacttgtcgttacaacgaaaagaatcgttagaatcaagaacagtggtgaaacaatacttgcaagcgggaattgctctgtaatggcgaacattgctgctggattaccagctgcattcaatgcttctgagatcgaaccaggatttgaaagttcaaagaaaattccagatccacctagtacggtaaaccagaacgttgagataaccggtgcaaaaatcgaaacggcaataatgatgtctcgaatcgtacgtcctcttgaaatacgactaacaagaatcgccatcattggaccgtatccaataaaccagccccagaagaagactgtccagaatgaaagccaaccggtatcaccacggaatgtgctcatcgtaacaaattgatcgacataaacaccaaatccagagataaagtgattgaagataaagccaccaggaccaaagatgacgataaacgccattaatccaatcgcaagacgaacgttaaagctacttaaatattgaattcctttgtaaagtcccgtaactgctgaaatcgttgaaacaataacgacagctaaaataatcgaaaactgcgtgctgaattgatttggaatgccgaaaatttcttgaagaccatagcttgcttgtaagcctaagaatccaatcggtccaattgtacctgcggcaaccgcgataacggaaaacgcatcaatcagagtaccaaaccagctgtgacgcagcttttcaccgaaaatcggataaagaagcgtacgcggcttcattggcatgcctttatgataatgtccgtacatcatcacgacggcactgatcgtacctagaatggcccaggcaaggaaaccccaatgcatgaagctttgggcaagtgcagtatcaatcgcaccttgagttccagcttcaattccttttccatcttgagaagggggaacagttaagaagtggtacatcggttctgccgctgcccaaaacacaccgccaccggcaagtagcgtcgccataataatggatagccacttatataggctaagctcaggtttatccaaaccacctaattttatttttccgtatttagagaaggccaatccaatccctacaaaaaatgtcgctagcattaaaacttgccagaacccaccgaaaaacctcgcagaccaggcaaagcttgagctaaccaagttttcaaccaatgaaatatcaaaaagtgcaagaatgacgaagaggatcaaaaccccaccgcttattccaaagacgggccaatcaatacgcccagtttctttattgttcatataagactcctttttatcgctttttaaacacaattacttactctaccactaccgttagtatggtgtaaagagagaagttttaatctgcttcattacttaataatgctaggataaattaacaggtaatcgattccactaacctccttttctgtaaaattaagtcgaaattagtcgagttgtgttttcgatttttaaatattccatgtaaataaaatgaaaccggaaagaatgagggattctttccggtttcaaacgcgtaatattttattgtttatggagatcatatgaaagatctttgaaaagcgagtgaaacttacgtttgataattttgataaaggatatttatttcgaccagtaaccatctttcaaatgatacccaaggcgcttcattctaaaataataaagcccgaaaagtagtacaaaactaaagaaaaagttaatgagggtgagaataagagctgttattaaacctgagtcgtcacgaacgtaattacttatgaagaaaagaataaacgcaggaattccgagcagccacggatgtttcttcatgttgaattttcgatcggtaggtgtaagaaagctttcgtctgagtgtttgatggtgtgcctttcctaacggataaaacgatgagtactgcaaaccctaccatgaccccaaaactgaactttttccaagtgctgaccataacgggcatcctttcttagttgttaattaatacctgtttacatcgcaatataaaccaattttttacataaaaaaacgcccgtgacggacgatttttgaggggataattcagattaaagtaaaatcaaaactaagtacgggtactaacacaactttacgaaaggttaaatctgaaaatcgaggcgtgaaggaaacgttactgattaaacgccacataaaaaggatgatgttcttcgtttaagcaatattccatgcgctgacggaaatttttccaagtaaccatttcaagtgcttgatcaataggaaagaatccaacttcgagactttcagaggatgttgtgagtttacccccaacatagttagcaagaaataggttattcgaaatagaagacttcacgttttgaaacacgccgcaaaatttaacaatttcaacatcagcaccggactcttctttcgcttctcgaattgcagcgtcgtgtaatgattcgccttcttctacttgacctccagggaattcccaccctctacgtggcccttttattaaaaggatttcatctgcttcatttaaaataattgtagctgctgaaacgatgtgttttggagggtgatacgcgtaaggttcggctgttgacgttagaaagtcctggctgctttcaagataaaggttccctagatcttctctacgttgtttcgccttctgatgtaacgcgctttttcgaatttgcttttcgatctcttcatagtgattcatactcttatattgccaggtcgcggttatttcattctgggtttcgttaacccaacgcccaaccaatttggcgccatgttttagttgatttggataaagataagtatggaaaaacgcgttgaattcatctaatttttcaggttggatgatataggtttttctgcgataaatcattttctctcgctctccatttcaaaaggatttacttttgctattatgtcaaattattaatattttgacaattaatgtttgcatctggtttattggcggattccaaatcgctcctgtaagctgaacatatctaaagacgaaggagagaataacatgccagatttaaagaatcgagtggtattaatcaccgggggaaatcgaggccagggaaaagcaattggtgagcatcttgcttcattaggagccaaagtgatcattggagcgcgccactatcaagacgctgagaaaacagcaagtttgatcggggcttatcctgtgcaattggatgtaacgaaagaagatcattggaaagtagcacttgcggagatccaatccgaatttggtcagttggatgcgcttgtaaacaatgcagggatactaaaaagaaaaccatttatcgatttatcgattgaggaatatcaagagttaattaacgtgaaccaacttggtgtgtttttgggaatgcaagccgttgttccgttaatggagaaacagcgaaaaggggcgatcgtgaataacgtatcgatctcagcgtttgcgccgatcggtcagtctgctgcttatgcagctacgaaagcagcggtcgtcgcgatgtctaaggctgcggcaatcgaattaggtccgaaagggattcgagtgaacatgattcatccgggaggagtagagacggagatggcgacacagggagagggtgtgccagatttctatcagacgattccattagggcgtatcggacagcctgttgaaatcgccagagccgtagcctttcttgcttctgatgaaagctcttattgtacgggaacagaaatcgtgattgatggaggaatgacgctcggatcagctgatgtataaggaaagcttaatgtacaagagcatatgttgctcttggtgtattaaaattttgaacatgttactttttgcaaatcagttgaaacgtcatcatagagggtgatcttttttgaaatccgttttaaatagttctgctgtcgctttacttcacgttctacttttgttttatggttattaagaagagttcttctttctcgtatcgtcgaatcaccctgtttgtagagaaaaacgtatgtttttatttcagcaatcggcatgttggtggaacgaagagcaagaataaaatgaagccattctaggttgttctcagtatatctgcgaacgccattttcatcgcgttcgataaagggaagaatttcttccttctcatagtatcgtatcgctgaagcagactggtttgtcaacgcggttatttccttcatcgaatagtatttcatttttttatgcctccatttaagtcactttatttgtgttaaaccgcactttaacctatagagtggagtttatcaattaaaacgattgataattcaactgtggaggttttataaatggcaaaagaaaaagtcgtcatcattactggagcatcaagcggtattggagaagaaacagcaaagttactctctgaaaaaggagcaaagctcgtattggcagctcgtcgtgaagaacgattgaaagagctaaagcagaagattgaagacaacgggggagaagcgatttaccaggtaacagacgtaacatcatctgaagagatggagtcgctcgctcaatacgcatatgatacgtttggaaaaatcgatgtcattgtgaataacgctggtttaatgccactctcccttctacacaagaagaaatacgatgagtgggataaaatgatcgatgttaatatcaaaggtgtactatacggtatcggagccgttcttccttatatgagagagaaaaaggaagggcacgttattaacatttcttctgtagctggtcatgaaatttcaccaggcagctcagtctacagcgctacaaaatttgctgtaagagcaattacagaaggtctaagaatggaagaatctgtaggaaataatattcgtgcaacaattatttctcctggagccgttagcacagaacttactgaaacgattacagatgatgatgttaaatcatccattgatgccgtttatagcggtgctattaaagctgacagcattgctcgtacaattgtttttgcgatcgaagaacctgctgaagtggcaatcaatgaaatccttgttcgtccaacaaatcaagaatggtaagaagagagaaggagaagctaacattaggcttctccttcttgatttttttctgaattcggggttacaatgggaaactgagactgaaatacaatgttcggtcttttattgtacgaatttaacgatctcatgaactaaacttgaaggtatgaaacgagagaggtatgtgagcggacatgaagctcatctcgttcaacgcaaaactgtaaaaccatatacaaggtagcaatgatctgaacaattagcgtcagacataagccgaaaaggagaaaaattccttttcggctttttttgtgtctttatacctgtgtgaatgatgaaaaatgagaggaggttgttgatgtttactttaagtgatattcctatgttttttgttaatttctttattattcttccgatcgtgacattggtgcatgaggctggacatgtgctcgtagcgagattatttgggggaaggattaaattctgcattggtactgggaaaaaaatattcgatattggtccattggaggtacgaaagaaatatttcatggaagggtggtgtcagtacgagaagttaacttacgataagacatgggcgcacgtttcgatttaccttgcgggaagtgcctttaatttacttcttattctgatcattaactatctgattctgacagaggtgctgccaaaagctctagtgtttaggcagtttgtttatttctcgtttaactttattttcttttcattaatgccttataaaaatgaggatgggaaaccaagtgacggaatggcaatctatgacgtcattcgctatggcaaggcagaagacccaatcgactaagttcgacagaaaacgggcggtgacaggcaccgcttacttctcttcatagaatgttatccgatttaaaaacgggtccgtgacggtcatttcgatggttttccatgaggtatgcctcatccctggattggaataggcgtattctttctgtgatagggtgtgatggtagtcttcgacgttatcaagctttactcgtatagaacttcctggtgaagaatctccatgatgttctgttaaatgaattagggcgttatgaaaagagacttgaatgtattcaggcatattttcttcatattgatgccgccaatcaatcttaaaacctaagaaatcgcgataaaagtcagtggctttttctgtgtcaaagattcgaaaaatcggtgtaatcatgaggagaaagaacctgcctttccttcatagttttcagcctatttcatctgtaaagcgaaaagcgatccgactaagaagaatggatctagcttactcttatcatataacgaatccgtaccttaaaaaaggggttgtaaaaaaatgggtaggaatatgaagggtgttttattaacaaaggaattggaacacagggtcttttggatgatcactagcccgacgcatatgcgtcgagctagtgatcaataccattatgaatcgatcccatttatctcataagcagctcttagcccggattcaatcgcaccttccatccacccgtgaaaggaggaagtatgttctccagcgaaatgaagctttccttcaggctgtttgataatttcaccaaggttgctttcttgaccaggggtgaaaagggtaaagcagccggaagaataaggatttttactccaattaaagggaacggctttgatgaacgctgtgtacacttcatttccatagattttggctagatctttaagcagtatacgggttagttcttctttcggtaaactgccccacagcacggcgtcctctccccagctatagcttgctaataggacagctgatccacctgaccccattccttctccaggtacataactaaaccgaatcggtaaatccgtgagtgcattcccaacgttgtttttttcccaaaagcgatggcgaaattcaattccaattttaacagctgggacattgatcagttcacgaatcgcctgccattttttaaatgagacggaatggtaaggggcaatgtcgataaattgaagtacggaaaaagggacggctacaatcgcaagatctcctttaacgcgataccgctcatttgttttaggattcagcgttgtaactgaaacgccacgattagactgctttattttaatcactttttgattgaggtaaatatgatccctcagttcttcaacaaatgaataaggcagccgatcgttgccgccgtcaatttgatagaactttacttctttgctgaaaatcggatagataatgtctgttaaaatatccgtaaatgcgaactcaggaaagccttcaatcccaagcatgacgccgatcgagcgaatggcattgagggataatggtttcccaagcggattgtagtgaaggaattctcccattgaatattccccatatttggctaccaactcttcttgttcttcttttgtgctggctttataaaggtcgataaacggctgggtggcttcaaggaaaagggctgtagctgttttccctttttcactttcttccactggaaaacgaagaatgtcagggttttgttcgtattcacctctagtcgttagcacattgttaacgaaaataagatctttcgaggagtcgtttaaaaaaggatgaagggggaggtggaaacgacgaatgtattcgtgtgcgagggcatggttatcggggattctcattgcgcctgcgtccatatattgattcatcgaaaacggttttcgtaacgtataaacgcggccaccaatgcggtcgtttccttctaaaatcgtcacgtgatgaccactccttttcagcaatgaccccgctaccagccctgacaggccgcttccaataataatcacatgtttaggaggactttttccgggtaacccatttcgaataagagatagtaaatcttctggataacgtaaagaagaaaatggtttggccatgttttgatagcctccttgtctagtaaacgtccttgataaccaggataaggattcaccttattaatctatgtctaacaaaaaaaggatatgaaatgtgaaattcttctttcaataacggagagaatggttagaaagaagaaccgtttcctgggcgcaaacataaactacaaaaaaacaaaacagatgcgggacgtacttgtatttgaaggaggaacgacatgaaccggcagaaacctctaacctcactgtttacgaagcgaaagccgaattttcttatcttaatggtggatgaagaactctatccgtcagtctatgaaccggatgaagtgggagcctggcagaagaaaaatcttttaatgcaggaacttttgcttgaaaatggatttgaatttaagaatcactatattggcagctccgccagttctcctagtgaaatgacgctttatacagggcagtatccttccctgcatggggtaacgcaaacgagtttctcggcgaaaacgcaattcaatcatgatatcgattcgaatcacgttccaacgatgagagattacttacaaaaagccggatatcaagcttactggaaagaaaaatgcttcgcttcagttaagggcattcaagtggctaatcagagcaccgcagcagcaactaacgaggaaagtgtttccgatgtggtgtatgcggatgaagttatggcactgcttcaaaagcttgatagagaagaaacggaagaatcaaagcagtgggtgattttcagctcgtttctttcagaacaaagtcacggtcaggtgatgaaagtatttcagacgttaaagaagacgacgttttataggaatacgatcgttctctttctattgattgaggggcaagggttaggagcgtatggaaagcgtaatgaaaaaagaaataatgtgtttgaaaaatcgattcatgtccccttgattgttcatagtcctgcgctctttaacggcaaaaagagcactacaatgctaaccagtcatgtagacgtactaccgaccatgttagggcttgcgggaattgatgaggaagagattcagacgttgcttagctttgattatacggaagttcgtccgcttgtcggaagagatcttactccgctcctgtcggggaagaagcgattttaccgggcaaatgaaccgctttattttatgacgaatgatgatgaaagacgaggacttaatggtgctcctgaagaatcagaggaattagttgtccaaccgaaccatattgaagcagtgatgacaactttgcatactggcgacgaggatcagaaggaagtttggaaatacgctcgttactatgatgatccacaactctggagaattcctggcgtgtcagatgtgaccgtcactcaatcgaattctgttccatctgaagtggaggaaccattatcaagatgggtaaccactacaaagacgactcctgctccggatgaatttgagctatacaacgtaacacgcgatccgttagaagaaaaaaacctcgctcatccaaactttgaaacacctgaatcgaaagaaaatcaaaaggttttatcgctcatactagaagagcagcgtcgtcagaagcgattgtctccgaggagaagcggcgcagggaacgtcgctatgtgagtttactgagatttaggactgtaaacatcgaaagcggaagcgcttatgcgcttccgctttcgacgttttatgacaaataacgggtggtgacaggcaccctcacgaactagatctttgtgcttatctttgtcaactaacaaacccatcgaatgatttaatgaacttcgattatcgtggcttaaagactactaaaaagtaattatatggtacttatctgcgacgatagacacgcactgaaaagttccatacgcaccaccaagtaataattttatcgctttcatattcgcttttagtagttctatactgtgacagtaaacaaaacagcaagaaaggtgtgaacatatatgaagaacattctattgattaatggacatgagtattttccaaagtcgaagggagagttaaacaaaacgatctttaatgaatggaacgaagtcctctcatcagactatgaagtgaaaacaacgatcgtcgatgaagagtatgaggtcgaccaagaaattgagaagtggcagtgggcagacgtcatcattatgcaaacgccgatttactggtttagtatcccaggtaacttcaagaaatacattgatcgtgtctacatggacaagattttcttcatcggctccgatcgttatggtcagggcgggatgtttactgagaagaaatatatgctgtcgctcacatggaacgcacctgaagcagcgtttggaaatgaacagagcttctttgaaggacgagatcttgatcaagcgatcgatcaccttcacaagatgaaccaatacatcggtatgcgtccgctaccaacctactcgattcacaatgtgatgaaggaaacaaatatgccgcactataagacaaagcttcatgatcattatcgagaagtatttgggaaatagcgcattccattaccatcagaaggtttaaaattagattttcgggaaaaccaataaaggaagattgaaaggagtaataatcatgacagtacaaacaaaaacactaaacaacaatattgaaatgcctgaactaggttacggcgtatttcgagtagagcaaggtcaggaattggttgaagctgtgaaaacagcgattaagaaaggctatcgcagcattgatacggctgcgatctacggtaacgaggaaagtgtaggtcaaggcgttaaccaagcgattgaagaaggtctcgtaacgagagatgtacttttcattacttcaaaagtatggaacgacgggctatcttatgatgaaacgattcaagcgtatgaaacaagcctatctaagctaggtcttgattatttagatctttacctgattcactggccaggggataacaaataccaggagccttggaaagcattagaaaccctatataaagaaaagcgtgtacgtgctattggcgtaagtaacttccaggtaaaccaccttgaagatcttcgcaaaaactttgagattacaccggtaattaaccaaattgaattccacccccgcttaacgcaagaagaagtgagaacgtattgtgaagagcacaacattcaagtggaagcatggtcaccacttatggctggtgagctgttggataacgaaacgatcgcaggcattgctgagaaatacaataagtctgtagcgcaggttatccttcgctgggacttgcagcataacgttattacgattccaaaatcaatgaacgagaagcgcattgaagcgaacatcgacctctttgattttgaactaacatcagaggaaatgaagcagctcgatgcattgaatgacaatgctcgtagcggtccacatcctgatgaatttgattttaaaatgtaagaccgaagaagtatcttatctgttgataagatacttcttttagatttctagcggtaatggcaagtctactcgaaaccaatatcaaaaagtgataactatgaagccgatctcatttttgggatcggctttttctcattctaaaatttattttccccgcaatgcccctttttcaactttccaaacgatatatagggtgaaaggaggtgatcagcatggcaacctcatcactaatggatacgcagcttcgcatggtacttgaagtaggcgtggacgaaaacggcaaatccatcttccgcagcaagaacttcaacaacgtgaaaacatccgctacgcctgatgcgttgtttgcagtcgcattagcgctagcaccgcttcagcagcacaatttgtttgcagttgagcgcaatgattcgtctgatcttcaagcgtaacaaatcacaaaattttaagaaaggaggaaatccaaaatggctaaaacactagagctccaatttaacacgcgtgacaacaaacctttttcaattacgctaagcgatccagtcgagcctgtgaatccagctgcaattgcagcggcgatggatacgcttcttgcgcaaaactgttttacaacaagtggaggcgatcttgtttcgaaaaaaggcgcccgtatgattgagcgcaacgagaatgacattattatcggttaagcaattcagaggaagggcaattgtccttcctttttagcaagtccactaaacgaacggggagggagaacgaatggagtcctggatgtctctcatcagcgaagttggctttccagttgtggtcacgctttacttgctgcaccgcattgagcaaaagctcgatacgctgaacgataccattctgcagctgccagatcacttaaacgctcgaagttcgaatcaaaaaacagggtgatccctgtaaaaaggagagcaggttcactagtaaaagtgagccttctctacaatacataagtctcactcaatttcatattggacagcggcttcccattctctttttaaatatggagatggtgaggtttcttcaagtgcgccgctggtcagaacgtggaacgcctaccacacgtttgaaaacaaaacttgacaggtgagctgaagccaatgcagaaaattcagcgttctcaaagatacacagttcccggtttctgtggtgagaagctatggcgtgaacggccgttaacggttcgggtaggtaaccaggcgtactacggtacgggtagcagcgcacagatggcgcacattggactggtttaatgtgtagaaagcgtgctgttgaagaaattcaagcgttcaaatcgggtgatacggtggaaacctcagaaggtctcagtatacttcagtagaaaaggacggctacttttacagcgctgatgttattgtcagcgctgtaaaggtagtcattctctgtccaatgtttcctatctgatctagtgccttcagtggttgaagggcaaaagagagcattggagcttaggaaaataaagaggaagaaagagaagaatgagggatatgatagggggttagggagagcggatcagagtttgacgttaggttttaatacgaagagtacgatcgattatcgtataaagctagacatacaattcgacatcatgtaacaccaatcgggtggtgacaggcactagttcaagaactgatcgatcttcttgctaaacgctttcgcaatttctttattcgcactgtaataaaacgtattacgctcatccctgatatgaatattcactaatccagctcctcttaaaatagaaagatgatgatggatattgccttttgccataccgatttcagaaacaatgtcggtaaatgtatgagaaccgtgagacaagtattgcaagatctttagtctcttctcatcacctaatgcttttgtaaagcgaaggacttcgttgagttcatttttcgtgtctttaatagaataagtaatataaagcgtatctttcaaatgatcgatgaacgccataggatgaagatgggtggaggggattaagcaaacattcttaaccgtttccgattcgatgataaaacggcttgcttgtaaaatcactttctctcctgttttttcttctagcatcttccgtctactttttgcatcagccgttattcgctccaaaactccctcactatgaaactgaaaatattccttattccaatcctttaacagtttgatcgactgatctcgctgttctaataaatttgtaggtaacgtcattttatcaccgagcgaagaagcaattcgttcaaacaattccccagctgacatatttcctaaccatttaaaaaaagaatcgatttcattcttataaggagtttgttcaatgaatagaacgagtaaatcttcaaagagcaaattctcttttgatgcgattgcctctttcaaatcaggtgaaagagattcttccactgcctctggccacttagagccaagatctaaatacttcataagggtttgtcttttatataaagaaaagcttaataagagctcatagattggggaagctaggacgctaacatgataggacataaattttcctccgattcctcatcatttttattcatcttagcatagttctatataagaataatacgaaaattataaattattatattgactgaatattttagttcaattaatattgaacttatagaaatgatgggaggtttttacaatgacattcattgaactgcaaagtcaggtgattgatcttgttgaaaagaaagccaataaggaagcctttttgttaatggaacaagcaaaagagaagttccctcaaaaacgtgatcgcttaggccattggatcgcaagtttatatgttttagaagggaaacatcaggaagctctagcagaacttcgtgatgtgattcagcatggattatggtggaatccggaaattttgtcatcagatcctgagttgagcgcattgaaatcctatgctgagttcaacacgattttgatgacatgcgaacaaatctatgaagctgaaaaagcatccgcccatgctcattacataaccctaggtaaccaggaggcagaaacggttctcttcccgttgcactggaaaggatcaaatagtaaagagttttcgaagcagtggtctgactcgaagctgtattactttatgggtttccctcaatcctctcagctttttagctacaaatgctattcatgggatgattcaacaatggcaatgaatgatgtgagaaatacctttcaatcgttcattcaacaccatcatctctctgaaaaaatccacatcattgcaggagcctctcaaggcggaaatatcgctactcaaatgagtttgcgagctgacgtggaagcgtttcattattttattgcaatcgttccagctttcgacttaaagtcacttaaagaaactctcacaaaacagctaaatcctcatgcaagaggctgcatcattacaggagatcaagaccctttctatgaaactgtcttggaagcggttaaactttttgaaacatatctgattccttgcaaactcattgtaaaagaggggatgggtcacgtctttccagctgatttcccagatgtgttagaagaggcagttcaatatgtaacagaacaggatacaaacagggattaccatactggaaaacgaaaccaaatatctagaaaatcgtactagtaagagagagtgaaaaatcgaaaaggggagataggaaatggagtcaaacaaaaatttattctcaaaaccctactggataataaatacgctcggcctcttactgtttgtcctaatcggaatgttccttgttgtgaacgaccatctcactgcttttacaatcgttgcggtttgctatggtttttttatgttaatagggaattctttgtaccgctcctatcgaaagtaaggcgctcacggggctcgccgcattcattcttggtctcggcatagcggtcgatgcgacgatcctcacgtttgaacgcctcaaagaatgggaagatccgaatcagtcatttgaagagcgcgtcataaaagcgtcaaatcgaacctttcttacgatcgcggatgcgcatcttacaacattagttgctgctgcaggactgtgggtattcggcgtgggaagtgtaagaggttttgcgtcaatgctccttatcagcattgttgcaggcttcctaacattctatgcgctattgcgacttcttctatatatgatgggagaaacaaaaattgtggaatggaataaagaaagacatcataaacggggagcgcttaaggagaaaagctaatactttttctctttaagcgtttttttgacctgttgttacaaaaggatgcggttcaataggtggtgttttttagaaaatgtgataaataggttaaatgtaggagaaattaaacgtatcataggttagttaagaggatggacttttcgtggataattataaaagcgataataccgcaagaagatataaggcacatgtgagtattcttggtacgacccaaatccatttaagaaatccgtatatcatagcctggtggtctgtttctttcccggggtttgggcatttactgctatcaaaatatttgagaggatttttattactagcgtgggaagttgtgatcaatttaaaggctaacgtaaatcttgcgatgatttattcttttcaaggaaatatttcaatggcaaaagaggttttagatacccggtggcttcttatttacataccagtatacatttttgcaatttgggacagctatcgtacaacagttgataatgaacaatgtttatatccttactgagcgagaagatcatgaaatcaattcctttagtataggggctttagaaatcaattatttagataaaagaagcccatttttagcagcactatggtcatttttcatgccgggactcggacaactttacattcatagaattgttacagcatttgtggtcatcatttggagcgtcattttcttttattactcccacatgctagaaggcgtatccttgctttttttaggagaggttaagatggcgactagtgtgctagaacctgagtggttactcatgtttccctctctctatgggttcgctatatttgatgcttacatgaatacagttgaaaataataagttgtatgaaaaagagcaaaggcgttttcttaagaaaaattatcaagccaggacgtttcacgtcttgagaaggaaagagcgtatatgagtatgcagatattttcaacctttgaaaatcatatctttttagaaattgcgatttcgaatttagagaaaattggtataaaaagagaaaatatctacgccgttccacttgatcatcgtgaagaaaccaggaaaatctttgacacgctacatcgatcagacggtatctctctcattgacattgcgatgccattggccacagcattttctgttattacagctagcctcggttttgaactaagatggggaccgatctattgggggctaatcggcgccatcggtggctttatgactggactagcgattcgtttgttgattgtcatgataacgaataagaaaaaacaacgcttaaaaggtaaacagtcggaaattattttaatcatcgagtgtgaagagggaaaaggtgaggcggttgaaaaaatcctttgggaacacttggcgattggtttagcaaaggtaatggataggtgattaaggcatttttttatctagcaaatgaaaaagaaagagtctgattaaatagctaaatcagactccgaaatcctctttatttgatttttgtaaacgattaacagaatcagttcgttttactgggaagacttagtctcttgctgatcgtcgtcctcatcatcttcatcatcttcatcgtccacttcaacctgcagaacttcaccattcataccatcaatctcaacttccgtttcaccagcctctgttttgatgtcgaactcataaacaatcgttccgttttctttctcaacatctttctcggttacttctccagaagcttcttctttcgcaatcttttcggcttcagcttctgaaatcttagcttcttcgattagtttgctttcattaccattggttgaagcaagcacattctccatcccatctgtcccttgatagaaaaaagtacctcctgcaagtcctagtgcgataccaccaataataagtgtttttttaaacttcatcatgtttcctccttttgtttgtatgacatcctctatgataaggaaacaatctaataaaaaaaggacagtagcatgagaaaaaaatgagcattctctcatgaaattctcatttttctattgctgttagggtaggtacaataaagaaagaagaaattaagaggtgaaaaacatggagaaagaatccattcttcttgtagaagatgaagtgaatgttattcaatttatgcagttagaacttgaacacgaaggatacgaggtgacaacggcaaaagatggagaggaagcaatggcgcgatttcaagaaaaggaatggagcgtgattctccttgattggatgcttccaaagcttgatggccttgaggtgtgcaggcggattcgaaaaacaagtcaggtaccaattatcattctaaccgcaagagattatgtaggagataaaattcttggactcgatcgcggcgcagatgattacattacaaagccgtttgaaattgaagaattgctggcacgaattcgtgcagtattaagacgttctcaggctcagggggaaaaagcgaaagaagataagttagtgattgagaaccttgaagtgaatttgaaaagtcgtcgcgttactcgggaaggtaacgagattgaactcacgcagcgtgagtttgatttgctagtttttctcatgaagcatgaaggagaggccctgagtcgtgaatggcttctttccgctgtttggggctatgattttgcaggcgaaacgaatgtcgttgacgtctacattcgctaccttcgcaacaaattggatcgcgactacgagccaacgcttattcatacggtaagaggaattgggtatatccttcgttcctcataaagcaaggaattggaggtggaaaatgtgagaaaacaacgaaatcgatcgctgctaaaacaattcacttcctggtatgtgtggcagttcataattgccctaatcatcataggtgtcgtcgtactgggggcgatcggatttttcttgcttgaagcgacccaggatgaggtcgaagcgatagaagaacagctattgaaagttaccgacgaaagtgatgttcagcagtcgctagaagaagttctttatcctgacaatacggactattatgttgaaattcttcaacgtggagaaattctggcacaagtaaatgatgaggaagaactagatccgaaagatgaaatgaatgtgccctggtttgatcggtacatttggaataaagaagaaggcttattttataaaagtgatgtaacgtttagcaatggtgtcattcatgtgaaagtacctctagaggaggagcttgaattccttcagctgatcttcaccattcttctcattaccggactggtaagcattcttttaggatcaattctcatctaccaatttacgaaaaaaagactgcatccgctcttgaatataacagatgaagtgagtgggatcgaaggatcatcggatttgcaaaaacgaatttctgaaccttcgaatccgaaagaattgaaagaacttgccagtacgtttaatcagttacttcaacagttggaagagcagtttgagcgggagaaaagcttcgtctcaaatgcttctcacgaattaagaacgccattaacttcttttcgtggtcatttaaatttgattaaaaggtggggtaagaacgatcccgccgtattggaaacatccattcaagccttggatgatgaaagtaaccgtatgaagcacattttagaacaaatgctcaccattgcgcgaaatgaacatttggaaacaactcttgaaaaagtggatctcaccgaagttgttgagggagtgattgcgcaattcgaagcacgttcacgtgtaccgatgtctacaaatcttgagcaaaatgtcctggttttaggtgatcgtgaacagctcagacaagtggcggtcattatagttgaaaatgcagagaggtatacaacggaaggcaagattaccgtccttttaaaagaggcagagaacacggtcatgctaagcatctcggatacaggaatcggcattccccgtgaagaaatcccgaagattttttctcgcttttaccgcgtcgataaaaatcgttcacgagaaacaggtggtacgggacttggtttatcgatcgcgaaggaaatcgtcgagaatcatcatgggaagattgaagtggaaagtgaagaaggggtaggtagtacatttactgtattactaccagtgatttcgagataaagagttttaggaagtgtcatctgtcggttttcaagcgagtgataaaacaacccataattggataaatgtgttaaagttattttgggaaatgttttgtagtaaattactcaaaaggagttggagaagtgtcaatccttatcgccttatttccattgcttttttggttaagcattgtaggagcgatcatctatttcatcgttagaaaagtaaaacgttcacgaagagcgcttgaggaacgtattgaagttctggagcggaatcaagcggttgtaaaagataagaaggagttttaaggcagtccatgttcctcttagtttactggtaattacttttgcgattctttttatcgggaccttctatcaaatgtttacaatttctgagatggtgttattttctcttcttcttgtattcatcatgatggtgattgttgatgtacgacgttcttcactgagagtagagaacgtaaaatggccacgaaagtacattataatgagcggcacgttcacactcgtaagctttctctcttgaggggaagctttttaatgtgtgttgataaaaagaaggtgccttctcttatttatcgaaaaagtaaagtggactgattacagacgaacaggaggcaacgtatgaaatcaaatcgcgcacttttaattgttgatgttcagaaagcattcgaggacgaaaaatggggggagagaaacaaccttcaagcagaaacgaatatgcgtaagctgttagacgcgtggagagcgaatggagatcgtgtcatttacattcagcatcgatccgatgatccagcgtctgtattctaccacggacagaagggctatgagataaagaatatcgttaagcctgaagccgaagacgtgattttcacgaagaaagtgaatagtgcttttatcggtaccaatctagaaaaatacctccacgaaaataacctatcggaggtggtgatcacgggattaacgacaccacattgcgtatccacgacgacaagaatgagtgggaatctgggatttaacacttatttgatttcagacgccacagcagcttatggactcacagatcagaatggacgttactatgatccagaattggttcacatgctcaccttagcgacattacatgaagaatttgcgacgattataacgacggaagagctattgaaaacttttgatcttgtatcggagcgttaaaatatcaccagattaaacgtattggaggtggtttcattgataaaaggcatcaatcacttcttattttcagtttcaaatctggaacgatcgattgcattttatcaaaatgtttttgatgctaagttacttgtgaaaggaaaacgaacagcttactttgatctgaatggaatgtggcttgcgctgaatgaggaagcagacattccgagaaatgagattgctcagtcttatacgcacatcgcttttactattgaagaagaagacattgaggaaataactcgaaaattagttgaccttaacgtgaacattctttcaggacgtgagcgaaatcagcgtgataagcaatcgatttatttcactgatccggatggacacaaattcgagtttcatacaggtaccttagaagaccggctcagttattataaacaagacaaggcatatatggatttttttgagtgaaacgagttatttttagggtagtatatgggttttgaaacataaagagaaagtgaccatgaaccaataagagttttgtaggtttagtaaacccttgaagaggtatacatagtacatggaataggacgttcgagtgggcgaactttagactacaggaggcaatacaatgagcgtattaaaagagcagtatgatttgatcaagcatacgcgtaaagttctctttcacttttgtgaaaaaattgaacaagaggattatataaaagaagtcgatggatatggatggggctcaattcgaaatctgcatattcacatcgctgaatgctatcagagctggattggtcgatttgctcttgaaacatcagaacctgtcgtgacagagtcagaagtgacagacgttaatgaaatgaggaaggtgtttgagcgcgttgatgagcttgtttatcgttttctagatgaatatgacgagcgctttgatgaaaagattagtcgggaagttccttggaaagaagaggaagaagaactttcaccgctatggttactcacgcacacgatcacacatgaatttcatcacaaggggcagattgtgacacttgctcgtgctctcggctatgagcctgttgacacggacctattaaccccatctgatattaaccgatatttagactatcctgaacaaggctagttgtatggctatagaaggaagacgacttgtgcatagcacgtgacaagtcgtcttttttatttgattatatccgggtgatagacgactttgttaataatggtaaataagggaaacaaacttctggataaatggtaaaatcaaggtgaggttgaggaaagatattttgaaatagtggcgattgcttttctttgttggatcatcgattaaaagctttggtgaaataggtaatctaactctacgatttgtcgggatgataagtgtaatcgcaagtcttcgtctagcatggcgtcataaaaaatacgcgtaagggacaggtgttcatatgggcgatatcgtatttcaactgatttcgttttctttaatgtttggggtagtagcgggaattgtctttttaatcgtaagtttgaaaaagagaagttctaagcttgatcgtgtcgaaaagaaggttgatcagctgcttgaaagagaaaaatcgcagtctgattgataggggtattgctattttatctaggatttttgatggttttttggtacttttcaatacacttcccgtttgatatgatgcagcagtttgattaagaagcttgatgcgtaaggaggaagaacatgaaaaaagcacaaatcatcattgcgattccttcaagtcttctattaattttctctcttataaccagctataaaacggggcttttcatctcgatggctggtctttttgttgcccttttgttgaggcaaattcgactatggaaatatggtgcgatccttgatcatccgagtcggcggtacgagagtgaagtggaagaagagctggatggtggagattcggaggaatagggtcagagaggagggcgatgttcagatgagtcaaatgcagggaatattacttggtgtcttaataggcattgcgcttgcgattggttttaatgttggaatcgcggtgactgacaatatggtaataagcattgtgatcgctatagttgcgggattactcgctagagtggttgggaagcttatcatcaaaagtatgaaatagattgaatcgtatagaaaagagatgattatgaaggagaatatttggtcaaagaaaggtagaaagattgtaagagggctaatttatgccgcgctctttatcggagctgttcaatttttatttgatccggatccttttaatgattacataggttggggatttttactcatgttttggttgattcgaatggtacatagtgcggttagaaatctgaacgatggtcatagaaatcgtgctatgttggatttcggcatggcgattatggctggtctagctgttgctgcagtagggcttacttatttcatcggtttataacctgctacagagatgtggtgactaatccattcttaccctttttgtttggattcgcttacaaatgtttacacttttttcatccgtggtatctcaataaaacagcatcattaaactaaccattatgaaagaaaaaggagagatacatcgtgagcaaaaacggacaaccaaaacaaacgcagtcagagcaacccggtattgaatctcaaatgacgccaagaccggatcaaccacatgaatacataggcagtcacaaactggacaacaaagtggcgctcatcacagggggcgacagtggaattggtcgcgcagtggcaatcgcttatgcgaaagagggcgcacacgtcgcgatcaactttcttgaaaaagaacaaagtgatgcggacgaaacaaagaagctcattgaaaatgaaggtgtgaaatgtctacagattcctggagacgtttcggaagagaaagaatgtaaggatcttatcgacaaaacacttgatcactttggaaagctcgacatcctcgtgaataacgcagcgattcagtacccaacggaaaacattgaagatatttcttacgagcagtgggatcaaacgtttaaaacaaatgtgtattccgtattcaatatgacgaagtacgctgtgccgcacctgcaaaaaggcagctcgattattaatacaacgtctattaatccatacacaggaaataaagtattaattgactatacgtcaacgaaaggtgcaatcgtagcatttacgcgtagtatggcagcaaatcttgttgataaaggcattcgcgtgaatatggtggcaccaggaccaatctggacaccgctaattccatctacttttgatgaagattccgttgcagaatttgggacagataatccgatgggacgtccaggtcagccgtctgaactgttcggtccatatgttttactagcatcggatgacggttcttacatgactggccagtgcattcacgtaaacggtggcgactttatgtcttcctgatcgctttaggtggtcggattgaccttcggaatggctgtttattggccaaaaacgaaatatattggccaaaccgagatgatattggctaaattcgagatatattggctaaaatcacaatttattggccaaaccccgcctttaccaaaaaaagccgctcactcatgaagcaggattcatgagtgggcggcttttttgacgaagaaaagattgtattcggtcatataaaactctataattgataatgaatctcaattatgatggacatcattgattcgatcacgttatcggggggtttttatttgctcaaacgcttcttttcttattaccggccatacaaatggctatttattctagattttgtctccgccatcattgtcggagtgttggagcttgcttttccacttgcagtaaaccaggtgattgatcggttactgccagaggggaattggggcatcattcttctcgcttgtgccggattgctccttatttacttaataaatacgggtctccattttatcgttacctactggggtcataagctcggcattaacattgaaacagatatgcgtcagaagctgtttacccatatgcaaaagctatcatttggctattatgataatagtaaaacgggtcacagtatctcacgtctgacgaaggatctcgaggagattggcgaggtagcgcatcatggaccagaagatgtgtttgtcgcggttatgacgcttcttggctctttcggattaatgctaatgatcaactggaagcttgccgtgctctcgtttattgtcataccactgctgattattctcgcaatctattttaataaaaagatgacaaaaacgttcagacgtatgtttcaggatgtggcagaaattaattccagagtagaagatagcatcggggggattcgtgttgttcaggcgttcgcgaatgaacatcacgagcaggagaagttccgtgaaaacaatgaaagctaccgttcaaccaagcttcaatcgtataaaattatggctcaaaacgttatgtctaactatcttctgatgagggttgtcacactgtttacacttttgttcggtacctttttcgttatttcaggagagctcacgtacggtgaattcgttgcctttattttattatcaaatattctgatcggaccgattcagaaaatcaatgccgttattgaaagctatccgaaagggattgccggctttaagcgttacaccgaaatcattgataccgatcccgacattcaggattcggaagatgcgattgaaatggaactaagcggagaaattcactaccgagacgtatccttcgggtatgaaggctatgcacctgttttgaatgaaattagtttatccattcagccaggggagacggttgcatttgttggaccatcaggagctggtaagacgacgctatgtagcttgcttcctcgtttctatgaaattcaagacggcgcgattacgattaacgggattgatgtgagagaactaaagctttcttctcttagaagccagattggaattgtccaacaagacgtctttcttttctctggaacgtttcgtgaaaacattgcatatggaaatctactggcaagcgatgaagaaatccttgaagcatcgcggaaagcaaagctagatgaatttatttatagtcagccagaaggattggatacggtgatcggtgaaagaggcgtgaagctttcgggagggcaaaaacaaaggcttgcgattgcgcgcatgttcttgaaaaatccaccgatcctaatcttggacgaggcgacctctgcgctcgatacggaaacagaagttgcgattcaaaagtcactagaagaactaacggaagggcggacaacgcttgtaatcgcgcaccgccttgcgacaattaagaatgccgaccgtattatggtcgtcacgaaagatggaattgctgaacaaggaaatcatgccgagttgattgaatcgagcggtatatatagtcggttgcataaagctcagtttggatgatagtttaaacgatttctgcctcgcaggaatcgtttttaattttcgaaatggaatcatatcgattgtattgaaattgatggtttgctagaatcagatgaacgtgtaactagagaagagaaaggtgtcaccatttatgcttcataacccaacaggaaaagaacgttttggcctcgctttactactaggaatgcttggtattatgggtccattaaatattgatatgtaccttccgagttttccaggaattgcgagtgatttaaatgcgagcgcatcgctcgtacaacttagtttaaccacatgcctcatcggccttgcggttggacaaattgtgattggtccatatagtgatggacagggaagacgtaagcccttattgatttttattttcttatttgcggtcgcttctatcctttgtgcggtcgcacctaacattacgacactcattattgcccgtttccttcagggctttacagcttcagcgggagtggtgctctcgcgtgcagttgtccgtgatgtatttagtggacgcgagctaacgaagttcttcgcgcttcttatggtcattaatgcgacagcaccgatgatcgcgccgatcgcaggtggagcgattttactactgccatttgcaacgtggaatactattttttatttcctaggtattcttggattgattatcgtaacggtgattggcctacgactaccagaaacgttaccgcctgaaaaaagactgccaagcacggtgaagcaatctgttcgcacgatgggaagtcttctgaaagaccgttcctttatcggctatgcgttaacgattggatttgtacacggtggaagctttgcctacgtttccggaacgcctttcgtttaccaggggatttacaacgtgtcgcctcaggtgtttagttttttatttgggatcaacggacttgcgatcatttcaggtagcttcatgatcggcaagttaagtgcttattttcatgagcggagcctgcttagaacagcggtcattacggcggtatctgctacttccttccttttaattatgacgattattgaaggaccgcttgcgacgcttgtcatcccgattttcatttacatgacagcaatgggaatggtgctcacaagtacattcacgcttgcgatggataagcagggacacagggcaggtagtgcgagtgccgtacttggtatgctgccgctgttgttcggttcgatggtttcaccgcttgttggaattgatgaatcaaccgccgttccaatgggggcaattctttttacaacgtcctcgatcggtgcggttacattctttacactcacgaaaaaaaatcgtggtgaagcgacttcctaatgggagtcgtttttttgacttccattcaagtggaaaataaacaatgaattgaaaaaaggagtgcgtttgtggagataaattttctcctctatcttaaatgaagtgaatccgaataatgtggaatgctcattcatcagcattggtatttgctttttggatcgagaattagataggataaaaacaactcatttgagacaataggaagactttatgttaaacgaggtcatgagatgcagaacaaatttacgattggacaaatggcgaagttgtatcacattcctgtgaaaacactaaggtactatgatgaaatcgggctttttcaaccttttgaagtggataaacaaacaggttatcgctactactgttcagagcaatttcaagtgttggatacaatttggtatttaagaacaatgggtgtgccgctaaaagaaattaagaagaaggtcgagcacagcacagtggatgagtttattcagacattaatggaatatgaaaaaataaacacaaagaaaatgaacgaattaagaaatatgaatgagaaattgcaagcgaaaattaaagagcttagagaggctaaacgaattgctaccgtccacaaaccaacactttcttttatcccagaaagaaaagtgatcgaagtaaaagggcaattccagtctttaaatgatatcgaagacgtccttcgaaagttaaagaagaagatcaatcacataacacctgtaatggtagggaaagtcggattaacggtatctgttgaccgagttaaagatgggaatttaaatgaatttgaaggtgtctatattctactggaagaaaatacggacgtgattcacgatcttcttgttacttttccagaaggttcatacgtcactatttatacaagagacgaggggcggcagcaaaccgattacgatcgggttttatcttacattgaggagaaggggtatgaaccttacggaccgttcctcctccgccaaattgtcgattcttttatttcgcatcaagaaaaagagaggctaacagaaattcaaattcgagtaaaaaagaggaatatgtaggttgaggaaattatgaacatgtatatggttcagtatggacatcttacaccacagatgaattcctatactgaacttttttgagcgtctaacaaagaaaatttcttgattcatactatgttggagtttgtgaaactgaatttaggtcttattcttgactctacagttactggagggtttatgcttgttttcgttgaaaagacgaaaggagcctctttatctatgaatcaagctaatgcaacgataaacgaaacaactacgaatcgctatttgtatcttatgatcgtgattttaggagcgttaagtgcgtttggtccattaacgatcgatatgtatttacccgctttacccgctctctcaggagaactacacacgagtacgtccctggcacagctaagcttaacggcttgtttaattggattagccctcggccagattgtagttgggccttatagcgatattcacgggagaagaaaaccgcttgttatttcactgttgctttacacagttgcctctcttatgtgtatattcacaacctcgatctgggccttgattggattacgatttatacaaggtttggcgggagctgctggaatggtgatttctcgtgctagtgtaagagatatgttctcaggatcggagctaacgaaatttttctcaatgctcatgttagtgaatggtcttgctcccattcttgcacctgtcgcaggagggcagcttctccaagtgatgtcttggagaggtattttcggtgtactagcagtaattggagcacttatggtattcgctgtaatctttggtttgaaagaaacccttccaatgaaccaacgaaaaagtggtggccttaaagaagtaatgacgacttttggcatgttgttaaaagacagaatttttgttggttatatgctcgcacaggggtttgtgatgagtgcgatgtttgcctatatttctggttcaacattcgtcctccaggagatttacggtctttctccacaagcatttagtcttgtttttgggcttaatggaattggaattatcatagcaactcaagttacaggaaggttatcaggtaaagtgaaggacaccacttcgctcgtatggggactatcactagcacttgtgagtagcctgattttaatcctgctttttgctattaatgcatctgttgtatttgtctgtatcatgttatttttcattgtttctagcgtgggaattgtgaatactactgtcttttcgcttgcgatggaaaatcagtcgagaaatgctggtagcgcatctgcgctgttaggattattaccctttctgctcggtgcagcagtagcaccgctagtaggtctcggagaaggggcattgccaatggcgcttgtgatcgctgcgtgtgagctcattgctgttggttcatatttcgttttagtgagaaaaaaacaataatcgaattcattcgctaacagacgtctagtcatggtaaaaaaagaagtgatttcctaattggaggaaatcacttcttttaatgtttttaaacaaagagagtcagggggattaaggattggcacataaataatggattcttctgaataaaagtgatataaattttggttattgtccttcctggtaataaaaaaagtaaaccagaaggctaacatcacctttctgaatttacctctttcgtgttcattttagtagggagaggggtttctacttgctgggagttcttgtcctcatccttggatgcattggccgttttgtatcgttgctgctggcggtatccgtacgttgatgaaagaaccacttcttcatcttcaagtgcggatccaagggcgccgataataatggagatgctagtagctgtccacgtaatgtaaaaataattatcataaccgacaggtccagataattgtgattctagcagacccattgggatgaaagctaataccgctaagccaaacataaagaataaaataatgtaatagattccaattgtcacaagcagcgtcagaattgtcgctacgttatagagcttacgaagatattttgctcgatcctgtctcggtttttcccatagattatgagcaagaacaatccaaccaaccattaaaagggatgacacaatcatcagcataaacattctccatagggcgtaactgtcacttaactgccagagagtaggaaacacgagggcataagagccagtcgcaaaagcaaatataatcacctttttaaaagctgggaagatcgcccatggtcgattggctcgtaccatgccggttaatatacgtaaagcaccactgatacgcgacttaacaacatactgcacatcaattgaagactctccctctttcgtaacacgtttaatcggagaaaatcgttcaaagctaccttttttgaaaagttgttttgatcctttgtctttcaacttctcgtttttctggtcgcttttcgcttgaatccgctgttgtgccttttcgcgatcttcctcaggactcccataatacatttcattgactaattgaagaatcgattgccgaatacgtttcaccatgggagttgaccccaaacctggaaggctgataatcgccacttttttatctgtagacgcttgtgcgagtatcggtttctttccatcaaagaagggtaagtccgttaaacagacaatatagtcccaaccttcgttttcttttcgatcatagccagcttctaacacttcttctggttcttctgtcactcctgtgagaggatcaaccgttgaatccacatgccagtcacattcatctctcacatagtaacgaagcagttcaggtaattcaccgcttaattgttcactcagtttctctggatagcctggcggtgtgaccaatccgaccgataattgttcgtgacccactttcttttcctcctacaccaaattcatacagttgatttgataaaggattaatacccttttatggggaggtaaaacggcttattactcgaaaataaatagcgagactcttgagtttatttccactatttgaaataattaggatgtgaagtaaaggagagatcgcttgttcaaaacatttgatgccctagttccaacattaatcgggtttggctttccagccattgcttacataatcggttacgttaggatgtcggacgccgagcggaaagaagttagagtaacgtttcttaccttaaaatcattattttcggcaggatttattggcttaggtttattttttgtctcaatgggagatgccctaactagtaatagcttgaaagtggctgggcttctatttcttattccaggcacaatttttacgagcgtgattgtatggaaaagaagcaaagtaaaagggatgacgactgtgcttgttttaggagggattatttatttctggggactgccatcgtaagggggggggaatgaatgaaacaaaaaacctatctatatgctagtctgatctgtttggtcctgcttgctgcggccattacatacaatctcctcaatgaggaagatcagtatcttggctttacgggattaggtggttctattaaactttcagaggatgaccgtcaaatctacttttcttattatcaagatggtaaagaatcgatctatcgagcaaataccgatggcggtaaagtagagcaactcacacatccggatgatgaacggcaccgaaagccagacttatctctaaacggagagaagatgctctatttatccgaaaatagcgatcgtattcaatcgttgtacatagcggatttgaatggcgagaatcggaagaaactaacagatgatacgattcatgtggaagaagcggtcttctctgagaacgaaatctattttgtcggaatgccggcagaggccgtaggaaaagcagaaggtgaaacgaaggaagggtatgatctccattcggtcggtatggacggggagaatgagcaaaagttaaccgatcaagatcattttacaatgaaccatcttgctatctcgactgatggttcgcagctctattacacattatttaatggcactagtgataaaatctatgcttatcatgtggaagataagagagaaagcctggcggattgggtaccggctgaagttggttccttatacgactgggattatgatgaagtgaaacaagcgttcacttatacagatgtgtcagaggaatcagaggatcgctcgttattcaaatatgaactctactatcgagatttaaatgagaataggacaaaacaactcacaacattagaatcttctgtcgtgtcaccggatttctttcaccagtctgacaaaatcgcctttctccactatacgaattggtccggtcatccggaaaagtatcaattgaagacggtggatatcaatacgaaagaaatgaataacgttacgttggatcttccggaatccacaaacagccacaggctgagagaagcgctgaacattttcacgagctctacagcaatcgcgattttgtataccgtgctgctatgtttggtcacgctttattcttataaaaagtcagggaagcaatatcgaacgggactgattagcttactactagcagtcgctgtttttattagtggctttatttttgggatgttgacgaatccgtgggtaggtattgcggttagcatcgtagcgattggcatggtgccaagtagtttaatcgcattgattgtaggatttttgatagggaaattcgcaaaaaagcctaagtaaaagggccgtctcctttaatggagcggctcttttacttaggtgcagacaacctcaatgcgtccatattcatcgacccagatgccaataacgtgagcgaacccccaggaccttacaacctgagtagaagttgcaatgtctttaaaatgatggcacttactaacaggattcgccgcacagtcaaaatgaccaactacagcaatgacttgagaagaatgagcggttaacgacacgagagtattttctctcagtcgggcaacctcgtatgcagggccgtgagagagcacacggtccatcccaggctctgtaatcagatcaacgtaatcaagctggtaatgcgctttaagccactccgtaactggaagttgtgttcggccatcaatacaatttaacgcggttccgaatcgttttctcattttacaccttcatttctcgctaacgtcgatggtaagtgctatggctatgatgtaatggataacctggataataagtggtaggcccatggtgatagccatagccagggtaataacttccgtgcacgtgatgatagctgaatccaggatgagcgcttccaagtccatgatggtaaccgaatccaggataaaagcttccggggctagaatgagaaagtggtctttgcaacgtcaggtcccccttcaacagttgtacgttagtgtatgtaaacagattgagtggcgtataggcatggaatttcgctactatgataaaatgaaacaaccatatgaaaaaggatcgggatgacatggattgtaaaatcagcaataagcttataaaagaaatgtgtggcgatcgctctttcaaaaagggagagtcttatttttattccaataaagtaacgtttcatcacgatcactcgatcggatatgaagccacagttcacggaacggaagacttttatgttacggtaacgacagatgcaaatggacacatcgaggcacaatgtagctgcccatcgctcgctacattccaaaaagactgtcagcacattgcggccgttttaatcggcatccgtcaccttcaacaaaaagaatcccccatgcagaatgaggatggcagcctggcagaaaattttatgacgctatttactgacaaatcaactccagggagcggccgccaacgcttttttgaaaagcgaaaggtgcttgatgtgttctttacatttaagcctgtttctcttaacgatcaggagttgctaggaattgaaattgccatcgaacaagtcaatgtgccttcgattcgcgcctttcttcacaatgttcacgaggggaaaggaagtgaagtctcgcctgacgtgacctatcatccagagattcactgtttttcaagtgaagcagatgccattcttcatcatttaattcgcgtagcccgcgatgaaaaagcctttctagaatcggtttctttctcgcgcgacgaccgtcagcggtccgatacgttactgatctcgccatcgtcatggagcagcttgattcctttactaactagcgctgaaaatatcaaaatcgaacatcaaggctctttgtttgaacgcgtaaaagtcgaaaaaggctcacccccgattcgctttatgatcgacgaatgggatgaaaaccactgtcgcattaccatcaaaggttttgagcggatgacgattttaaatgcctaccaatccgttttatatcaaggaaccgtctatcaattagaggctcgcgactttacccgcatggccgagttaaagaagatgcttccgtcagggaacaatgagattccaattccgtatgaacaaatggatcatttccttgaaaaagtcgtacctgatttaaagcgaatggggcatgtggagctttcaaaagcatttcgtgaaacgtatatgaagacaccgttaaaggcacggctctatctcgatcgattgaaaaaccgtctgctggcagggcttgaatttcagtatgaggaagtggtcatacagccgttagaacgtcgggatgctccgggttcgacaatcattcgagacatcgaacgggaagaagaaattctggacatgatggaagagagcggtttttcaaaaacagatggcggttatatgatgcaaaatgaagaacttgagtatgaattcctccatcataccgttccgaaacttcaatccatattaaagctttacgcgacaacagctgttcgaaatcggctcgttcgaaagaagcactatccgaaaataaatgtaaagctgaagaaacgagagcggacaaattggttagaattcacctttgaaatggatggcatatctgacaatcaaattcgggaaatattagcggcattagaagaaaagcgtaagtattatcgcttaccaaatggatcgcttttgtcccttgaaacgaaagaaatggaggatatgcatgagtttctaaccacggttcccccgcaggaacagtttgagccatatttttcgcttccggtcaaaaaaagcgctagtctaatggggacaattgaaacgaatagcatctttctagcagacgcatcgtttcgtaactttctagacacgatgcgtcttccaaatcaaggtgagtttaacgtgcccgaatcgttggatcacattttgagagattatcaaatacagggctatcaatggatgaaaaccttagcgagctacgggtttggcggtgtgttagcggatgatatgggacttggaaaaacgctgcaaagcatcacgtatatcgtgtctgagcttaacgctattcgtgaagagcataaaccggttctgatcgtgtgtccttcctcgcttacgtataattggttcaatgaaataaagaagtttgctcctgagctccgggcgcggatcatcgacggcaatcaagcaacgcgtgaaaagctccagcagacgagcaaagagatcgatgtggtaattacgtcttatccgttacttcgtcgcgacatcagctggtatgataagcaaacgttccatacggtgttttttgatgaagcccaggcgtttaaaaacccttcaacacaaacggccagaacggttaagaaaatcaaagcggatcaccggtttggtttaacgggaaccccggttgaaaacgcgattgaagagctttggtcgatttatcacgttgtctttccagagctttttaaagggatcaaagcctatagcaacttaacgaagaaaacgatcgcaagaagagtacaacctttcttacttagaagaatgaaggaagacgttctggcagagttaccagaaaagctggaatcacttgaattaaccgagctattgcctgaacagaagaagctgtacgcagcataccttgcgaagctaagaacagatacgttaaagcatctcgatcgtgacacgattagtaaaaatcgcattaagattttggctgggttaacgcgactgcgtcagatttgctgtcatccgtctttatttgtggacggctacaaaggaagctctgctaaattcgagcagctacttcagattatcgaagattcgagacgagccggtagaagaatgctgattttctctcaatttacgaagatgcttcagttaatcggaagagagcttgctggaagaggacaaagttttttctatctggatggggagacgccctctggagaaagagtggagacgtgcgatcgatttaacgaaggcgaacgggatgtgtttcttatttctctaaaagccgggggaacgggtttgaatttaaccggagcggatacggtcgttctctatgatctttggtggaacccagcggttgaagaacaagcggcagaccgaacgcatcgaattggtcaggaaaaggtagtcaatgtgatcaagcttgtagcccgtggcacgattgaagaaaagatgaatgatcttcaggagaaaaagcgcgagctcatttcagaattgattgattcagaagaaaaagcaaagacttccttaaccgaagaagatattcgtgagattttaatggaatcgtagaaaaaaagaatgaaaagagcctgggctagaaactgcttcaggcttttttagcttttctttttctaacaatcacttctttacgcaaaaacaatttcttcctgcaggttttacgttttgaatgaaagggaattgaggttttaaaatgtaagatttggtggaggttagaaaaatgaacggagtcgccgttggttataaaattcagtgcaagtccgaatatacaactcttaaaaatgtgctggttgtaaaaccatcgtttatgagaattacagaaattatcaatgaaacacaaaagcattatgaaaataacaacattaacatcccgctagctcttcagcaacacgaagcatttgtggaagtgttggaagcaaatggtgctaacgtaagtgaactccaagctgaatcgagtctccctgagcaagtctttactcgtgacattggctttacgattcacgacgaactattcgttgcaacaatgaatgaacaagttcgaaagccagaagtcaatacggtaaaagcgttccttcaagagaatgaaatctcttaccaggaaggtttaccaggttcaattgaaggtggcgatgtcgtggtggacggttcaaccatttggattgggaatagtggccgaacgtcacaaatcgcgattcaagaactacagaagcgtttgccagcttataacgttgaaccattatcgttaagaaaagatatccttcacctagattgtgtatttaacattattagtgaagagatcgcgctcgtctatccacccgcttttacaaaggatgacttaagaaaattggaagcgcgttttcagctaattcacgtttcagaggaagaacagttctatatgggtccaaatgtgctttcaattggagatgggaagatcgtaagtctttcgcagaataaacgattgaaccatactttaactgtacttggtttccgcgttcttccagtggatttctctgaaatcattaaatcaggtgggtcctttcgctgctgtacacttccgctagaacgaagctgatcttctagcgggaatcgattttgtcgctagccaattcataaaagaggagacgtgaggatgttaaaaacagaaagtcgctacttgttaacgaaagaggatattgaaacacgtgaagatcttccaacttggctgaaggcggagtatgaaaccttcagccaattagtaacagacccgacattcccttgtttttttggccgaaccgctcagctaaaaggtgagcttcgctatgcttatattgagcataaggattggtccaatttacctgaggctgttgaaagctttctaagcttattccaaaagccaacgaagatcagacacggcttatttatttttgtagagcccgaaagcgaggaacagtcgattgatacgtatcgatcgcaattctgggatatccttcaatatttacataatcacgatcgcttcccatggccgagcgatgcacccaaagatccggagcactatttgtgggacttccactttgctggagagccgatctttacctttgggaatgcgccagcttacaagcagcgtaaaacgagaaatcttggcaatagcttgattctcggatttcaacctagggccattttccaggggttggaaggtactgaaaaagggggtattatgtctcgtgagaaagttcgcgctcgtgtcgaggcatgggaccagcttccaaagcacccggatattagtcatttcggcgaccccaatcacaatgaatggaaacaatcgtttatcggcgacgacgtgacgccaattgaagggaagtgtcctttttttcataaaggttcctaaatagtaaacaatcatacggtaaaagtcgatcagcctgagtggggagaattcctgctcaggtttttttgcgggtaaaggtgtgtgaacggattgtggaataatatgttaaaatggaacgtgatatcaatgcaaagagctgtcagatcaataatactgaaacgtatgtaaaaatgctcctacctgtaaggtgaaccaagtttggttttttcctgggagggactcagatgaagggtcaaaagaaagagaaaaagggtttctttaaaattcagaatgagtatagacgaaaagtacgagacaaaggggagcaaccttccccgactgctgaattaaaaagcattgtcctcatacttttcactttgatcctcatgaagtggctgttttcgtttatttgaccgtgataaatgcagaaaagtagataaagtgttttatgggctaagaatataaagtagtagaggaggcttttttattgaacagcaaaatgaaagggttaccaaatctagaaacggaacattttaatctgcgcaaaattaatgaggatgatatcgctgctatttttgactatggttccaatcctaacgtctcgaaacaggtaagctgggaaacacacgagacgcttcgggatacgagcgtattcgtggagatgattttaaaaggatatgctgaaggaacgaaagcgctgtggggattagagttaaaatcaactggaaagcttgtcggtacaattgattttgttacgattcaagaacgtcatcgaaaagcggaaatcggctatgtgctatcagaggaatgctggggaaaagggtatatgacggaagctgccaggagaatcatttcatttgggtttgaagagcttcagttagaacgaattcaagcaaggtgctttgttgaaaatgaaggttctgcgcgagtgatggaaaaggtcggcatgtcgtttgaaggaaccatgagaaacgcgatgtttgcgaaggggaagtttcatgatttaaaaatgtttgcgatcgtttcggaagattatttgaaatgtcgtaataacaaaatacaaagctgtgagtgaaaacgacctttttctaggtcgttttcctttgttgacgaatcatttaagttagattatcatctaattaggtgtttatctaattagttgggaggtggaatagattgcagttaaacagattagtcaattttcataaaacactcggtgatccaactcgcatacgaattctttcgttactagcgaccgggcctctccatggacaagcgatcgctggcaaacttggattgaaagcacctacaatcacgcatcatatgacgaaattaagagatactggcattgtgtatcagcgtagagataagaatacgatctactattatattgacgagaaaaaactccgctcttattctgaagcgttaccgaagatgctttaccagcctgaacaagacaaggaggacgatgcattgaaagcgcaagcggtggttaataattttatcgaagcagatggaacgttaaagcacctcccttctcaacgaaagaaaaagatcattattctgaagcacttgatatatggattagaacgtgggagaaaatatcctgagaaagaaataaatgcttatattaaacgattccaccctgactttgcgacaattcgtcgagagcttattatcaatcattttatgtaccgagagaataacatctacgaactaaatccagaagaaatgtgggcaacgatcgattaaaagcgcaatcgcagattgtgcttttttctttgggttagaagatgaggggcgtaaaaagaaataagtaattgaaatattcttcttgttttgaaataattggtaatgtctaaagcggaagttcatacatacgatttttacattaaaaatgggggatttatcaaatgaaaatgcaaaagaagatttcaattgtcatgctaaccttcgttctagtcgttttgtctgcctgcggaaattcaactagtgagtctagtgctcaatcgaacaaccagccatcaaataatacaactcttcaagttacagaagaggatgatccagctgaagtagaaaatacgagttctaatgataacgggcaaaatgaacaagaggattcatcaactcttacaacggaagattcaactaatggagagtctgaaagatctgatcaaccgaatgttgaaaagcaggaaagtcaaaaagaaaaatacttcaagaaactaaatagcatgtatgaatcagatcggcatgtagaagcaaaagaaacgatggtagaaatggaagaacaagaggcagaaaggtatcaaaattgggataagatgttgaacgaaatatatggggtgctacaggagcagcttagttctgatgagatggaacaactaagagaagaacaacgaaattgggtagagcatagagatgaggctgccaaaaaagcatcacttaaatacaaaggcggttcgaccgaatcattagaatatgtagcaacgcaagcaagtcttacaagagaaagatgctacgagttagttgctaagtatatgtagtgatggttaggttgttggttttttaaattattaccattgatcaatgttgtggttaattcgtggaagaattttctgtaataatggataccatcaaataaagaatcattcattttcttccttcctttagttcataccaccattcatctatttcttttaatatttatgaagtcctttattttagtaactattttagaagatagctttatcttaatttctaagtcgatttctaggatcctcttctagatcttattcaaaggaaggtgaaaataagtatggacagtattatttttgatttagacggtactatctgggatccaattgataccgtccttcatgcgtggaatagtcgtatcaagaaatatagtgaaattaaagaagagcttacccgcactgattttgaaggaaccatggggctacaaatgcacgaaatcagtaaaaagttgtttccttatttatcggaagacgtccgtatgcaagtgataaccgagtgttgcgataccgaacaaggctacttaaagaagcagggaggtaacctttttcgaaatgtggaggaggtacttcagcaactttcacagaaatacaaactctacatcgtaagtaactgtcaagatggctacatcgaagcattttatgagtttcataacctaagtgactattttttagactttgagaatccaggtagaaccggacgatcaaaaggagaaaatattaacttgattatcgaaaggaacaacttgtccaaccctatttacgtaggggatacagaaggtgatttaagtgcagctcgatatgcggggataccgttcatttatgcaaagtatggtttcggacaagtaagtgaatatgatgaggttatagagaggttcgatgagcttgtggaattattttaactaaaagtaaattttggtttgaaatacctatcagaaaatcgttcagaggcatcaaccaccgaccgatttttgtactactttattgatgattagaatgagggggaatgaatgtttacagtttggatgattgtgattaatacgaccttttggttagttgtttgtttcgggttggcgtacggagtccggttaattcctcgttctttttacgaaaaaaatacttgggtctttcatgaacggtcctatgaaaaaagattctataaaaaaatacaattatcactttggaaagataagcttccagagtgggggaatgtattcaattttgagaagaaaaaccttcatacagagctaaacaaggaatatctaaataaattcatattagaaacgtattatgcggaagtgggtcacatcgggatggggatagtgggctttgcgtgtatagtggttaacccagaaggttttacacgtttcgctttaatttgttccagtgtaaatttagttgtacaaatcccattttgtttaattcagcgatacaacagaccaaggttgatccgccttagagataagtttacagataggggtgcctaaaagattcgttcatgttttttattggtgaaaaaaggaaacttttcgaaaggctattcgtatttgttactacatagaaaaaagcaataatttagatgtatgcatattgaggaaagaaaggagcaccgttttggaaaaaaacatcaaacccaccttaatccttatcttatggaacatgattggcttaacaattggctattttatttttactccaattgttgaagatacaataataggacttgttatagggttatgtataggagcaacggttggaatatccattatgcaaaaaatgaaatctaaatcataaaacaaagtttataagattgcatactaggcgaatggccgtatcgaaatgaacggataaggagatcaatatgacaatcattgaaaagtctaatttaggcgcaaccccctttcaacaactattaggtcataacccaaaggctatgacggcgtgggcaacattaggagatgtattagaaagtgatcagtcactctcttccacgttaaaagagcaagtgagaagaacattagcacagaataatggttgtgagtattgcaaagcgaaagggaagcctgatcccagcttgtttgatgagaaaatctctcttgcagttggttttgcggaggtatacatcaaactaaatggagacgttccttcatcgataattgaagtgttgaaagaatcttttacagaccaagaagtaagcgagctttttgcctttatttgttttacgacggcacaacagcactttggtgcactcatgaaacttaagccggcaataataaaagaaggtgagggcacttcatgagtaaaggtttattgcatttggaagggctaatcgttttacttggagctgtatatttctatgcctcaatcgatgcaagttggtggctgttcttcctttgtttactcctgccagatctctttatgttaggatacgtgtttaacaatagaatcggtgctctgatttacaatattggccacacatacctgattccgcttattcttctcctcttaagtgtaagtttgaagcaagatttacttctggccttaagcctcatctggatcgcgcatatcggaatggatcgtactgtaggctatgggttaaaatatcccactcagtttaaggatacgcatttacaaaaagtctagttaccaaaggcattgtcacatgttgagtggtatacgtttaaaagggggagatagttatcatgcaagccgtcatttttgatatggatggaacgctttttcaaacagataaaattctcgcattatcattagaggatacgtttcactatttaagatcaatcaaccaatgggatggagatgcgccaattgcacaataccgtgagattatgggcgtccctttaccaaaagtatgggaagctttgttgcctgatcattcgatggaagtgagagaacaaacagatgcctattttttgaaaaggttgattgagagtattaaacaagataaaggcgagctgtatccgaatgtgaaggaagttttggcttctttaaaagaaaatcagtgttccatttacatagcaagtaatggtctagctgattacttggaagccatcgttcgtcactacgagttagatcaatgggttacggaaacgtttagtattcaacacgtgaattctttgaataaatctgatttagttcaaaagattgcagagaaatatgatctaacggatgcggcagttgtaggggatcgtttatctgatataaaagcagcgaaagaaaatggatacgtttcaatcggctgtcattttgattttgcaaaagaagaagagcttgctcaagcggatcgagtgattcatgacttaaacgagctaacaatggtattaaccgagttaaaccgagctgaggttaaaggataatagcaattaattttatccccgcagctcgtgatgtgatagtcgcaagaaagacgttaatctttataaaggttaacgtctttttaaataagttagattccccaatcgcttaatgtaaatgatcatttcgcttatcgatatatagtgtaccatccttctgaatctccgcataaaaaacatctaagactgattggattccttgtaccttaagttgttggatcacccagtcttcttccacattcatctcaattaaagatttcttatttatttgtccgtcctcaattattggggctggtatcgggtgtttcttttgaagatctgcagggattccctgatcctctttggttaaaggtagcttgttttctttctttaagaccgataacgtcccatcggtctcaaaaatagcatagtccacgtccttcaatgaaaagatgttcttttttcgtagcaagaggttaaggctatcgatgtcgagtcgaagtttacgaagctcgttctccattatttttccgtcacggacaacgatttttggacttccttccactcctaatctgaataattttgaatttaaatctacatagccgattaagatcgtgaaaagagtccacgccgcaagtgaaatcacgccatttctaacacttaaagtagagtcgattgcaagagatgcgcctaacgttcctaaggcaatggcggagacaaaattaaaaaaggtcaattgggaaatttcttttcttcccataaaccttgtcaataaaagcaacgtggcaaaggcaagagaaagccttagaagtaattcgaaaagatccattttactcactcccttatatgagtacgataactttttctttagggtctctttaatccgaaattaaatacagcctaaactaatgaaacttttccaattccataatcgtataaatcataaatggaaaaaatcactttttatggaattttattcagtatgtttcttataaccatgtgaatgagacacattgaaaaattgactagacgatcagaattagtttcatgttgctattgatcattagtttatttattaatatagagcgcattcctgtagaactgctctggtatcttaaaacgcatattatcatgtttgtgtttatcattgtaacggaaacggcaagaacgattatggagaagcggtatgcagagaacaaaaatgattacctttttactctgtttcaacttggaatcatcgttgctttctctctatccttgtttttaactaactttttattggctgtttgaagtgtttagagtattgtgtacacatttcgttttgatcacttcgcatgttacatagatataaaaggttacgtgcgatttttagagaacataatgtaagtggagcctaggacaaactaaaactatttttcatggtgaaggagaaaaccacatgctagcattcgaaaaaccagatgttgaacaatttttccggacgtttgggattcaaacatttgcggttagtccagatgaaaagcagctcgtttttagtacgaacttgaacggaacgtacaatttgtgggcgatgaatttgccgggaacgtttccttatcctttaacgtttgaaaaccagagctgtcatgaattactttacagccaaacagatgattatctcatagccattatggacaaggatggggatgagaatggtcaggtttatgcggtctccacacgtggagggaaagtgaaaccgctccggaaacaagaagggtttcgccacgacatgccccttttaacacgagatggtaaacgactgtattatacctcgaataaggaagatcaaacgtttctaaaagcatacgcttacaaccttgaaaccgaaactgaagaaacgattcttcatggagaagacgcgattactcttgttatggcgatcagtccagaagaaggcagttttctctatgggaaattatttggcaatacctattctctgccttatgtaaaagtgggggatgaacatattttgcttacgccggagacgagtcccgagcataccttttcaggagctgtatacgtctcagaaacggaaatctatttgattactaattacggagaggatttctcgtaccttgcgaagtttgatcttacaacgagagagtttcaaaaagttcttcagctagagaaggaagatttctcggatcttcagtttaatcggcatcatcaatgtctttatcttgtgagtcaaaaaggcgctgttgattctttttatgaatatcatttaaattcaggagaacttgggaaaatcgaaatacctgtcactgttattgaaaaagtaattgttggtggcaatggtggtgtttatctcctcggttgctctccaacagttcccttcaatctctatcaaaaggttgaccagaagtggtcacgtctcacaaactactctgttcctggcgtgacgaaagaagaaatggtagagcctgaaatagtgacgtatccatcttatgacggtcttgaaattgaagcgctgtttttccgggcgaagaaagaaaacgacaatggacatgtgattttatggccgcatggaggtccacaggttgctgagcgtgcatcgtttcgctctttgttccagtttctgattcatcgtggctacagcatttttgcaccgaattttagaggatcatcaggatacggtctcgcttttaaaaggatggtagaaggagattggggaaacggaccgcgtcttgatcacattcatggattagagtggctaatccagcaaggatacgctgaccgagataaaatctttctaatgggtgggagctatggtggctatatggcgctccttcttcacggcagacattcggattattttaaagctgtcgtggatatttttggtccaagtaacctttttagctttgtgaactctgttcctgagcactggaaaccagctacaaagcagctagttggggatccggaacttgattatgagaaagtgaaagcagcctcgccacatacatacatcgattccatgacaaagccgatgctcgtcatccagggtgcgcaggaccctcgtgttgtaaaagaagagtctgatcaaattgtagaggcgttacgcgaaaaaggccgagatgtcgattatctagtgttagaagatgaaggacacggattttcgaaaaaagagaatgaaatgactgtatatcgaaaagtattacgtttctttgatcaatttatttgattcgagaaaggttttggtagaaggagcaagctacagttgtagcttgcttgttttcatatcatttcttctgctctttgcgtctgaggtttaatgtatttggctaatagcatacgtgagattggtccaacgagtagcaattgagctggcagggcaacgataaggtttaagccaactgttttgaggtaagccgtaataagggacccttcaagtcctaccataagggaggttagtatcattccatagattgacataatcaacaccatgattggaaccatacaaaaaccaagagcaataataaaattcttttcgatagattgatcataagggagcgataaggctagtttacgtgcgatcggctccacgaatgactcaacgagaaaagcaataatgaacgtaccaacaagttggagcacaacagctccgaaggtaaggtgcgctccgtgtaaaatcatgttgtataaagacatgactaaaaccatcccactacacatgaaaaccccgaaaatgattccttcttttttattacttggcaaactagaacatcctttctcttagcgaataaagcttattatatagctttcattttttcttcataagtgacgtttatgtgaacaattcaaacgtattttgaaataggaaaggtctgttctattagtgagggagtgaaggtgaaaatagatttgggatttttaggaacttcgtggtccttgaagcgtatagattatataggcgaaaaacatgaaggaaagggaggttttaatatggatgtaggactattcattatagggattgctctcttactcgtttcttatttggttggtgtgaagaaacaaacgtggttactggcaggctttaatgaaaagatggtggaaaacaaatccctacttggaacgattgtgggcttgctgttttttcttccattagggttacttacgatcatacttagcgtagtcgattttgctaatgaaggtacgatcatcgtagtagcgatggtaattttgtttggaattgtagcggttttgattaatcgaaagttacttaattcatagcaaattgaaccggtataaacgagctttataagggaaaaagcgacaattaggcgtgtcgcttttcctatgctaacctcttaactgattcttgaaaaaaagcaccgtttctaactcatcttctcgatctttaaaaaggttgagctcttttccgacagcgaccgcaaattcaacatacgcatttccctctgccgttatcacgttctcgcataccgtaacatccgctttgcttttcaggtcggggttaaagtagggaagaaactctgagatttcaatggaagttgaataggcacgatttcttaatacagcgcttgcccccaacaaagtggatgcgccgcaaatagccgcaatccatttgtggtgctgatcaaattcttggattagattcattaatttttcttcgtgaagcagtggttctggatcaccgcctggaatgattagaatatcgtaatcctcgacacggcaattttctaccgtgtgggttactttaatcgtaaaattcccactgtgtgttacttcgcttgttaaagcggttgtttcaacctcgacatttgtttcactaaataggtatgaaagagtactaatctcccaatcgacatacccgtcatataaaaagaataatgctttcactgactttatcatcctttcaagtgcaaatctgttctatcgaatcctcttagttagaattttagcataattcactgggagtgattgaattactttgattaatttgaaataattggaatattgtttagcgaaagatgaacgaggaggagaagtcaatgaatacagatagatgtaaactacggatattttcggaaacggacgagctgcatgttaaaaggctgtataagagtgaagaagttcgaaagtatttaggcggaacagttgatgacgagacgtttaaacgagggtttaacagcatgattcactccctaaacagttcttcttattggaccgttttcctaaaggagtcacaggaatttatcggtatcgtttttctagatacgtatcacgatggggtgaaaacagaggtcgggtatcaatttttgccagaattctgggggcgcgggtatgcgagggaagttgtgacgcgcgttatagagtatggatttagcgaattaaacttagatgagatcgtggcagaaacacaaacgcgaaatacggcgtcctgtagtttgttacaaaaagtggggatgacgaggggtgatcaacttgaacggttcggggaagagcaatctacgtttcgcctttgtcgagtagaacagtaggttcaatgatcaactgaaggggaagggaggataagagaataaaataagaaggagaaaggcggctaactcgtgtactggttcatagccctttttgatgaacagacagaagcgcaggtgaaaggaatatggaaggagcttaaggaacactctctctcctactatatcgatgaagtggaagacggtcgaccgcacataacgctcgcaagttatgagcagttggataaggaagaatacataagaaaaatcgaggcgttttatgaagaggttgagaaggtggagcttacgtttaatacggttagttcgttcttaaactatggaacaatctttttagcacctaccgtaacggagaatttactctcccttcattccgcgcatcatcgtcattttgaagactttaatgggagtgccaattcgttatatttaccaggtaaatggattcctcattgcacggtagcaaatcagctcgagtctgatgatttggctcgtgtgtttcactattgttttaaagaagttaaacccatcactggaaaaattgaagcggtcgctttgattgaattaaaagaagaggatgaggaaggcatggatgcgcccgttgtctatacaaagcatcttaaataatgagaggaaaaagaaaaggatatcccactggctttcagggggatatccttttctttttaaaactcttcatacgtagccggatcttgatcattaatgcgaccatcagggcgcgttaattcagccatcatggccatttcagtttcatctaattcaaaatcgaaaatggttaggttctcacgctggcgttctggtgacgaagacttaggaatcgggatcgatcctaattggtaatgccagcgtaaaataatctgcgagacggacttgttatgttggttcgcgatttgcgagatcgtttcattatctagaatgtcattcacgcgagcaagcgggctccacgattccgttttaatgttgttttgctcgtgccatcttctttgatcttcttggttaaagaacggatgcaattcgatttgattgatgctcggttttactcccgtttcattttccaattgttctaagtgctcagggagaaagttgcatacgccaatcgagcgaatcaaaccccacttttttgcatcaattaaagcttgccacgcttcaacaaaatggccttgcttcggatttggccagtgaatgaggtataaatcatagtagtctaaatttgcgcgataaagggattcttgaatggcggtaacggctttttcatattcctggtagcgtccaggtaatttcgacgttatacgcaattcttttcttggaattgtgctacgacgaatggcttcaccaaccgttccttcattctcataattatacgctgtatcaatgaggcgatagccaacatcaattgcactagtgattcccgtagcgccgtgattcccatttaacttgtaagtcccaaatccaatcgctggcaagataagaccatcattcaacgtgatttctggaattgattgtttcatcctaactcattcctttctggagtggttctttaaactagtacctcgttctggaaaatgtaaacatatgtaagcgcgaccagttgattttgaataaaaatcattgaggatgctttaaggagactatagaagagcttacatagtaagtaagctcttctatgttacgggggcgacctaccgaaccattctcgctttttcataacaatccatatgtggatcaggaggagttagccccctgcgataaatttcagatgttaacatttcgataaacgcttgatcaagttgaagcttatacgcatcacaataggctatgaacaactcctgatttgtgagaaacatcattctgatgacctccctaatttgttgatgtggctgaaacgataaaagatgtgctgcttttcatttttgatggggtacataatcaaaataatgaagcagaatttttttcccttttaatcgcttttccaaataggcaacaaacaaggaagtgcatggagcatcatagaggttttgatgttgtttaagctcttgaatggcagactgatcggattgctttagacgataaggacggtccattgtcatagccgtatagctatcaatcacacgaaggatatttactgcaaacggcagctgttcattcaacatgtgatctggataccctgtcccgtcactattttcgtgatgatgtaagatcagtgaaggctcgagatcaatttctggatagtcacttaaaagctctatgccaagttctgggtgttgttccaaatcctttttcgcagaaagagtgagtggtccattcttttgaaggatttcttttggaacaagtagcattcctatgtcatgtaaaagaacggactgaaggatgattggcttcagtagggagtgaagattgtagtgcaaacaaaaatcaataaagtagcttgtggattgaactgagtgatcaaatgagggtggatcgtgacgacggagaagttccatcaattgcagtgattgaaaagaaaataaatgagcgtgcccgtgcaatgtacactttgtcatgttcattcccgttctaaggagccggttgcactacttactccctatcattcaagtgcccaggctaaaatgatagttcatcgcattctctttttttgtgttgtgtttcggtgaaattaatggaactctaattgcttatataatcaataccataaaaaggcgggtatgttaacagttttatgcatgattttatacgaaaggttaaagcaactggacgtcagatagaaagccaggtcttctttaaaggaaacattaatcctattgggcaacaatgaaataaaacagtgggattttccgaatgaaatatactttatttcccaatacaaatatatccattttagagatatgattttattatactcatttggtgaagatcagatgagaaaaatacatatcgaggaggagtaaaatgaagaagctcgcaaaattcgcaacaatttcatttgtctcagttgggttgttagctggagcagcacaggtaggcacccctacagttgaagcaaaagggccagtagtcaatgcgccagctggatgctacggaccggtttattatacggtgaaatatggtgacactctatcagagattgcctctaaatatggtttaacaacgaactaccttgcttcactgaacaatatttcaaacccgaaccaaatctatgttggccaaagattaaaagcctataactgtaattagatcgtataacagagcttaatgaggtttatccttgagctctgtttttcttatcatgctaatgattaataaaagtaatggaagtccaaatacaaaaaaataacttgcagtggcgtgatagttcgatagcgtttcaattgtgaacatatcatgaggaaaaagtgaaattcccagtataagcaaggtggttatgataattggccacattgctctctttcgtttcgtaagcgttttgatgccttcagaagagatatacaaatacgatccaaacgaggttaagacggatacagtccaaatcgatagaaacaacaagtcaattcgatcgatgataagaaaagaaatcccttttaacatataaacggtaggatcttgaattgtttcaaactggctggggctaaaatacacgtatgtcgcaagcgtaattaggcagtagaagcacgtcaccgcaacgttggagagtgttaaactaaccagagcttctttccctttaatttgtaaataaggaaaaacaaataaagccatctcaaatccaatcattgaaaagaacccttcaggtgtagcttttagaatcggacttaatccgtgttccccaatgggtaggatgtatcgtatatcagaatgctttaatgcgactagaatcataataatgagagggacgactaagatcgtaacgaattgattgaaacgaccgagcacttttactcttcctgagacaagataggcgcctgagattgatagaagagaaaggattacgattgaaggagttcgaggcagaatccaagtgttaatacttatttgaaatagttggagcacgaggattgccgttaatcccgcaaataaaatgtaaccgacagaaatcattgtgcccatcaatcgtcccataattaatggtgcatactcatagagcgataaggttgaaaatcttttgcttaagaaatatagaacgaagataacgccttgaaaccctaatccagcaagtataattgcgatccatccatcttttccagctgtggagtagagtgtctggggtaaggaaagaatacctacacccacctgggtctggaaaatgataaagagaaattgaactgaattaatttgcttgctcgttttcatctctacttccatctccgatcattccgcggttactactactatctccagcttattaaaaataatgtgatgagtagaaaaggctgttctaacgctcatttaaaaatattccataatatagaaaaaatggattgagattggtgaaaccagggtattaaataggagattttaacttgtaaagggagaagagtagaaacggtgatgaagttctacgaatcaaaaaggaaattactcttattaatagttggatgctgttgttcgtaggagcgggtgtgtatttttcatatactttattttaagaaggtagcttcttgttcgctttaattatgctactttgtgctggcttttttctgtttatcctcacaatgtatgctaaaaaaattgcaacaggccacccctatgtaatcctaaccccagaggatttggaactatatgtgctcccaacagaaaaaataaacattcgatgggaagacattgaggcgtttatcccgtatcgtatgcatagcaattcgtttatagggcttgtgataaaagacgaagaacgctatgcaaagttaatgccaaataagatgaaaaagctatctagaatgaatgtaagaatggggtatccgaaatataatatttttctttctcatttaaaacaaaagaagcttcttattgaagaattagaaaagcgaatcgttgaaacgaatccaaacaaagcaaattttaagacagacgaagcgcttaaataaagcaccaacttttgccctttttctagagaccgttatgccttttctgacatcctaataaaaagattggttattagtttggcggcgtaaacgacaaataagtaggccgctaaaaggacgaaccaatttgtatacagttcaaaaagattgagtccaattaaaagcggtttaaagataaatgtaaaagcaatggcagaaagcgtaccatatagccagtagtttttctccttatttaagcaccattgatatagcaagataaaataaaccggtatgaacgaagcatcgatgctaatgcttgctgggagttgaggaatggcgatgtaagggtaatcccaccaggacttcctgacccctagtgagtcaagataggaagcaatgacatgaatcgaaaagccaaaaaacccaagaagaaagatgtttttacgatcaatcaagaaatataatatgataagaggtacgagtagcatagcgagtatggcccagaattgccacgtagtataattggagaactgatgccagtaatcgatcgttgctgcttcaagttctttttttaatgaaataatatgatcaaattgttgttgacgatccatttaaatacctccctttgtgggtagtattcatcgattgttgaaacgatattacacatcgggaaaacttttgataagttaagtgaaagatcatcctactaaaaggaaagtcgaccatcagtgacgaattcaatatgcgatttcactatcctaaatgaggtgatggtatggttcgaacggcaaagcgtgtgtttgttaacttaccggtgaaggacttggataagtcgattcattttttcacagagcttggttttgaatttaatccacaatttacagatgagaatgccacttgtatggtgatcaatgaaaatacgtttgtgatgttgcttgttgaagagttttttaaaacgttcactcagaaggggctagtaaatgcgaagtcatcaacggaagtgatcatggcgatatcagctgaaagcaatgatgaggttgatgagttagtgaatcgagcgctagaggctgggggaaagccttcaaacgaagccattgatcatggttttatgtatgcttggagcttccaggatcttgatggacatttgtgggaagtcatgcatatgcaggaaggttcagtggaggagagcgaattataacaaataaaaaaaggccacatcctactaataaaaaggatgtggccttttatacgtttagtctgctacaacaaattcaaagtttccttcaaatttaacatcttttcctagcaagaaaccgccagtctcaattgctgcattatacgtcatgccgtatgcttcacggttaactttcccagaaacgtcaaaaccagcaacagtactaccatcgagcgggcttttcgaagtcccattatattcaactgtaaacgtttcttcttttgtcacgcctttaatggtgaaattgccagttacatcatattcttcgtctgatttcttcttaatcgacttactttcgaataccatgttcgggtattgatcagcttcaaagaaatcgccagagcgaaggtggccgtcgcggtcttcgttaccagtatcgattgactttacagaaatcgttactttaatgtttgcagctgtaaggtcattaagatcgccgttgaaatcaacgtcaaagtcagtgaattcccctttagcttttgaaaccatcatatgcttgatttgaaaatctaagctactgtgaaccttatctagtgttaatgttgtcataaaaaattcctcctcaaggattggtgcttattagtatgaattaaagataacttatttttatcttgaagtcaagatgatttaattcgagatattagattctgtctttttgactagaaattctatttcaagacatcatgcgaaagacttgttttcgtaaaaatagaataggcaaatggaaggaattgagagggatcgcgtttacgaaaacaaaagtcgtgtcatcatgggaagtagagtggatgaaaggagatggttatatgaaaagatggatggttcttggattgatcctaagtgtcatgtttgttcttgctgcttgtggtggagggaatgaagaaggaacaacggaaaatgaacctgagacaacaggggaggagcaaagtgaagagccgatggaaacaatcacggtgagtatgaagaaccaggatgatgaagagatcggaacggcagaactgaaggagcacgatggtgctacaatgatcagtcttgatgtaagtgacttaccagaaggagagcacggttttcatattcatgaaaacggctcgtgtgaagcgcctgactttaaatctgctggagggcattataatcctgaagacgtagatcatggtacggcatcagacaacggtccgcatgcaggagatatggaaaacattgaagtagcagaagatggaacaattcaaaacgagattatgaatgataaagtaacgctaaaagcaggagaagagaactcgctcctaaaagaaggtggaacagctcttgtgattcatgcgaacgcagatgatatggagtcgcaaccgtctggagatgctggcgaccgaattgcgtgtggtgtgattgttaaataataaaagggcaaacggcagaaaaaaccgtttgcctttttttagtttgcgacactttgctctttcacgatttcctgctttcgctctcgctttgctttccggaaataaagaagttcataaaaaacaggaacgataacgagtgttagtaccgtggcgccagaaagtccgccgatgacgacaacggcaagtgactttgatacgagactgccatcttccgagtgtccgaacaggaggggaagcattgcacaaatggtagcgatggcagtcatgataaccggacgaaggcgggtactgcaggcttccataattgcatcgcgaatgatcatcgtttcttcattttgtttcacacgatcgattaatacaatagcatttgtaaccacaatgccaattagcatcaacgctccgatcagtgcggtcgcatcagctggtacacctgaaatcagtagacctagaacggcgccaatggatgctagcggaagcgtcattagaatcgcaagtggtgcgcgcagagttttaaaggtcagcaccataatgagatacacaatgagaatggacgcgagcatggtcatgccaagatctttaaaatcatctgcctgttgctgcgaagcgcctccagtagcaagcgtaacgccattcggtaaatcaagatcttgcactttttgatcgatattttgcgcaataaccgacagctcatctggtgtgacttcggctgtaatgcgtgcatacaaatcaccgtctttatgaagaaccgtgctcggtttctcttctgtggtgatggttgcaacttgggacaatggaacaacgccgtttgacgtggcaagcgttaaatcgtttagcttagaaagtgaatctgttttaattccagcattcaaaaatactggagtttgttgctcgttaagctcgactgcaccaattggctgtggattcagcaagcttcgaatctgcattgccgtttgctcggcattggctttttccgtattgaccttaaccgtatacacgggcgaagttttatcctgattacttgagactttttgaaccccatcgacttctttcatttcattcatgatctgatcagaagcagttagaatatcagttgtattgtttccgattacatcgtatgtgatagaagaattcgaggagccaccaaacatcgaagacggactcgcttcaatcgtcacgttcttttcattctttttcgcttcgtttacctggtcaatgaatttctctgcgtcagcgtcttctttcataatgaagagataattcactgtatctggatcgctcacttgaccatactgagcatcttcttcgctcgatccatattgggtaaccatatgctcatagccgtcaaaaacagctaatgtctgttcaaaatcgaccatccgttcttgctttgtttcttcaggcgttgcgcttgggaattccatactgactgataccattgaagcatcatttgcacccgttgccgcttttggcatcgtcatgtaaagcgcgatcgatccaccaaatacgagcatcgctaataagattgggacgaatttatgattaagcgaccaacgtaatacgcttaaataacgatcaggcgttttgtgtgccggcaatgtggtgttcttcagcatcgctctacttagaagtggaacgacggtaagcgcaacaataagggaagcgagtagagagtaagtaacggttaagccaaaaggtaaaaggaaagctctaagggaaccattaactaaccccattggcaagaaaacggcaaccgtaatgagcgttgaagacgtaatcgctctcgatacttccttagtggcatcaagcaccatcgttttagacaacttctcattttgacttcgcctgaagatgttctcaacgacaacaatactgtcatcaacaaggcgtccgacggccacagccaccccgccaagcgtaagaatatttaatgttacgccagaaagccagagaagaaggagcgtgatggcgagtgaaagcggaatggaaagcgccgtaatgagcgtcggtttaaatttcctcagaaataataaaatcacaagtgtggcaaataaagcaccaagtccaacttcacgagccatgctcgttaccgaattttttaccatgtcaccagttgtaaaaagcgtagtcgcttcaacgccagggtagtctttgttaatttttttcaccgtttcttcgacttcatttccagccgttacagcacttgcgtcgctttctttaaaaagcaccactgcaacagcttctttcccgtccacacgcgcaatcatatcttctgattttacttgctcaaccgatgcgatctctttcagagaaacagaaggcgcatccgggatttgaagcgggatcggtaaattttcaagcgcctcaatcgatgtcaggttatccgtaacgttaatcgtgcttttttgaccatcaattgtactgtttccagcagtggctgaaacgttttgtccttgcagaactcccatgaccgcattcactggtagttgaagctctttcaatttaacttgatctaaattgatttgaatgcgagatccgctttcacctacgatgctcgcagcggacaagctttcttcattttcaaaaagcggtttaaactcatcgttcaccttttcgatgttcgatttcgttaacccatcgtcaaacgtaagcgacacttgaccaacaggaatcatcgttgtattgagctgcgacacctgtggttttccgatgccttcaggtaatgagagcgtgctaatggcatcttgcacattgttcttcgcttccttcatatttgttttggagtcaaagttgatcacgatttgtgaaaagccttcgccagttgttgaaaggatggatgtttttccattaatcgacgcaaccgcctgttcgacgggctctgtgaccgatgtcgtcatcgatcctgcatcgtacccctgaccaagtgtaacgactgttacttgtggattatccgcttcaggtaaaaactccattggcaatagaaaatagctaaccgtcccgactaataacgtaatgataacaaacaatgtcatcgctgctttgtttcgaaaagcccaattcgttaatgatggcatacagtttcccccggtttccttaaaatagtgagtgcgatatgaaactccgtcctcgttctttttaaatttactgcaattacgagtgagcgacagcggtccccggtccaaactttatctaggtctgtagacgtagatcatggaggccgtactacaaaggtcattgtacgcttgggatcatggacatatgcttgttgtgggaacgacttttggcggtttggccaataaaaatgaaatttagccaataaaatctcagtttggccaataaatctcgaatttggctaataaattgggaattcagccaatatcctgcgctttcggctgatcccttaatggaatgtgaggtcttatcacgcagaaaattggtaatttgcagaaaaaatggattagtactttagtaatagggtaataacataaagtcctggtctgtagacaagataaaaaaaggatgaactcgctgtcttcctactttgaatttgtagtataactctgattcggggggatgataggaaataagagtgaaggaggctatcgtattggacaaatggatgaaatttctcgaggtgaatgctcctcgtatttttgatttagcgattgagcacacgattttagtaggcttagcgattattgttgcgctgatcattggtgttccgctaggcatctacttaacgaccaatgactatctagctgaaaccgttctgcagattgcttcagtcatgctaacgattccaagtattgctctattcggggtgatgatccctgtcttttctattgttaatcaagggattggatttgtccctgctttcgtagcgctggtgctttactcgcagctcccaattatacgaaatacatatacggcaattcgaaacgttaatcctgaaatgagagacgctgcgaagggattaggaatgaaaacgagtcagcgacttttgcgtgtggaaattccaaatgcttttccaattatcatggcaggtattcggacagccgttgtacttaatatcggaatcggtgtcattgcggcttatatcggcgcaggcggtttaggcgtactgatcacgcaaggaatttcgcgtggcgataattacttaattattagtggctcaattgctgtagctattctagcaatgattgcagatggcatcttgttatggattcaaaaacgttatacaccaaaaagcattgcgaactaaggagtgaggtgaagaaatgattacatttgataaaacaacgaagacgtatgaaggtggcgtaacagccgtagatggagtggactttaccgttgaaaaaggtaatattgtcgtactgttgggtccatctgggtgcgggaaaacaacgttgcttcgtatggtgaatcgtctggaaacgatttcggatgggaaaatcacgattgatggcgaagattccatgtctttagaccaaatcgcattaagaagaaaaattggatatgtcattcaaagcaatggtctttttccgaatatgacgattgaagagaacgttatgattgtgccagatttattaggatggaataagaaagataagcgagcacgatttaacaaactcatggaaatgatcggattaagtggagagaagtttggcaagcggtatccgcatgaactttctggagggcagcagcagcgaattggtgtgattcgtgcattagccgcagatccgccagttatgttgatggatgaaccatttggcgcactcgatccaatcattcgcgaaaagattcaagatgagtttcttcaaattcaacgcgaagtgaagaaaacgattctttttgtgagtcatgacattgatgaagcgattaaaatggcagataaaatcgttctcttgcgtggtggagaagtgatgcaatacgataccccttctgagatgctcgttcgtcctaaaaatgaattcgttcgtgaattttttggtaaggaccgggccattaagagcttgagtctacatagaattcaagatctgcaagaaataattggtcttgcaaatgtcgatgaaacgattgaggacacaatcaccattaatgtaaatcacgatttgcgtaatacgttatcaatgctcctgaatcaagaagctgatcaggtgatcgtgattgataatgacggaaataagttaggcgccattacgattgatcttgttcaaaagtatcttcattttgaaattaaggcgaagcctaccctggtgcagaaggggtgatgagatgaataagaaaaaagtgatgagccgcttggtgagctttttcgtctatggaattgtcgcggtgttctttatttgggccatcagcaacagctattttgattatatctttagtcaatcaagtacatttctctatttactgaagcagcacatgcaattggtgcttgtttcttcactcttagcagtcgttgtggcattgccagttgggattctggttacgcgtagaagttttcgacgtgcagagtggattgtctcgaatacggtgaatttaggtcaaacgatcccgagtctagctgttctcgcattgatgattagtattttaggcataggatttaaaacggcagtattcgccctgtttatttactcgctccttccgatgtatcgaaatacagtggccggcattgattcaattgacgagaatttgatcgatgcagcgagagggatggggatgaagccgattcaaattctatttcgaattgagttaccaaatgcatcttactcaatccttgcgggaattcgtacggctgtcgtattaaatatcggtacagcagcactcgcctatgtcgttggcggaggcgggcttggcgtatggattttcactggcattcagttatttgataatggctatttaatttcaggcgctattccagtcacattattagcgatttttgtagattatttgcttcggttgcttgagcgtaaaatcgtaccaaaaggctcaaagccgccacaagaaacgtaaaggtgggaggtgtttgcatgaaaagaaagctatctcgtatcatcggaattgtgctgatcctatcgatgcttgcttcgtgttcaagtgtaggaattgggggaaagcagatatccgttggaggtaaaaactttacggaacaatacttgctttcagaaatgaccgcttttcttttaaaagaagaaggctttaatgtaaagcagatgaataaccttgggagtaccgtcgtgcggaaagcgctcgaaaacagccaggtagatatgatgtgggaatatacgggcacagccctcattacatatatgggcgaagagcctatcgcagatcctgaggaagcttttgaaaaggtaaaagaattagacgccaaaaataatgacatccattggatgaacatgtcgaacgtaaacaacacctatgcgcttgcaatgagagaagagcaggcgaaagaattaggcattgaatccattagtgatttagcagcttatgtaaatgaaaatccaggtgaactgacgatggcctcagacgctgaatttgcgaaccggcctgacggattacctggagtcgaggaaaaatacggatttgaattcgattctagtcaaattaaacttatggatcttggcttaacgcaacggtcattagataacgaacaagtcgatgtctcagtcgcatttgaaacagatgcaacgatcgttgagtatgaccttgttacgctgaaggatgataaatccttcttcccgccatacagagcggctgttagcatcaacgaggacgtctatgaaaagtatccagaagtggaagaaatcacagcacgtttaggtgaaaaattaaacagcgatatcatgcgtgaattgaattataaagtcgacattgaagggaacagtgtttctgttgttgctcatgattggctcgttgagaatgggctgttagacgaataattgataatcgaaatataaaatgtcctgcgaattggcgcagggcatttttagtttgaaaccgttcttttcattaagagaattgtgattagattagaatggtttaatttactttttatggtattgtagatggaagagcatattctgtaatcgggcaggataattaaagacttgaactcgagatattggaaaaaatgggggtataattagtaagtaattccatattgtaagatgtttcgtaaagtaagaagagactaagatgaaatgaggggttatgtgaagttaaaagaggtgcaaagtccttatattaatcaagctgttaatgatatgaattacagtaatattaagtcactgggtacacctattattgaaacaatggatgatggtatttgtattcattttatttattttggtgatagcgagacaaagtcagttcatgttttaggtagttttccagggtgggagctacaaaaaggggaaatgataaaaatcgcaggtagccagatctgggtgaaatcatatataaccgaccgtcccttggcgagtacgtattatttttcagtaaacgataatcatggagataactggggagaacgattcgaacgattaataacggatcctttaaaccccaaaaaaatagtgttttctgaatcacctgctgacatagaacaagaaaataccgagttatcatacgtttctgccaatgaaccgattcattctatgaaaataccatctaaaaatcctactcttgtcaaaaaagtgttcactagtaacctgttgaaaaatcaaagggacctttggatttatgaccccattgaaacggttgataccccaaaaaatatagtgattgtgtttgatggctttcaatatacagaggctattccaactgctaatataattgatctgttgtatagaaaaggaaaaatacctcctactgtaatggttggagtggatagcccagatcgtttaatgagttaaatggaaatgatcaatttactaattttattacagctgagttattaccgtggatacataacaaattcactactagtcacaatcctaaagatatcgcattatgcggcgcaagtttaggtggtctaaccgcattttatactgcgttaaatcatccaaatcttttatgtattatcccaatcgggttccttaaatcgcaaaaaaacaaatgataaccagtattggtctgttcattatgtagaatccgaaccaaggcagcttaatcgtatttatatgaattctggacggttagaggtggaggaattacaaaaagctaattccctaacgtacaaaacacttatcaataatggttatgatgtgaaatatgatttatttaatggaggacatgatttgctttggtggcgtgaaacctttcttaaagggttagaatatttattccacgaaaagtaagcgtgttttaaaaagttcaatattcatttatctcggagcttatcatgaataagataggctttttttgacgtgaaataagaggtgaagtaatttacattggttataaattatgggtaacactcgaacataaggcaatagactttataagactcaaggccaatttcaaaataattctaaagagcatttttgaaaaaccccatttaatgtatggttaaagaacagtttgaaagtatgtttaacgagacaatgaaaggtagtggataatttgataagaatatcttatgggttgttactagtagtaatattggttgtccctactattgcacaagcgcaaaaccatcaagaagatatgcttacagattatatgaatgaagcaatgaagaagtatcaaattccaggtgcgtccttaggtctcgtacaaaatggtgatgtggtctatcaagagtcgttagggaaacagagtgatggatcgcctgtcacaaataaaactcttttttcaataggatcaataagtaaacctttaacaagccttggtattcttaagttagtagagaaagggaaaattaagttagaagctccaatagatacatatatccaattcgactacggacaatcgaccaatcaatacgttataacggtaaaacaattattggcacatacgagtgggattagctccttatctggcatggcaatagctgataaaaatctaagaggatctaatgcccttacagaagctgtaaaagaactggaacctctaaaacttgtttcaaaaccaggacaacttcaccagtatagtgctgcgaattatttactactaggaaaaataattgaagaaaaagctgaagtacctttcgcagaatacatgcatgaggcggtatttaagaatttgggtatgtccgatacggttgcgtcgtataaatcagcgattaaattgggatatcagccaggttttcaatcctggtttggtaaacctgtcgaaagcgatgtatggttcgatgatagtggcgccccatacggttatatggcctcgacattagttgatatgttggcgttcataagagctgttcaatacagtgacacccttttatctgaacctttaaatacgctatacaccaaaccagaagtgcatagaaaagaaaacttgtattatggattaggctggagaatcaataaggagaaaaacgaacaatatatttttcatggcggagaaactccagactcgcgttctgaaatcttcatacacaatacgaaggactatgcctttgtgttgctgaccaataagaataatttttctgaagttatgaatacgactgatatgaaagaaggtattagagagattattgagagtgaacaaataccttctttacctgagcctaaccatcgattgcaatggttaaccttatttttcactataatagtaactttgttaggaatttggaatatctcccgactttatcaaaagaaccttattttcaagaaaatatggtacattgtagccggagtttccgtcttgctaggagttattatgattcctttattagttcaattatttcaatcaccatggcataccattatcgcttatgctccggatactgcattattaattaagatactcattggagtattggtgacatatgggctctgttcttctatagttatctccataaaaaagaagtaggcaggacaaaataatgtaataagatccaacattagctcttagctgttaaaccggagcgaatgatgcatgactttctaattaatgtttctatgagagtattaccgcattcagcaaaaagttggagatatttatagaaagtacattgacgttgaaaccacttacttacaaagcaaggaaaatccattaaagtggatggaaattgcaaaatatgaaagtgaagaagaatatcagaaggcgatggcactaataaataaggaaaatgagattctagaactatttaaatccttcgaagccattctgttatcagatacaaatatggtcggggaggaagacttcttgtatgtaaaagagatatcaaactcttgatcaacagtctcggagcaattgctgaataaaaaattagccattaatgcaaatgtttatttccaaatctatcgataagtaataatgtagaagctgttataaatgaagaagggtgtagatggtaaaaaaatactgaatatgctccatttggttttgatatcgttctacggggtacattccttcatgtaacacaatatctgacaaaggagtttttaatgatggcagagcgttataagactggcgaaaaagcacctgaaaatggaacatatgaatttgttggattagtaaacgaatcaaatgagaacgctaacgcggaagaagaaaaaaacattgagctaagcagtggagagacattccctccatcccaatccaaccaagatgcagcgtattggaaaaaaacaaattaattttaccccgaacctccgagaatgttcattcgttcttagaggttttttttgttttcttaatgctttagatttgtctgtgaattaggctaactgtttttaaagaaccctccgcatatggaaattaatgttacgattgatagaagaaagtaagcgttactccatgggacattttatacttctatacatagtaaaaaagataaagcatgattgtatttagtaagaataagaaaagactgggcacttttaaaggagagattatgattttggatagcattatttttgacttagacggaaccatttgggatccgattgatactgtgttactagcatggaatagtcgtttgaaagaacacccacaagttcatcgggagctcacaaggactgactttgaaagaacgatggggttgcaaatgcaagaaatcagtttgaaactgtttcctcatttatccgaagatgttcgcgaacaggtgataagagcgtgttgtaaggttgaacaagaatacttagaaaaacacggtggttctctttttcctcaggtagagactgtattgcagaatctatcaaactcctacaaactctatatcgtcagtaactgccaggatgggtatattgaatcattctatgcgtatcacaaatttgataagtactttcaagactttgaaaacccgggaagaacaggcctttcaaaagggggaaatattcagttgattatagagagaaacaacctgacctcccccatttatgtaggggattcagaaggagatcgaaaggcagcgaggtacgccagaattccttttatttatgctcagtacggttttggacaagtaactgaatacgatgatgtgattgaagcgtttcctgcgctggcaaaatactattgatttcttctgtcatgatgaagggaaggtggtcagtacattaaaaacgcttcatgaattcaactagtgagggatgaaaggaagagtctcgtatgaatgacaagttacttcaattactgaacgaaaaatatccattgcatttcatcaaagtggaagcgattacagatgagatgtttcgttgtactgcggaacaaggtacttactacgcaagggtgaccaactataaaagctatgaagaacaggtagatgaggtgacttatacaaatttcctctatcaagaaggtttggctgtatcgccgacaatcgcttctataaatggagaagtagtcgaaaggatcatgctagacagggaaatgctaacggttgtttatcagtctgctcctgggatccatttggctagaaatcgttggcagcccaatgtgttctatgaactaggtcggcaaattggtcgattgcatcgtttttctaagaaatttgaagagatccatccacttaactacattaacgactggcatgataatgaggaatatgcattcctcaagtatattccgaaagaagaaagtgcgattagagagattgcctatgacatcttatcaacaataaaaaaacttccaaaatcccattccaattatggattgttgcatggtgatttatgcttagaaaatctattgattgatgtcaaatcaaattttactatgattgattttcaagattgcgagaagcatttttatgtttttgatttagcagctccaatctatagtgcaatggaatattcgtatgttgggggagggaatatcgttgaatatggacgtgcaatgaaaaaggcaatcctcgacggttaccaggaggaaaatgacctatcgccagaaatggtagatcaacttcccttatttattaaattaaaggaagtatttgaatacagcttgatgcatatgtactgggataaagatacgttaacagaagaacagattagaatcatgaatcattttagaataaggattgaacaaaatcattctcttctaactcgttaagacagaaggtttgagaaaagacaagtaaaggagaaagaaatagaatgaaaaccatcactcatccatctatcaaactaacaccttccttaaatcaagaagactacaacgaaatccttagattaaaagagtgctgccttgaaaaagaagatgtaacgttaaaactagaacttgatcacaaacgaaatcaatctcataacgggagtgttgatcagaacaaaatcaatgagtttatgttttatgatgatcacgtactcatcggctatatgggcatctgtcaatttggttcagaagcattagaagtaaatgggatggttcatccggattataggagaatgggagtctttaagcggttgttttcattcgttcaagatgagtggaataaaagagaatcgaaacagatgcttttgttgagtgatcgaaattctacacctgggattgaatttattaagagtacaggagctcactacgaaaactcagagtatgagatgcatttagtcggtgaagcaagtgaagctatcgatatgacaaacctacatttcagaaaagctttaagaaaagatgcaaaagaaattgcaagacaaaatgcgatctactttcatatgaattcagaggaagagtttcccgaggaagcatcattaggcgggatggatgtttttctagctgaatggaaccagtcggttgtagggaaagttcatattgaaatacaacatggtgtaggtggtatttatggaatgggtgtccttcccgaatatcgaggacaaggttttggcagagagattctcatgaaagctgtaaagaagttaagagaaaaacaagctcaacaaattttgctccaagtggcagtaaagaacaagaatgcgttaaagctataccaatcgtgtggttttaaagagacttctacaatggattattttaaattaactaagaagtaatgaaatcttttgaagtagaattcaatgaaggagatacgcatgacttatcaatttgaagtaatgactcaagaacaagcggaagacatttcttataattggcactacgagggagaatattctttttatgatatggaggtgaatgaagaagatttacaagaattcgtcgatcctgaattgcgtggggactctaagtttgcagtgatgaagaatagcgaattagttggttttttcagcgttacgaaagtggagaatctcacttatgatattggcttaggaatgcgccctgaccttacgaataaagggaagggattggaatttattagtgcgggtttagattttattaaaaagaaatataaccccagtaaaataaccttatccgttgcgacctttaatcaaagagcgataaaagtatacagaagtttgggttttaaagatgttcacacgtttatgcaggatacaaatggtagcacatttgaatttttgaaaatggaatatgaacggtaatcgatttcgctcggatttaacatgattaaaaggtaacgtgagatttgataagtaataaaaagttcaaaaaggacattaattgcaactgtcgtttttattcttattgcatttcctttaaaccttctccttccatttccaacgtaattaagctatttcatcataggtatcattgcagcggttatttatcctgcagcagataaatatttacccgtagatgaagaagaggagcgaggatttagaatcaggagaaggaaacatttgaggaaaaaaggtaaaatgcgaatgggaaaacgaacgtgaaacttttggggatctatcatcgtttcatatgttggatggtgaacgaaatctgtaaagacttcaattcattgccaaaaaaaaatgagatcattatgtttaaaagcagacaccaagtctgctttccgactttattctacttcatcccaatcttggttccatacaacctcccacatgtgaccatctggatcttgaaaatgaccagaatagcctccccaaaatgtagggtgtgcagggtcagtaatgttggcacctgctctttgagcttggtccattacacgatccacttcggtcttgctgtttacgttgtgaccaagagtaaactccgtaggacttggatcatgaacgtttaccttggcttcatgtgcaatatctttacgatgccagatcgcaagttttagaccgggttgcaaatcaaagaaagcgacagcgccatggtcgaactcttcaccaacgattccttcagtaggaaatcctagtccatcacgataaaagcgtaacgcttcgtttaggtcgtttacgccaatcgtgatgacagacactctaggcttcataaaccctgtacctcctattagttttggaataattctatcacactcatgttaattaatttaaatcgtattctaagtttgaatgcttacgcataagcaaacaatcgaactataggcatctcactttttgattatattcttctttggagctcaccagtgatggcaactatatggtaacctctagaatctggccccttcacccttcttatattggtaaattcaaactgcttcataagtggtatgagctcattttcaatcatgttcttcacagtatcccacgactctccactttgtccgtcgctaagcgttagtgaaacagatccatttggtttaagtactcttgctatttctgacatagcttgtggaaggttttcccagaagtaaacggaatggacactaaatactttagaaaactgtttatctttaaagggtaatttatgaatatttccatggataacttgagctcttttttgtcttattgctagttgatttcgaatcgttgaagaatgaaggagcgtcttagatacgtccaaaccgattactttatgaatggaaggttcgtttaataaacgtttcatcgcatacccggcaccacatccgatctccaagatgtcttcatctttttggaggtttagtaatgaaatggaccaaatcgtttctggtttgtgttgtcggatcattttttcaccaatgtaccatcctaacaaccctttgggatgctggtattggtgttcaatcatgcttgccattcgtttgagaaaaatcattcggcacctactttctttatacgttaaaagtataagtagattatatcgattaaacaatctaatataagttatagttactattaattatttttatataagaggtgtgcattggaaattaatcagttaaaagcttttgaattggtcgttcgtttaggttcctttagtaaagcgtcaagatatttaaacgtatcgcaaccaaccatcagcttacgaataaaggagctggaaaagagtgttggcggttcattatttcatcgtgtcggaaaaaatatggaactgacagacttggggcaggggtttctcccatatgcaagtcaagcgttagaagtattattaaagggactagaaagggcacaatccattaaagaaggaaaacgaggagaagtaaaaataggaacattacctacatttacaacaggactatttacttcaacactaattgaaatgcatgagaattatcccgaaatcgacttggtcattcatacaggtcataatcaacaaattcttgagatgctctatgatgggtttattaaaatggggctgattactcatcccttttttaatagtgatttaaagacgctacttttgatgaaagaaccacttatactagtggctcataagcaccataaattaagtgaattaaaatctagaacttatacaatagaggaggtttttgcaaatagtgatccttatattctgactgattggagtgatgagagtaaacattggcaaaaaacttatatgacatttggcatggatagtcttgagctccctccaactacagctcttgattttgttcgttcaggaaaaggtgtagctcttttgaccaaatcactcgttcaagacctattaacgaggggtacactaatgagacttttgcctgtggaaatgccagaactatctagatgggttgccctagttagtttggaaaacgaatcttctctcactccagcagcgcaacgttttgtaaaaacgttgaaaaatcatgcagcgacactgaggtctctttaagcattcatcctatcgctctaaattgtacgctcctaagtattgacagtactgacttcgatgaatatactaaatatgtaagaaaaaggtggaaaggaatggtacttagcggatgtggaattaatcttatttaaacgggagaaaactcatattttcataaaaatgagaacctggaaaataggattagtctgcccaattaagtgatcatttcatcatgtacctttttcaaataaaaggagacgccaagtgcgtttctctcattatttgtttaagcgtttgcatgttatttgatatgggattagcagcctctccagggttcttggagaggtttatttatgttcgataaacctctcaattaaacttattaagaggtgacctgcatggcgcgagtgatacaagtgaaagaactgcagaaaaattttggcgaacgggaaattttaagtgacgttagttttgatatacgaaatggtgaaaagattggtttagtcggctggaatggtgctggaaaatcaacactcgtcaatattctgatgaaaaggattcaaccagataaaggctctgtgactgtaccccatttgaaaattgggtatttgcctcaatcaacagataatcacctggctgttgatgctgaactttttgcggaaaggttaatggaacaaagtaaaaagctagggtttcagaaagagcgatgggagcaggagaatcttcaacatttaagtggcggtgaaaagctcaaattgtctttagcaaagatctgggcaagttctcccgagtttttaatcctagatgaaccaacgaatcatctcgatatgcagggggttaaatggcttagtgaagaagtaaggagttattcaggtgctgccatcatcatttcacatgatcgctattttttagatgaaaccgtgacaaaaatatttgaattggaatctggaaaattaacaatctacgaagggaattactcgttctatcgaaacgaaaaacagagaagatacgaacagaatatgcgtgattatgaaaaacaacagcgtaaggtagagatgattgaacagcaaatcagcaccttgaaagactggtcagctaaaggccatcgtgaagctggaaaaggagggtccaattctgaaaatcgtcaaatgggattgcgggaattcgaacgagcgaaggcaaagaaaaaggataaccagataaaatcgaagctgaaacggttaaatctagagcttaagaaagatggggtcgaaaagcccagggaagagaaaagagtatctttccattttgaatcaacatcgaagcgtggcaaacgaattctcgaagccaaaggaattaagaaggaatttggggatcgcctcctctttgataaaagtcacttttacatcaagcatggtgatcgaattggactaataggctccaatggttcaggaaaaacaacctttattaaactccttcttgagcaggaacagcttacgaaaggttcgctttggataagtgaatcaacaaaagtggcgtatctttcacaggatgtaacggacctcccaggccaaaaaacaccgttagattaccttgatttaacgaatcgacagcaggaaacaaaagcgagaacgcttcttgccaatatgggtattcagcaagaaattcttgggaaacccatttctcaattgagtctaggagaacgaacgcgaataaagttaatccatatgattttgatggattatgacttcttgatcctagatgaaccgacaaatcatctcgatcttccaagccgagaagagctggaaagaacgcttagtacgtatacaggtacgctcttgatcgtttcacacgacaggtatttaattgaaaaactgtgtacaaaattattagttatcgacaatgggcaaatgaagcgggttgaagtagggattaaggaatatgaggaaaaacaaaagaagaaggagacaggaagcgaaaaagtaagggaagaattagctgtcattgaaaccaaaataacagagctcctaggcaaaatcagctacttgttagcaggtacggaggaatataaatcgatcgataaagagctaatgaagctgatggatttaaaaagaaaattgaataacctatgatttgctgcagagcgcaattcttgagaaggaattgcgcttgttttttattcgacatgaccatcgcttataaaaggagaatattcccttttaaacgaataagtaaatgaatcgtgtttttaggaggatggatatgttgaattttaatgtcttcagaaattcctggtaccacgttgttcgtaagtttgtcccatacatccccatcctttgtttgggaataaatattcgctggacttactgagccatcgccaaggacataaagatgtcctttttgcgatatcgtcaacttatcaataaggttgaccgggatttaaggtcgtactcttccctagttaagtcatacacaaaaagacgatcttccaccccgcttgtacttacgagatacaatcggttattttccttatcgggacccggttgaacataaagataaattgacggaagattcacagatcacctatttaaaaggggtacaggttgccaatgatccgagggtcgttaaggctgattccgatcagttcgttgaagcattaaagaaggaaggatcacaagtcaagtacgtggtcctagaagatgaaggacatggcttttcgaagaaagaaaatgaaatcaatgtgtataaaaagattttaaatttctttgatcagcaactggtactgtaaaacttatgtaaggttagttgaacagtaaaaaattcatataagctttttacaaaaaaggctcattgtttatgagtctttttctttatgcttatgtatccactttctttaaagaacgtgaatgtttttaactcacaatatggtaaaaagtatggaatattcatgtgttatccctattttcgttttatgtggtaaataattgggaatcaccttcgaacagatacattttgcttcaccaaggaggattaaaatgcgattttattatacaggtttcgtgatattagctgctattttatggggaatttcaggaggattagcagggattttaatggacaaagggtggagtccacttgtgatctctttttatagaggggcaattggattagtttgtttagttatttggctccttcttcaacgaaaagaaagttcaaggaagcattcttcgagaaaggtcatgtgggcaatgctcgctggagttgctgtagctggaaacttcagcttttactttcttagtatttccgaatctggagttgctgtagcctcgaccttaatgtatacggcaccgttattcgtgctgattagttcttttgtctttcgaattgagtcgattacgccttttaaggtcatatcgatgattgtcgtgatgggtgggattagtttattaacaaatatttatgaaacgggcatcagccaattaaatgtgttaggggtagtgagcgggctactatcaggtgtttcttatgctctctttatctttagttttaagaatgcttcaaaaaataatagccctccgtttgtcctaagcacggcttttgctacatttaccatcgtaatgcttctttttattgatcataaggaagcactctctgttttattttcagaggatatcatttggtttgtcactctcggaatcattggcgcgggggtttcattttacctctatgtagaagggttgaaaaaaacgtcagcatcggttgcttctgttattgcgatggtagaaccagtcaccgcttctttgtttggcttagtgattttaggagaagttcttactgtcttacagagtattgggcttattgtcatcctaatagcgattacaatgttaagtttaaaacagaaggagtgaagagggaaaatgtggtcgtagggtagattgtttgatttaatgaatgtaagagcttttgtaaaacgtttactactactgcttaagaagcccttttcataaagtaataacatcagagccttttttaaaaggtagaaaggtaaaaggctaatgtaaaagaagaatgacttttcacttcttgtgttggagctatatgaaagatcattttattcgaatgatagtgatagtggtttagggaaatagagagaacgatgaaaaacggcccacaaaacgaactgttttgtgggccgttctatttaggtattttgcattttaaaaagtaaggttgcttacttcgtattcgtaaacccgccatcaatacgaatcacttcaccattgatgtactgtgcttttgaggttaaaagaaacgtgacaagctcagctacttcttcaggcgtaccgagacgcttttgaggaataccggcttcggcattttctttcattttcggattggcatcataaaagtcttttaccataggcgtttcggttggtccaggggcgattgcgtttgcgcgcagaccatctttggcatattctgcaacgatgcttttcgttaaaccaataattccgtgctttgtagcagaatacgtgacaactgaatcctgaccgatgacaccggcacttgaagctgtatttacaatggagccaccaccgtttttaatcatcacatcggctacataacggacaccgtataaggcacccatcaagttaatgtcgacgatcttctcgatttcttcaacctttgtatttaagtagtattcaccgctaccggagatgccggcgttgttgaaaaagtaatcaattttaccgaaggcttcaaccgttttatcaacgtaattctttacatcttctgcttttgatacatcggcttttatgaaaagcgcatcaacgcctgcctttttcgcaagatcgaccgtttcattaccgccttcttcattaatatcgactgcaacgatagtcactccttcatcagctaagcgaaccgccgctgcttgtcctaatccacttcctgcacctgtaataatggcgactttactcacgcataaaacctcctgattagttgtttgaagatcatatcctgttgctatagtactagtatagacctttgagatatgcaaataaatgaaaacggcttgagcgaagcatctgggctactaccttgatacatacggatttccagttatccaaaatctccagggataatctttggcgtcaccagagttatcaatgccaatgcgttttccttcagagatgtgatcaggctgatagccactacgaagataaagtggcgctcgtattaaagcatgtccataatcacttggatcaatcccaagtgcttttgttagtttacctggtccatccgtccattccttttgcttgcgaccgggtcttcgctgctccattaaatcgagccctttgagtggctcaacggctcgcacaagaacagcttctggaacaccagcttcagcacttacaacgttaaacaaacaatgggtatgcataacataggtatacgcatttccaggaggaccaaacatcacttctgtgcgctttgtgcgtttattgttaaaactgtgagcagcttgatcgattgctcctaggtacgcttctgtttcaacgatataccccgatgcaagtcctttgtctgtttctttaactagctcacagccgaggagcgcttttgctagttcgagggttggtttttgatagaaatctctaggtaagattgacataatcgtgtccttccttaggaggtttagttgttgtagtgtttaatggtatggttttttcaatctatgcattagttttccacaagctttcatgaactaaacgaatgtatactgtgaccgaccatcttggttaatatcacaatgcacagagtggagattcattaattgctgaaacttaaggtcagcctattcgtataaagtagtgtaattgaatggaatgtggcgaataattagcatttaaagaacgtgttgagaaaggtgaataaactacttttgctattcatcgtaggctttatcttcaaactgggggttattaaatgacagaaattgtggctttaggttttggagtatgtgtcttttatcttatttttcgactaggtgctcagatgaatagtcttagtatgcaaatgaaaagaatgaatgatcatctcgatcgaatggcacagcacatgggtttacctgaagaccccatcaacgaagaattgcgagagctagtgagagaaggaagaatggtagaagctgttaaaagaacgagagaggtatttgggctatcgctagtggaagcaaagcaatacgtagatgggctttagaatacggaaacttgtctattcttgaggctagtgcatgaagaaaaccagtatcggtgtaaaaagttcattctttctgcttcaaagagatcattattagaatgatctcttttgtatgaaggagtgagggaatagatactagctgcttaaatcgagatctggacatttaaatcaaaatgggaattgaagtgagccaaagcaagtcgaaaatccttaaaagttgattacgtatgactacatatggcgcaccatttcataatcttcatgttataaaagatgatagggacagaaaaaccccctccagttccattggaaaagaaaggggggatttgattatggactgaaccatttatccgagaggtatttcaataagtggctcgtatcggttgctgtcagagcgtagttcatagactcgtatagatttgactaagaaagtagggtaaggtgttagctccttttcagctgtaagcgccatgtcgtttagcgcctccttggttaaaccgtactgttcttttccgagcgttaaatgagcaacgaagttttctagttcaaaatattgttgaataagatcttcagaaggggagattgctttgacaatcgcttcgtgtactggatacagtttttcagatagaacacttaagtaaagaatgttatcaccaaagtagttcggtttggctagcgtaatggtaaacgggtgaatgcttttacaaacggttttcacttttttaatccattccttatcagatgttaaccctccctgtgcttttagagtaatgtgcggttcgactattggtgaacctagccattcatgttggaagtgctcgacctttttttgatagtcggatggtggggtgatgccgataaaatactgtgtggtcatacggattcagtcctttgttatagattaatagttagtaccgtattgtaacgtgtgtatgattcttttgcccgtattactgtttaattatggccattataacaataataggataactagagtgtttgactggttgcaggcttcgaacatagggtatcattgctatatcttgccactttgcaaatatcgacagcattcgccctaaaccgggtggtgacaggcaccaattagaaggaggttttccatgtcttcagaacttgaatcgagttacgaaacaaagtcaccactcaataagaagtacatcttacaagcttcttactggaaaggtgttcaaattctttccgtattaagtttactctttagcttattctatctatcatttcgagacacgagtccgatttggaatgtgtttggggttttgtttctgttaatgattgtgatgagcatcttaggtgtgctcaggcaacgcaatttaagcattgcgagtgcactgtatttgatgtttattccttttttaattattctgatcggcttgatgaattttcagctatcaaatcagtatccaggtgaaacaagcattctaccgattcttatccctagtttgttccttctggttcatgtagttaccttgatttttgcctggagaatggacaagcaacgaaaagagggagtgaacagtatcccccgatcgttttctgagctattggtatgggggaatttcgttgtattaatcgtcggactcttcacaagttccttgattttgtttcgttacgaaaacggcggctacgcgccttacgtgaatcagctcgctttgttttacgcattcgttttcttagcaagtaccgttcttattatacaggggagcaaggcacgcccaacgttgcggagaaccttgatgatcggtgggtttgcgattactttcattcatttccttccgctcctctcagttccgattatcatcaatcaggcagaagaacaggtagaaaaggcgtttgctcagtgggattcatcgaaattccattcatctgaatttcaacaaacgccattttctcttcccgcttattttcttggcattccaccggctgatgttgaaggggaaaaggatgtgctattttatgaagggactgaaggagtggacgatggcgttgagcttcgctttgattctttttttccaaaagaaaaggaggggaagcttcctgtcttaattcgcatacacggaggttcgtgggcaaatggagataaaggtgatgcgaacgtcatgcagcaaaatacatattttgctgaacaagggtatgcggtatttgatattcaatatggactcacaactcttagttcctatggattaagcaacaatgttcctgacgatgtgagaggccctttttcaattgatgatcaagttcgtcatattggtctttttacgcagtatttagcggagcatgcagaagaatatcagctggatctctcaacaacgtttgtttcaggaggatcggccggcggtcatctggcgacggctagcgttctcgctatgacagaagggaagtacggtgactggttctcgaaagaaattaacgtgaaaggtttgatcccttactatccagccaacaaagggccagcgctcggcggtattcctggtacggaggaacttctctggccagaacagctcgttagtgaaaatagcccgccagcgctcctttttcacggtacgcacgatacgtacgttgggtatgaaacagcggcatcgtttaaagaaacgtatgcagatcacgataataaaaaggccgctgtgatttatatgccgtttggaaaccatggcagtgatttttattttgcagggtattacagccagacgtttacgtattatatggagaggtttatggcgttgtatcggtgagtgtatcgtgattttggaaatatgaataaaaaagaaccaggtgcccctaaagagagagggaagtgcctggttttctttgtaagtcgatttacatcgttttctaagattaaacgagactaatgcctatccaaataaagtaagcgattacagaagcgttgaatagcgtaaagagtaatccgatcgtcgcccatccttttttctcatcgctcgttcggtagacaacaaatgcgaataaaatggacagcacacagcccgctagaataacaaacataatggatagggcagccgattcaccggagcgagaagataccggatcaatcaaaaacatagcgaatgttgttagaacactgatgatattgaataaaaccgttctccacgttgttctctttgagcggtaggtgtaaaacatttcgttctcctttctagcctgttacgtagcatgtctttcattatagtggagttaaaaggagagcacaaactacctagtggagtgggttcgagaaagaagaaaaaagaattgaaagattcgacaatgttcgactgaaaccgggtggtgacaggcactacaattacagttgacattgtaaaggagtgaaagtatgaataacttcataggtgtattcttctaccttctcatcttaacgatcacgattttgatctaccggaagtcagaagaattcgagccttatttagtatggaaactcatcggctacacgattctcggtggtttttcatttcaatttaatgaatggaaattgcctcttggattactcatttacttactgtttttcacaaatattaaagttaatgcaaaggcgaagaagcgcgcggtttatttaggtttagtaatcttcgttgtgacaacaatcgttccatgggtacataactacatatatgagcaaccaaaagaagttgcggtactgaatacaaacttctataaaggaagtcttgctaaagaatgggagaacatacatagcaaactagggaatatagaaaattcggtaaaggtccttgatttcgatatgacgataagtgacgaaggaaagatcgaagacttagatatgtacgtagaagagaatgcaacgcgaggaaaagttcactatcatattaccctgtccatgtccaatgagggcaaggaatttattgtagtacgtagaaaggttggaacggaaggattccactttgcttcagaaacgcttacggaaggggggtttttcttcaatcagattgatatgattaagaaacctatgctaaatgaagaaggcgtggatacttactatttatctgcgagtgggcagagaacgaattatccacaaacagatgatgattcttatcgcattgatacagccggtaagagaaaagttgaggatagtgaattaccgactgatgccatcgtcgttgatatttgcgatggtgactgtgattatcgagcgtatttcctttttgatgtgttagaaagaatgcctccaattacggaagataacgtccttaattttgcacagcaacaatcatctgaaatcaggagttggctaatcaagcaccgcggagatgaactcggacttgaaaaagatggggaatacttcttaaccaaagatgggaaaaaggagaaagtaagcaaagagacatattttaaggtattaaaggaaacacctgaaataacaatcaatcacaacgaacctctgatagaagtaacagtgaaaaatccttacggggacgagcctcatcaaatggattttgcttttaacaaagagctgagagaagtgaactgggtgcggtttcaataagctaaatgaatgaaaagcgaggtggcatgatgcgatatacagttattcgaaacttgtatttatttctaggatggttttatttagtaagcgtgctgttaattgcgggctatgcctttgtctatgatttaggattacctaccctttattttatctggatcatcataggtggtatcttgctattcatttttagaaggaatatgaaacgagtgatgagagaaaaaccaataaaataagggcaacgcactattgcagtgacctcatgaaaaaaaccgttaacacttcctagtttaaatgtgttggcggtttttttatgatgaaaggacatctatatacttgctcatcaggtatagtacaataaaactgcacgatacaataattggaagtggtgatggaatgaatcaaaacgtgttaaccctccctgcaagcggtacatgtaagatcatttacgagcacagcatccatgcgtttcccagtcactacatttacaaagaaacaccctatgtcgccttccgtgaaaggggtggatttattgaaaaactctacaccgtccacgaccgttttgtgatcagtcctccctacgaactcacatcaacagatctcgcacgattcgatccactcattcagcagagaattcgtacctacatccaggatcgtaaaaagggatttggtttcgataatccagatcaagcgtatatgttttgggttcttgaccaagaaataacgttacctcaccgacctaaagtgacaccgaacacgccaggtcaccagtacttttcgtatgaagatttcatatcccgcgagccagtaatcacaaaaaatggaaccgtctcaaaaactggcgtcttcgagtacgatgacttcagagacaatctgctgatcgataagtacaatccaattctatcctccatgagaagtatgaaaacaaagcatttaagaagtgaaaatagtgaagacgccatcacctggaacgtgtttaaatcgctccaacaaattaatcctcaattctggtattctgaactgattgcaaaagggatcaatcaaacgaaatactcactaaagcaactagtccccactgatcagctacctcacaatctaaccattaacctctgggaaacaatcaaaccaccgtcaactttactagataatcagttagaaggaccaactgaagtggatgtcatcattgaaagtgaagactttgtctggttaattgaagcgaaattcaagtccgacatttctacaaaaacgactcacaatcattcccgaaaccaggttctacgtaatattgacgttggctcccattatgcaaaagggaaagacttttacttttcgctccttatcctggaggattccatttcgccgatcggtgtttcagcggtagaaacctacagcagagaacttacgtcgaatgccgctcaatttgagagtcaatttctacatcggtctgatcatctttcaaacgttcagggaataaccgttttatattggcatcactttgtggagatttttaaaaacggcatgaaagaactagaggacgattttgaacagctaatcgcggctcgtgcttttcactggatgacggaaaaggtagatcagatggtaaaaaaataatcggtcagagacaagggtctgccctatttggcagtcccttttttcatagagcgtggtagaaatcctcccaattcacatgccttttctactaactttccttcttttttatactcgtattgaaaaaaatgtttactaatataataaaaaggttatttctcttattacaataatacgagaaatattttttcttagggtagaggaggagtcaagatgcaatcactttggtttacattgctatcttgtgtagcattcatggtgcttgttggatacatagcttatcgtaaaacgagagggacgactagtggttccgatggttattttcttgcaggaagaggacttagcggtgggtttattgccggctcgcttttgttaacgaacctgtcagctgagcagctggtaggattgaatggtcaggcgtttcgaacgaacttatcaaacatggcctgggaagtaacggcaggggtagcggttgttcttatgggactttacttgcttccaaaatatttgaacatgtcgattacaacacttccagaatttcttagcaaacgatttgatgaaggcgtaagacgctataccgttgttttgtttatggttgggtacgttctggtaacgattccttctatgctttattccggcgcactcgccgttctgaaactttttgatgtgccgtccattctaaacatttcctatacccagtcgatctgggtcgtgatctggggcataggaattatcggcgctgtttatgcgatcttcggtggattaaaagccgttgccgtgtctgacacgattaatggcgttgggttactcattgttggtgcgctcgttccgattcttggccttatcgcacttggaaatggtgcgttcctagacggagttaaaacaattacaataacaaatcccgaaaaactgaatgcgatcggcggtcctgaagattccgttccgttcggtacgatttttacaggactcattattgcgaacatgttctactgggcaacaaaccagtatgtcattcagcgcacactcggagcgcaaaatttaaaagagggacaaaaaggggttattttctcaggattctttaagcttcttatcccgattttcatgatggttccaggggttatcgcatttcatctttacggtggggatcttaaatccgttgaccttgcgtatccgacgcttgtgatgaacgtgcttccgtcatacttatccggctttttcctcgcagtgttgcttggtgccgtgttaagttcatataattcgttgttaaatagtgcttcaacaatgtttgcactcgatatttacaagccggcaatgaaaaaagatgccacagatgaacagctcatcaccgcaagtaaatggttcggctcggttatcgcgattgtcacgtttttcgtgtctccgatgttaatgtacgcaccaaacggtttatgggatttgattcgaaagtttacgggctttttcaacattccgatcgttgccgttgtgctcatcggcattctatcaaaaaaggtaccggcattagccgcgaaagttgcgatcattttccacgtggtggcttactacatgatggtatggggaacggaacagatctttggacttcccctcaacattcatttcatccacatctacggcattctattcgtagctgaagtcgcgatcatgtttggaattgcttactggaaaccacaagaaaaagcgtatgtattcccgaaagcttctaaagtaaatatgacgccgtggaagtacagcgtacctgcaggaattctactgatcgcaagcatttgtgaaacgtatcttgtcttctcgccaattggcgttgcttacgcaggtggcataatttcaccatcgttcttaccagcgacaggtgcactcgcggtggtaacacttattgcgtttgccgctgcgacgaaaagttgggagcggaagtatggtcatgccgtgcgccgtgcgaagaatgcggtcaaggaaacaggaagagaagtaggagggcaaacgcagagccctcaggtgaattattttactaagaaagatttataaatctcagtctttttgatcaatatttcagttttctaaagcagctcgtttcattataaatgatgaaacgggcttctttttatttcttgatctaggaccattatcttagttatcgatcaaattgactaatttcaacttcttcatccaatcgattatcctcaacagatttatcattaaaataaatgattcttctgtgaagtgttgatacacatagcatgacttctgcttttataaagagatagagaataggtaaatcgtcacggtagataattgtaaattctaaatttacctaatttacaaacgattatcattaaaagtatataaaaaaatcgtcgaactatgtaacattaaggagaaagatgacagaaggatgacatgagaggagattatgatgaagaaaataacaacagtacttgccgccgtggcgctaacgatctttactccaatggggttaccgacagaagaagtttccgctgctacatttggagatgtggtggtgaatgaacttgcgtggatggggacaacggttgattacaatgatgaatggatagagctttataataacacaggaagctcggtttctcttgagggttggaccttaacggctgttgatggaacgccttcgataccactaactggatccattccgactgatgaatactttgtacttgaaagaaccgatgatgccacactttcggaagtaaccgcgaatcaaatatatagcggggcgctcagcaattcaggagaaatacttgaattaagagatgctagtggtacattggttgatgaagtagatgcctggcatgcaggggataataccgctaaagcatcgatggcacgtctcgaacctgcaaatagtggaacggaaggttctagctgggccacggctactcatacatatgcggaaggactaggtacacctggtacagcaaacgcaactagtggctcacaaaccggtgcatgtcaagatacaaccgagcacctaaatcaggtttccgatgcaccagatgcaatcaatgtctattttaataagtgtgcgcttgatcaatatgcgtcaacaggaaatgaagcgaactacaatgtgaatctagaagatcgtttgctcaatcgcattaatgctgctgaggctagtattgattttgcaacctatgaaatcaatctaccaaaagtggtggatgccctgattgcgaaagcagcagagggtgtcgatgttcgcgtcattgctgatgccaaagatgcaacggatcctcattatattgaacgatttgagttaatgaggctatacgtggaagagatggtgcggggtaaagatggaatggttggaacagcggatgacataactgttttctctgactctcctatgctagcagtagaagatcagacgaagcgagcagatcacaacttaccagcatttccgaacgatttcccagaaagaacaattatgatcggaaatacggaaatgacagggtatgttttcgttgaagcggaacagcaatccgatggaagttattattctcctggcactcaaatgcacaataaatttgcactcatagatgataaatgggtgtttacaggaagctggaattttaccgtaacgggtctttatggctcagatgaaaacatgacaaacggggtattagatgggaatcagcagcacgtcgttgaagtgaattcttctgaactagcaggaatctatgaaacggaatttaacgagatgtggggaagtcacacacagaatcccaatgttgaacaggctgactttagctctcgtaaaatcgataacaccgctcatgaggtgacgatcggtggaaaaacggtcgaggtatttttctcaccaggagatgatgcggttggacgcatggcggagcttgtgaaaacagaagcagacctcagcacgtacttcacgatttttgcctggagcgaccaggcacttgtaaacgaattaaaaaacaaatgggaaggttcttatgtcgatcagcagggaacactcacaggctttgatgtgaaaggcgtatatgacagctcattctggaaccagtggtggtctgctagcatcgagatgacgggacgcaccgcaacaggtagcacaaacaatccgaatactcgctgggccaatgttgcaccggtttataaggatgctgaatctcgcaaacttcatagtaaaacaatgatcatcgacgccgatacaacgagtgatccaaccgtcatcgttggttcaacaaactggagcacgaacggcaatgatgtgaatgacgagaaccttataattattcatgatacagacatcacaaatcaatttgtgcaggaatttaatgcgcgctacacggatgcaggtggtatggtgcagtaagctgatttaaaagtgtatttacggatttcgaattaaacgaacgcataaacggaagtagattaacaagcctgtgaggacctagattatcaaattgatgatctaggtctctttcatttctagcttccaaatttagcaatcggaattgcacactgaaatgaaatatagagaacagaagaaattagccatcattatttctagcgacagagccaggtgccaacactgcattcaacaaggctaacgtagcagatgctcgtataaatccgtctcttacttttacagatatccttaaagcgtatgacatcatcccagacgaaaaacacatcgaaaaccgatttaacgctttgaaaaggtttacgctataggaaggtagggaaactttcctatatcaaaatcgctttatcttgttaaagcggtacttaaggataaaggatggttaaatgaacagaaaagcttacttaatggaaacccttttaaacggtgaatattcaggaccttcacgtcaaccaattacgtctgtcgtgtatgattcacgcgatgtcgaagagggtgctgctttcgtctgtatttcgggtgagaagatggatggtcacctttttatcgagcaagcgattcaacttggggcaagaacaatcgtgggtacggatcatgagaaaatcgctacagcctcggccataaatcgagaggtgagtttcctttacgttcaagatagccgacaagcgttagctgagcttgcgagggtcgtttatgattttccttcagaatctctctatacgattggcgtcactggaacaaatggaaaaacaaccgtttcttcgtttacctacaatctcttaaatcatctttctttccgaactggcttaattgggacggctgggatttgggatgatgaggagaaaacaacgtttaagcaaaccgttccgacaacgccagaggctccggatattcatcgggtgctagattatttccgtagaagtgagatgaaggcagctgtcattgaatcaacatccattgccattgaacagaagcgtttagtaggcattcactttgatgtggcagttcatacaaacttaactcccgaacatttagaatttcacggaacgatggaagcgtataaagaagcgaagttaaaattgtttgatcaagcgaaacgagcggttgtgaatatagatgacccggccatgtcaggggacatcattgagcgttttcaagggccgcttatcacctatagtttgtcggagttaggtgacatacgtgctgatcatattcaaacttccattagaggaacatcgtttacgctatatgcgtttaacaaagtttacaacgtgaaggcaccgattattggggagtacaatgtggcgaaccttcttgctgccatcgcaacgtgctaccaagtagggttttcaatcgaagaaattctgtctgtggtcgttcatatccaggcacctgaaggccgttttcaagttgtcgaaaatgaggcaccatttcaaattgttcttgactatgctcatacgccggatgcgctcgtaaccgttcttgaagcggttcgtcacgtaccctacaggaaactgattgtgatgataaccggcattgggcttcgaaatcctgaaaagcgtccgatgatggctcaggttgcggatggaatggcagatgaaatcatcgtcagcgtggatcaaacaggattcgccgatcgacaagaagtcgtaaatgacgttctgaaagggttccaccatccatctgctccccatattcattcacggcttcatcgcgaggaggccatacatcacgcctttgatctagctgaaccgggagacgttgtgctcttaactggaattggttttggaggttaccaaatcattggggatgagcgcgttccttattcagaattagaagtgattgacgattattttgaaaatggttcgttagacgttcagcaaataaaaaaaccgtgttaagtacgttataagtatgttcgttcctgcgacttccgctaggaccgttcatgctttttttgtccgaatttaccttcttttctactaaaagaaaaagggtgatttcttaaggagggtaggaatcggcttcactgatcaagaaactaatggagtaaggtccgattggttataacagcatcgcagtcctttctaggacacagacccagatcgaatcttgtctagcttcaaactttgagaaggtaagaaaaggagagatactgtggaacagtttgctgtttttcgtacacctcaaacgattctctatggaagagattcgtttcaacaagttggcgcggaagccgttttgcgtggaaagaaagcgctcattgtgagtgatcatgtgatgatgaacctcggatatgtgactgaatgtcagaagctcttgaagcaagcaggagtagcgagtgaatgttacacgggtgttgaatctgaaccgacggacgaatatgtttctgaagcgctcgtgcatcttcgtcaaacgagctgtgagatggtcatttcacttggcggaggaagctgtatcgacacggcgaaagccattgtggtccttgcgacaaatggagggtacataggtgactatcgcgcaaatagaacgaaggctgtgaatgctccgcttccgcatctcgctatacctacaacggcaggaacgggatctgaagcaacggacgtaacagtaattacgaatacaacgactcaggtaaaaatgatgatcaagcagccggcgtttatgccaacagtagcgatcgtagatccacgtctttctgtttcgtctccaccccatgtcaccgcagcaacagggattgatgcgctcagtcatgcgatagaagcgtatttatcaaaaaaagctcatccgatgacagatacgtttgctttatcagctatgaagcatcttatcgatcgaattgaaaccgcttacagtgatgggggaaatatagaggcacgggaggcgatgagtttaggcgcccttcaagcgggaatggcttttactaatgcatcggtctgtcttgtccacgggatgtcacgtccgatcggagcgctcttccacgtgccgcatggctattcgaatgcgatgttacttcctgcggttctcgactatagcaaagcttcctgtacggatcgtcttgctgatctcggacgtttgtttcagccggagatccaatcgaatgaagaagcggccggcgttgcggtagtatctgtgaaaaggctctgcgcgtccttgaacgttcccaatttaaaagagtggggaattgatgagacggcgtttaaccaggcggtgagtaaaatggcagccgatgcgttagatagtggaagtccggcgcaaaatccacgcttaccgacacaggctgaattagaggaattatataaacttagctataactatcagtttacaactgaagcaaaaatacgataacgcgagtagacggaaggagaatgtaaaatggcaacgacggcaacgaacgtgctacaaaactatattaacggcaaatgggtagatgccaaaaccacgcagtttcaaacggtaccaaatccagccacgggggaagaactcgcacaggttcccatttccacgaaggaagacctggatgatgcggttaacgtagcgaagacggccttcaaaacgtggagcaaaacgcctgtaccaagaagggcacgtattctttttaagtatcaacaacttctcgtcgacaactgggacgagctggcgcagctgttaacgaaggaaaatggtaaaagctttaaagaagcacagggtgaagtgcagcgcggcatcgaatgcgtcgagtttgctgccggtgcaccttctttaatgatgggaaaacagcttccagatattgcgacaaaccttgaatcgggcatgtatcgctatcctgttggtgtagttggcggcatcacgccctttaatttcccgatgatggtcccttgctggatgtttcctcttgcgatcgcgatggggaacacgttcgtgttgaagccatcagagcgaacgccgctacttgcgaaccgtctagcagagctatttaaagaagcaggcttacctgatggcgtgctgaatattgttcacggtgcacatgatgtggtcaatgggttactagagcataaagatgtgcccgcgatttcctttgtgggctcacagcctgtcgcagaatacgtctacaaaacaggagcggcgcacgggaaacgcgttcaagcgctagcaggtgcaaagaatcactcgattgttatggccgacgctgatctcgatgctgcagtaaaagaaattatcgcagcctcctacggatctgcaggtgaacgatgcatggcgtgctctgtcgttgtcgcagtcgatgacgtcgtcgagccgctccttcaaaagctgaacgaaaaagcggatgaaattaagattggcaacggtcttgatgaagatgtgttcctaggtccagtcattcgaaaggagcataaagaaagaacggaaaattatattcgaaaaggacaggaagaaggcgcaactctcgtccgagacggtcgaaatgatgaagcttacaatgaggaaggctactttattggaccaacgattttcgatcacgtgaactcttctatgcaaatttggaaagatgaaattttcgctcctgtgctatcgattgtcagagtgaagaatctagaagaagcgattgaactgaccaatgaatctgactttggtaacggcgcctgcctgtttacaaaggatggtagcaacgtacgctactttagagaaaacattgaagtcggcatgctcggggtaaacattggagtgccagccccaatggcgttcttcccattctcaggttggaaaaattccttctacggggatcttcatgcgaatggctctgatggggtcgagttctatacgagaagaaagatgttaacggctaggtggtgatcgaaaagttcgaaaggtaataacccaaaaggtgtagagaggagtcctctctacaccttttggcatctaatcagcttatcaaaagcggtgtaaattgttttccaataaagaaggaaataaataggtaataatgaaacattggaagtgtttgtttcgtaatactaattatgatagcgaaagtgataaatgttcaactggtctgtgcagaaactatttcattgagttaagattttgtttctagaatcatgttttcacgagacgtgtagtttgtaaatgaataatagtctcattatccagttgtgctaaaagtgaaacggtgtaagaaagagtttgcatcatctacatctcaaaacaatgagtttttgacgtatgtgtagcttatttatcataaaatgatctgctcttaattgattttaaaagattgagttattcagaattatttgaaataattggaattaacgagttaactgttaatctcgaatgcttgcttactaaatttctgtaaagagcaattttaggaataactaattggtggtaagggggcgacgatttttggtaagtgaaaggttctcaaaattggatagatggcgagcaaaatttggcgtgttagctattgccctgagctgtcttctaacggctattaactcctggggacagaattggattcttacgagtgttttaggtttaggtgcacttgtttgtgggataatcgggttctttgacatgaagagaaccaatgagaaagaacatacaagttagaaatatcatattggattcctcattaacccatcgtgaagcgtttgcgtaataaaataatctcgaatgaaactaggtagatttaagaggggaatggagacaatgtttttatcgtatttattagtgtttgttctggctgcaattccattatttgaacttgttgctgtcatcccattagcgatcatgggggggctgtcgccagtactgacgggtgtatttgcttttctaggaaatgccctgacagtcgttctgttaatcgtatttgtagataaattaaaaatttggatgagaaaacgaaaacaaaagcgtaggagggatgtgacgcaagagaggggcgagacgacagaagatcatgtcgaagaaatacaagagtcgaaaaaagagaagcgagcaagagttctttttgataagtatggtttacctggattaacgatcatcggtccttttttcgtcggatcgcatatctcagcgtttatggggatgagcttcggttcgaaaagaaagatggtaacgagctggatgatgaccagcttagttctttggacagtgattatggctgtagcctcaagctatggagttacgttttttgtacctgatgttgaagatgatggcgttttagttcgtttgtttaataactagcattctactatcattaacgtcttggttattaaatgtaaattaaacttgaactgaataattgtagctaaggttcggctattgagataggctagtgaccgagagctacatcttttacataagtaaaggcacctattgacataaaaggcccttggggaaagattcggcgtagttgtccagcgctaagatcttttcgttgggcttttttattagttgaggctttatgacaaaagcaggataaaggcaggaacttaatagataggatattcgtatagtttttaagagagatttgttggaggaggatgataccgtgttgttggataaacctaaatgcacttattgtgaaaaagaaatcaaagaagaagaggaagtttatgttaagatgcgttatcctaagcgaaaaggttttacagaaatcaaggcgtatttgagaaattggggtaaatttatatgtgaggactgctttagtaataataagaattgatcctataggattagccgtttgttaacgagctacatacaaatagttaatttggtctgatagagtgaccggcctttcatttttctaggttagtctggaagtagagtgatcctattttaaaaaaagcaagagtccccgtataaagggacctaacactaatataaaggttgtgggttacaaggtggaaatccgttaatatcctgaatcatgtaaaaatcatattgttttaaggcgaactgtgcttgatacaaatattccatgacaaggagctttccttcagatgtcccgcacaaaatacctgatgttccttgtccatttgtaaatgaaatcccaataggataaccaattaaatttcgaattttttgctgccatggcatatttatcactctccttcatactcatcgtattgaatgcgtaaaaataggtgcctgtttctttggttgtgtgagaactgagaaaacgatcacctcgtagctttttaagagtagaggagcgttactgaataaaaggggaaccgaactcattttttaacgaggttcccttttcgccctataataaagtctcgtatatccgtgattgagtctgttcttttcgtggtgcaccgcaaacaagatgaaattcattcgaccaggcacacctctgccccgttttgcaatagattaaagcgaagggggcagatcggtgtgagcgatcactatttaggaattatccttcctaaatcaacatatgaagcgatgcctggactacagggaggcacgcgtagcatgttcttgatttgggagaaagcagcgagaaaacatggtcttattccttgttattttcggttctttgatattcaggcaggcgtaggtacggtgaaagcctatgtgtacgataacgaaacgtttcatcttcaagaagttccagcgcccaaagtcatttacacgcgcgtgctcgattacttgccagcttatcgttctcatctgaaaaccttaatgaaggaagggcacttgatctacaatgtgccaaattatgatgtggagaagcataaggttcacgacctcctagccaaaaacgagagtgtgaaagaccatctgccagaaacagagctgtttaccgtggcgaacttaaataaaatggctgctcgttacaatcagctcattcttaaaaaaagctacggagaattaggtatgggagcaatgaaagttgaacgtgtgaagaaaggatggagtctttcttataaaacaaaggaaggtgagttaaagcaagttgatttcacaacgaagctgccaactgtgctcatcaaccgcctacgcaagcatacgtacttaatccaagaaatgattccgcttgctgattataaagggcatccgtttgatttacgcgttgcgacacaaaagaatcaaaacggagagtggcaggtatctggggtcatgtgcaaagtggcgaatgggggagactttctaacaaacggggcacaggggggaacgacctacacgttcgaagcggttgccactcactcccatccaaccattccttatgaaacgcttgtacaccgaatcgagcagctagctctcaaaatcgctcgtgtacttgatcaacattttcctcggctcgctgatctcggcttcgatatcgggatcacaaaagaaggaaagccgtattttatagagtgtaattttatctctgactacgtgagcggattgtttgaagatggccggatcattcacgacgagtgggaagcggtgtttcagacgccgattgcgtatgggagatacttgatggatcgattttagatagaacaaaaaggactggcggggtctagttctgttttcgtattaaaaaattcaaatcacacatcaaatggagcaccgaatctcaatgattatggcgctcttatttgtgatttaacgattagtaatggttcgggattgaaataggtgtggtgaaatataggtgatgtttattcagttgaagggcagttttttggaagattctcagttacgaaataacttggtaaaaggcattttatatttaatgtcagggttattcatactaggtccattacctttttagtacatgacataaagtagttaagtattagaccacttaagcaaacgattaataaagtgccaacgccaattggtcctttaaaaatcaaagccattattaagaatattaagtaaatcaatgatctcgagaaaaatatatttgttctagttaattcttgtatgattaacattaatcggtcaacagggatcggtgccaaatttgtgtgtagatatattgcagtacctaatcctataatgaataagccgattccaaagtaaataactttgctgtaccatagttcaggtatgagcaaattttttaataaaaagagccacatatcgatactaatccccgtaataaatgctgttaacaaccccaaaacttctggtttttgtcgctttaaaagtgaattacaccctattaaaataaaagcaatgataatttcccaagttcctacagtaaaacctacacgtatagccagtcctactaaaagtgcgtcaaaaggggaagtcccaaggtcagattggatagtgagagaaatgccgagcgttaataacaaaattccgaatacataaaagaaaagcttcacacaaatctactccttcatttgttcttttgttgcaattacaactaaattaagttaatttaagtatatggtgttaaatgttgcatttgcaacaaaaatgtataatagggagtttaatatgaaggaaatactacgtgaaattggaatgatagcaagagcattagattcaataagtaatatagaatttaaagaatatgatctcacgagaggccagtatttatatcttgtgcgaatctgtgaaagcccgggaattattcaagagaaggtggctgagctcataaaagtagatcgtactacagcagcccgctctattaagaaacttgaaatgaacggctttattgtgaagaaagaagacgaacataacaaaaaaataaaaaagctatttccaacagagaaagggaaaaaagtttttccttttattaaaagagaaaatgattattcaaatgttgttgccttagaggggttatccgaagaagaaatagaaacccttttcgaacttcttcaaactgtaaggagaaatatagaaaaagactgggaatttgttaaaaaaggaaacaagagaagttattgagtagagaggagtaaaagatttaaatgaatataaatttgagaaagtgtactttggaagattcgcaaaaacttcaagaaattggttatgaaacatttaaggagacttttgaggatcagaattcttcagaaaatatgaaggcttatttggaagaggcttttaacataaatcaagtagaaaatgagttatccaatccttcatcgcatttcttttttgtttcttttaatgatgaggtcgctggatatataaaggttaatactgggaatgcccagactgaagaaatggatgatgacgcccttgagatcgagcggatttatattattaataaatttcaaaagcttggacttggtaaatacctgtacaataaagcgatggacattgctttagaaggtaataaaaaaaggatctggctaggcgtatgggaaaagaatgaaaatgcaatttctttttataagaaaatggggtttgtgcaaactggagctcactctttttatatgggggattaagaacaaactgatttaataatgaccaaaagccttagataactttttagaagggtggatgattatgtatatacctaaacattttaatattgatgaagaagaagtaatttatgattttatcgaaaaacatggatttgcaaccttattttctcagcataaaggagaaccctgcgctactcatcttccactaatgttcaataaatctgaaaatgcattatatggtcattttgcacgtgaaaacggacagtggaaagatattgaaaaacaacaagtccttgcggtttttcaaggtccccactgttacatttcaccaacttggtatgaaacaactaaagcagtacctacttggaattatgtatctatccatttatatggaaaggtcgaattcgttgaagataggaaggttatattcgattctttgaatgacttggtaactaaatatgaaactcctgatagtacatacaatttaaatgatattgaacctagtttcattgcaggaatgagtaaaggaattgtggcgttcagaatcaaaattacaaaagttgaagcaaaagctaaattaagtcaaaatcattctgaggaacggcaaaaattaattattaagcaccttgaaaaagcttctcaacaggataatgtacaaatagcatcgctgatgaagaaaaatttgtagtaattcaaatgaagatattccttaaataagtggttaactgaaacagggatatattttgaatttatatcttcaacatcttaatacaagaagactgtaggatttcattatattttcgctccatttcaagtttttgttaggttgtgatacattattgaacatttcacagatattaagccatttgctaagtatataaagaaggaagtcgccaactttaaacgacttccaattaattaactattctcggacttattatgatgcaatggtggtgggactaaccatcctttttctttattgagttttaaagatttaccacctaatgtagctttttgaatgtgaaattgcccaaacatcattgcaatgtcttctcgtatcgattgacccataatttggctacaagtaacaagacctgctgcaatatctttggagagggaagctgctatctcagggtcttgaattcgtgcaccagctggaatatcttccaaggaagcctttggtcgatcgggtggggtaggtggtaaaccaattccattctctttaagaagagtttccacctgtttcacttcttgttgtccaccagtgatcgcttcttccagaagcttgtgtaagtcgctgtcaccagtatgatttaatgaagtttgataaccagcaaccaatccctttgtagtaagcacaaaagtccagagactaaaaacttctccgtaatgcataggctcatctgttggatttccacttaaaatacccatactaatcctcctaaataaattcatttagtgccacctttctttcgagcaccattttataatttacaacagaagatctttttattccgatttaggagaaataatactgtttaatcttattattgataggattctaatacaaagtttagtgaggttttgaggactttccctatttgttttctggtaatgtgattaaccattcctactgtaagcgcttgggtggttcaatattgtgagtttttgtagctacttctgtaaatatatcttcttgctgatttgtattttgagttttagcatttgaagctataatagggtttaataattgaataatctgttgaacactttgctggagctgatctatttctttttttgttgctggttgtgaatcaggctttaattcatatccaacttgtccattcggttctagcgtggcccatttaacattttcaattgaagttacattttgttgtcttaatttcatttcaagttgatcaacggtgaatcttaattttcttaagtttttttcattcaatgttccattttcaaccaatatttttgatttgccagtaataaatttttctattccatcagattttaattgagcgtattccatcactattaaggttattactaacatcgttcccactgcaagtgtcgtccaaatattttttcctgctaaaggttgtattaataatgatccaattccaatcatgataactgtttgcgcaagtgtcatttgagaaattgattttctaccagcaattcttaacaaaagtgttccaccaactacaattacgatagccttccaaatccagtctaaatccaatagtaacatcctttctattttaactagcttaagtttatttaaagattaattattcttatttagtatttatgcagaagcatataagctgacaatctttgttcaggtagttaaagttttatgtcttatacttctgttatattatcttcaagaaactaccgccatatgtaaaaggttagtattaatgtatccaaagagaaatatttaattagtaaacttttctgctgattcaacagtttataagaggttaggcatttcacttggttatggaggcaatacaaaccactaaatttaaggtgaaagtggcatggtttaataaagcattttatacatttttcacttgcaaaatacaataataaacttctttttaattcttacctgccatataaattcaattagaaggagggattaaaataaacaattatagaactagtgctatttttgaacataagttctggctacaagtactcggggatcatgctagatttattcgagattcgctttacccatctgaaaaagagaaaataaaagaagctaaagaatttgtattcatattcgataaatacttaaatgctgttcttgaaggtgaaattaacgatttttctcctttttcccttgaaatcgaaggtgttgtaaagaagcttcgtgaatacaagctatccctaattaggcatcaactacaaggaaaggtcggtattcatctgcctccaaccttcattaaccatatggttaatgaattagatgaatatgtgcttgtaattaactatttgaaaaaaggtcaaattcctccaatctttcatgagctacatcatcacatgctttggctccttgatgctagcggacatgcgggcgccataaatgacagtttagacggggtggaaaaaagattaaaagaaaagagtagagaatttaccaaacactttgaacaattttacttaaaggctgtagaacttacaggatacttacgaacgaatctacatgaattccctgctcttcatcgctataataatgatgttgaagtagagatgcggttatttagaggatttcttcaagaactagaagaaatggagctaactgaaaaagtgttgagcactttctctggattaatggctgaccatatggcaagggaagaatgctactatttgtataaattagcagagtctacgaaagggaattttccagattgtgatccaggtaaacctcggactgaggatcctttctagtatgaaacttaaaatgatttttataacaaagaaggctatgcttataaaagcaaaagccttctttgtttagtttttggagagatgttaagaacttatctgtaaattcctaatttgaaccttctacagcattatcaccgttgtatttcttcatgtactcttccgccaaggaatttaccaggctacgcccacgcatttaccaatagaagtatgtcaacgttttgaagtaaaaaagcctaatcctccttatctttaccgaggaactaggcatagatttccacaatcacactaattatggattattattcctatagtttcgttgtactgaataactttcttttgtttgttattcttcttcaaaataagcaacttcgatatataataaattccattatccaataatatgacaaataaatatttcttcagcatttctgccttttactgtttaatttacgaactagcttcaaattaactaaaagaataagaaatataaatggatatagtatagccgaataccaaagtttccaagtagtgtaataaaagaagcttgtttgtaatgaaatccactcaaaagttactgaaaataaagaccatactaatatgtaaagtgtttttgactttatattttttgttaagggaaagtaatttaagaataatatgtttatggatgggtagataagaagttgtcccagaactcctaaataattaataccttccgtaataaagccatacatattatatttaatatctaaaaatgcgtccacagttcttccaaaagatatggcaaaaaatgaagtagcataaatttcgatctttgttaatcttttaggtattagaaccgctattatgttaaataaaatgagacatccaaatatgaaaatcaccaattataccgcctttgtttagctatagttagtgccattacttcatctcatttatttttacatcaaaaatattcaacagagttattataataacaattgatataccccatgctaataatggtcttttttgatgaataggcaaaattaaaaatataatccctgtaaataatgtagaccaccaaatattccaaccatgatgataagtgataaagcctaatttactatttatgtactcaatagatataaatattccaaaccacaacaaaaaccaaaaaaaacgctttttccatttttcaggaaaccttcccagataaattaatacagttgcagaataagaaacagtcatagctaaaattgtaatcagggtatgattaggtaagattaaatcatgaaacagccacatagattcattatagagtagcaaattatatagaaaatctccgattataaaaaaaaggattgttggataataacttttccagtttttccaatctccccatataaatcccgctataagatataacgtattaattaaaatgtacatttaatcactccgtcggatagatagatgtattatttatcctttcccaaaagagactgttttaatattgactataatcgcttttatcaacatttaataagctatctccaactactaatcagcttcgtttaccttaagtacattttttcacaaaggtcacctgaacaatgaagatctttgctgcacagtatcggtctactacgtaatacaatggttaatctatgtagtggtaaacagtctgtcattctgtggtacacttcttgtcattaggtggtaaatactatatcagaggtggtacatttcaatggctgtaatcacaataggcgttttacatctctagtaagtcctatagtgccttttcacatacatcaacacctaaagaaagccctgaaacaggtagaataaaatataaccatttggacgaataggtttgggtttcacaccatgatagattataaattatcaatcaaaaacgatctaatttctcttaacttacgggagatcagtcatttttcgttattttttcgtactacattgtgaaaagattaaatgaaagggaagaggcaaatggagcgccccttcccttatcattattctatcctttcgccaaatctttacggttgggtgccattggtggcttctctagccaccctttcttaatcatcaactctgaaccctctgcagcatactcgcccacttccgccatcattcgtacatacgcccctgctatatctcttctaggagacgcccctatacttgatccataatagccaattgaagagctgtttaaagctgtaatatgtagcatcatcagtttatctgagaatggagataccgttgactcggttggcatggcatcggatgtacttggagtcattagattgctttcatctagaaatttagatacaaccttactatgatgggctgctatttcagcgccacggaccatataattacggaccttcttatcattggttacttggctaaatcctgtgattaagcccctccctaggacatttcgctgcagattaaaaaacaaaaaggaggtttctacagtagataacggacgtttctcccccaaccagccggctaaaaattgcttactatgaatgaattcgacctgctgaggatacgggatatatggaggacggataaaaagccctttattctgcataacttccgttgctcggttaaaaagttctgaagatgactgtatgcagtgcgtataataatctcgaatatcttttctggcggagttagataatgcgatactgtaaagatttaaacctatcgcacccatctgctggatatataaaagcataaatgggtttgaaaaaagacgtggcgcttgtaaattaacatcttgttcaccgaaaccttgtgggacaggaagcttttctttatggaaaatattcgttaaaacttcaatatgattttcagccaattctaacccataagctaatacagcccctatatcctcatcatccgttgtttctaagagatacgatatcgtacattttccaagcgtatcattttgataagatccccaaattgatgataattctgcagatgtcaaatttgggttatgattgatttccatgggaatccctccgttctcagatactataattttgcccaataaaagtgattttatgttttactagttaaataaggagagcacaatctttatccaacttctatagtaacaagcccagtcatgttgtgacctatccacatcttcctaacgattactcttccagatccaggcaatgggagggctctttcacagctaaataattaggagactaatgtgttttttaaataacatcgatgttctctttttttttaaaatgtgaggaaaaaagataaaattcacattacttttaggtactgatcgatttgcaacagctacaaaagtaaaaaatatgattcgatataatgctaaataaaaggagcatttcttttaagaatatgctccactttcatttgaactaaattcggatccaggtatacctcgtacatacgggctacgccattcattgctatactgtaagctgtgaggtcatctgatgaatttaaggaacttcttgaactctgacgaccttcgctgcactagggattattgatataaatcctgacttgaaccttctacagcattatcaccgttgtatttcttcatatactcttgaattcttgcctggtcttccggaactacttgatacaaagaacctattttatctatttcttccttagcagctggagtgagtggatagtacccttttgtgaccatatactgccacgcttcataagcatgggaacagctcatcataaaggcggtttgaagaaaagaacgtaattctggatttgcggtttccattgctgcccaggcatattcgcgtccagctcttttcaatgtgagtaaatatgcagtagccatttcatggtcattcatgtcttgaacagtcgttcttggttgaacagtgaccatctttgaaactggggaagtcgtaaaactttctagaaatttaccatcttccttaaacaatggaagttccttagttgccccctcagctttatttaaaaattcaactttcatgttgtaatctctaatgtgaaatggaaaatgacgctctaataaacttttgagctcttgatcttgaacatggtctatcatgtaggccatagatgttattgagttaacacagctcattgtcagctcatttaaatcatatagctcatgtgatgcaaattccattgaattacctcctgtttatttttgaccttagctaggatgccgagcaaagaatttctttattcatttattgatgataaaggaaaaatatctttaaaaaatctaacatggtgtgttttgatgagagttttgccattagaatcagtggatggcgcttattgaagaattagagcaaactcaatgggggtgtacaaattacatttaatcaagtgtacgaaaaacaggaagtgtcttattcatttataaatttctcagaatgtgaagacagcagggaaggacggacatgtaaatcaaaatatcggtgatcaatatattgagtacagtttaagaaatttaatattgaatgtatcatttgaagtcaagggtattccaaaagctatgaatagtgtaaaacacagataatctcttattaactttaaggttattttgatatgagtctttaagaaactcggatcaatagctgaggaagcaaattaatgaaaaaaggtaggaggttccttgggcagtgcgactataagggaaggtttttgaagggagatcaatgtccattcttttgattcaaagcttaacaatatctatcataataagttttatctaaggaaagaataaaatctttttggtactcaagcttcaaagatcaatcttcagtaatctcggaactaatcttgaacaatggttggttccctcttctactgcagatatgaacaggtaaattgaggagcgttgtttaacttgtgctcaataatgtggactttattgagcttatttgttagtgataagaaaacggaatgagcgacacaaggaacaaatgtttgttttttacacttggctacgggggtacttatgaaaactcactattatttaggttggtttaacaatttctttccagaaactctgggcaggttgatacaggaggatataactgatagaaaatcgattgctatgattagctcgaatccatttatttatgaagatgatggtgctactgaacgctcctggcttgaccaggctggcattatgtttaatgaatatcatttaattaattatcgcgtacagaagaaagaagcccaaaagaaaattaaaaatgcttcagtcatttttttgttgggtggaaatatcctggaacaaaattgttttttgatggaatatgaattatctgcttttataaaagaaagcagcgcagttgtgatgggagcaagcgctggtgcaatcaacatgtccgctaaatggttatactcgaaaacctttggatatgaagttgaaaagagctctgtttacaacggaatcggtcttgacaatttttccgtcctgtctcattttgatcttgaaaataatattgcaatggttcaaagtgaactttctcacctatcggaagaaataaatatttatgcatcgaacaaagattgcgctatacgtgtaaagggaaacaaaattgacgtttttggcactgtttttttaatttcccactcaaagattcggaaattggatgagacgctctaatagtagtgaatgactatggctttaaggcttatattttaaacttattgaatgaaaacgatgtaaaataggatcgtcatcaaagcatagatgtacagataggtctactgcaatcgggcacgagtgttgaatgtgcgtctcttttttcttcttaaactatctcggagcgattgtgtaaaagagtaattctttattgataaagagttaggtaggattattagaacgatgttaggaatggtttaatgatctgtcaattttttagttattttattatcttttttctgattgcaaggcttactagcttactaagtaggttaaagtggttgccattttaatatagaattattcgtgaaaaaaaggactccatttgggagcccttttttgtttattattcagtggtaaataaatctttggtttgaagcgttaaggaagtggtttctttgcttccatttcgataatatgtcacctttactttttcacctgatttcgtttggcgataaagatactctcgcaaatcaacgctagagctgatgttttgctcgtcaatcgatacaatcacatcttttgcctttagaccggctttatctgctggtccattgttcgctacttctcgaatgataatcccatttttcacgtctgctgggaggttaattctttgttctaattgagcatgttgaaattcagcgacattgattaatgagattcccagatacggacgatctacctgtccttttttctcaagttgttcaataattggaagtgctacattcgaaggaatggcaaaaccaattccttccacggacgtttgagcaattttagacgaattgatcccgatgacctctccatttgcatttaataatggtcccccactattccctgggttaatagacgcatccgtttgaagaacgcgtgcttcccaatctggttgtttatctttgttgatgtcgaccggcatagattcattcacatttgaaataataccctttgtgacagaaccttcaagaaaccctaatggatttccaacagcaatggcggtttgtccaatctgtaaatttgaagagtctcccaacttcaccgtttctttgacgttatcactatcaatacggagaacggcaagatctaaaagagggtcactgccaagaagggttgcttcttcggtttttcctccaggtaaattcacctcgattttttctgcaccttctactacatggtggtttgttgcaacatacgcgtttccattctcttttttataaacaaaacctgatccagttccggctttttgtaaggaagtttctccttcaagaaatggttgttccttcgatgcttgcttattaacgacgctcaccacagcctcatcaacacgatcaatcaattgagtaatgtcctgagctgaggagtctgatgatgaggtttcactggcggatactttcgtggattgaacgggttctttttcatcaaacacgtttaaaattcctagtaaaatcaatccacctagtaacacaccaagaaaactagaagatatccagagaatgaactgtctttttgcaggattgtcttttgggttttccatcgttactacatcctttctattgttactctagacaccattaccccattctgtcttaatagtaactgtattaacacatttgtaatgtttgtgaaaaacattggacatttgtgtaataaagaatgattcatgttaggatgagttcattgttaaaactgtagtaaaggggaaggtcgttttgaaaaaacagaatcagcataagcctactacacaaaaacaagttacggctcttcgattaaatattatgtttctctgcgtctttcttttattttcccttctcattttacgcttgggaagcttgcaaattgtaaatggggaagagtatgtagaggaagcttctaagacggaagtgaaggtgaccgaatcatccgttcctcgagggaaaatgtatgatcggaagggacgcttgcttgttggaaacgaaccccaatatgcactaacttatacaagagaaaaatcaaatactgaaaaagagttgactcagactgcaacaaacttagcgagatatttgaatttagaggcagagaatgtttcaaaaacagagctaaaagagtactggttaaaaacaagagagaaacaggcaagtaaattaattgatcaacagaaaagagaagatctgaccaagaaagagattcaaaaccttgaaatggagagaattactgacgaacaacttagccatattactaatgaagaaaaagagattcttctcattaaaaaccgtatgttgtcagggtacttttattcgtctgctgttgttaaggaaaatctaacaaaggatgaaattgcgaaagtgagtgaacatctaggttccttacctggggttcacgtcaaagtcttagcaaaacgaacctatccttataatgaaacctttcgagatattttaggcaatactggtcccatttcaaagggaaatctggctaaatatcagtctttagggtatgaggcaacggataaggtgggaactagttttctagaagaagaatatgagaattggctgaaagggatcaagagtaagaaaaaattctcaacgggtgacgataacacatctcctgagttgataccgggggaacgtggaaacgatctggttttatcgattgatattgatttgcagaaaaaagcaaatgagattttaaaagaaaatctacaaaaaactgattctggtgcaacatctgcttatgcggtgatgatggatccaaataccggagaaatcttagccatggccggtcaaaaaagaaaaaatggcgagtacataaatcaggcatatggcaatttatataattcctatgaaatgggttcggctgtgaagggggcttccgttctaactgggatgaatgaggatgttatccagcctgggacacgcttttatgatacacccatcttaattccttctacgcctgagaagtcgtcttatgtcaatatgggatggattaatgatttggaagctttagagcgttcttccaatgtctacatgtttcgaacggctatgcaacttgctaactatgattacgaaccaaataaatccggtattccatgggaccgttcagcatatcaaaccattcgtaaaaactttgaacagtttggtttaggggtaaaaacaggtgtcgatttgcctaatgagtcgaacggctataatggtggtgtacagcgattgggtaatttaatggatttgatgattggtcagtttgatacctatacgccacttcaaatggctcaatatatatcaacgatcgcaaatgatgggcagcgcttaaagcctcatttgttaaaacgtgtgcatgagcctacgaataatgatcatctgtcttccagtgttctttatcagaaggttcctgaagttacgaaccaccttacgatgaaagacagcgagatcgaacgtgtccagcgtggtctgtacctcgtgatgaacgggaatcagggaaccgcaacagattactttaaagatacagactatgtaccagcagggaaaacaggtacggcagagataggagacggacaatataacctttctcttgttgggtatgccccatatcaaaaaccagaagtggcttttgcggtgattgttccggaagtcgataaagaggcagggataaataagtacattggtcgtgaattggtagatgcttattttgaacttaaagaaaaaagcagttaaccgatagtagagtaattctgaaagaaaaatgaaagaggggaaagcccttcataagatgaatgttgttttgtaggagtaattgacttgattaaacgaatgtttcgccaatatgatctcaccattattattgcaatgggctttttgcttacggtaggattactgatgatctatagtgctagttattatgcagctttacggtatgaagttccagctgattttttctttcagcgtcaacttctttccataaccattggactcgtcgccacgatcgtcaccatggtgatcccttataaatattacaaagcgctactaaagtacattatgctaggaacgattcttctcctatctttcgtattgatttatggagaggtatcgcataatgcgcagtcgtggattaatatatttggtctagaattccagccttcagaaatggcgaaaatcaccatcatactttacctttcttctgtgttttccaaaaagcagagatatataacgagtttgacaagggcgatttttcctccattagtttttgtttgtttgattgtttttctaattctgcttcaaccagacctaggaacagccgttattatcctatgcttagctggtcttatcactctttgttcaggaacaagctggaaaaacattttgtttttaataagccttgtcgttgtagccggtattttctcgaagtttttcttaagcgctgaacagctttctcgatttggggccgcctataatccttttcagaatccagaaggtggctaccaggtgattaattcttatatagccatcgcatccggtggcatttggggcaggggctttggaatgagtgctcagaaaatgggatacttgcctgaggcccacaccgattttattatggccattgtaggagaggaattaggctttatcggggtgtttttgatcattggcgccctgttttatctggtgtttcgtgggttattgcttggaataaaaaccaaagatagctttggcagtcttcttgcgattgggatctcttctttaattggcatccaagcatcggtcaatctgggagtcgtcacagggcttcttcctacgactggcattcccttcccatttattagctatggggggtcttctcttcttaccgtgatgatcggtatgggcattcttttaaatgtatctaaaatgcacaagattacaaatcaagggagcaggtcgagtgatgctatctagaaataaaaatggcccattacaaatcacgattaggtatagctggttagaaatatttcacaacaatctcggaaacattcttagagcagttggcgactgctctttttttgttggaaattgatagaagaggcatttttctttaatctttttaagtcaagaatgtgaaaggaaaggataggttataactaatttgctttctgcacagaaacttcataacttctgggtagtttaaagatatgggtagctctgagtgtgattgtaggttcacttattgaatcaatattagaaaaaataaagtgaatcaagttttgtgtataccgtatttataacggcgcttatcgggcgctcattaataaaagtgcaaacatggatgtcctcgttgcattaggaacatctgctgcctatttttatagtgtagtggaaggggttaggttactacttacacctgggtataatcctcagttgtattttgaaacaagtgcttccgtcgatcaagttgcgatggtatcaacgacgctccagcacttgcaaccgctgatatagggatggcgatcggtactggaacagatgttgcgatcgaaacagccgacgtgacgttagttggtggagatttagatcatataccaaaagccattaacttaagcagaaaaacgatgaaaaacattcgtcagaatttgttctgggcgttattctataattctattgggatcccgattgctgccattggtcttctggcaccatgggtcgctggtgcagcgatggctttcagttccgtatctgttgtgagtaactcacttcgattgaagcgagttaaaatataatttataccaatttgaagggagatttttaatatggaaagcacgactattattaacatcaaaggtatgacatgtaatcactgcaaaaacgccgttgaaacagctttaaatgaattagagggtgtttccggagtagaggttgatttgaaaaaagaaaaagctgatgtgtcatacgattcatctaaagtttcagtttcagacatgaatgaagcagtggaagagcaaggttatgacgttgtttaatttcaaaaggtagtggcaaggcaacaacgaaagagagcggggaaactcgctctctttcgttgttttaaaaatctgacaagggggtgtctggtgctaaaaagttggaaagaatactttctgatgtagcaagttaacttaccctcattcccatcaactatcaagaaactgtgcagaaataatgaaatttcatttatagaaaattttcacttcaaaagcgtttaatagaattactattaggcaacatatgatagtgtaaacaaactttaaggaggaatttgattatgtctcatgaaaaatatggatcggtaattgaaacgctacacgaatgtatgacggcttgtaaccattgttacgattcttgcttaaaagaagataatgttaagatgatggctgattgtattcgtcttgatcgtgaatgtgcagacatttgtgggtatcttgaacaagcattagtaagaggtacgcctttttcttctgaactagcccaagtttgtgcgactatttgtgaagcttgtggaaatgaatgtaagaaacatgatcataagcattgtcaggattgtgcagatgcttgctttaaatgcgctgaggcgtgcaagaagctagctgcttaatttagtattgaaatagtaaggttaagaagtccgttctactaatagaacgggctttttttattatttggttttttatactagttattaggtgattatatacggatgatgcacaatttctcgatataatcgtgataagatcactcataaaaggggtatgttatgcgatttaaaagaaaaaataaattggctacaaagttagggtttttatttcttacaagcatccttcttttagaaggaagtcttttcgctgttctttattttggattttttaatgtgcgggtgatggtggagacggatgccttggtcgcacgaagaaatagtcatagcgatgtgttagagaaacacttcgatcgtagtacaagagggcatgttgcatttgatggaatcagaagcagaaacacaggttgtaatcactgatgatcaatccaatattcttgaccattctaacgcgattacccctgcaatcagaaatacaatccagtcagctgatacaacacgaaatgatggtggaattgttgagggggattgggcaaaagcacctttcgtgtcaacggtatctcccgtgatggtaaatggagcgcctattgggtatgtttatatgtagggaaaaagtgaagccagcttttgaaaacaaaggaatctctctacttacatattgccagaaagatataaccattttggtagacccagagaggttttcgcaagtattgctaaatctcttggataatgcccttcattattcagaaagtggcaaagatgtacgcatagaagcagatcaaataaagaatcaattagaaatgcaaatcattgatgaaggagaaggcataccagaaaaagacctcccatttatatttgatcgccactatagagtagacaaatccagatcacgtaaatatgggggatcaggactaggacttgcaattgcaaaagacattatcgaaaagcataatggaacgatttctgtctcaagtgaagtaggaaagggcacatcgataaaaatcgtcattccgggagttgagtaacagatgaaacatgttttgattgttgatgatgaagaacggatggtggatttaatttctttatttttgactccacaaggatatactgtttctaaagctagcacaggtttagaggcgcttgatcaaatacaaaaagaccacatcgatctcgttttattagacgtcatgatgcctgaaatggatggttggacgacatgtaaagaaattcgaaaactctcgaaagttccaattatcatgttgacggctagggaccaatcgagtgaggtcgtaaaaggattaaagctaggtgcggatgattacattacaaaaccgttcgatgaggaagttcttcttgcaaggatcgaagcagtttcaaggagactgcatcaattggatgaggataccctggtggtcaatggattaatttgggagaagggcaagcatagggtatcttatcggggaaagacgttgtccaccacgccgattgaatttaatcttttaggactttttatgagaagccatgataaagttttcagcagagagcatctcattcagctaatctggggatatgagtctttcactgaaggccgtacgatcgattcgcatattcgaaaccttcgtgagaaatgtcgtcaagcgggttttgatattgatgcacatttaaagacggtgtggggagtcggttataagtggaaaaaatagggtgttctaaatgattcttgtttctaaaaatgaatgaaccgaatactacttagtagctgccgatccaggcagttttttttgaattcacatattcttgatacattcttgataattaatgggaacaactaatcacaatgggaatgaaaagtattgataaccagtaggaggaggttcttatggagcattcaaatcatgaacatcatcaagacgaatcgcataatgaacatagtggggagcatgatcatagctctcatcatgcacatatggtagaggattttaaaaaacgattttatatctcattacttgtaacgttgcccgttcttattctatctcctatgttacaagggtttgtaaacctcgacctaaggtttaccggggatatgtacattttatttgcgctatcaactttcatattcttttatggaggttggccatttctaacaggtgcctggagtgaactaaaagaaaagaatccaggaatgatgacgcttataggtctcgcaatcgttgtagcatacggctacagttctctaacagtattcgggttatcaggtaagaatttcttttgggaactcgcgacactaatcgatatcatgcttcttggacactggatcgagatgaaatcagttatgggtgcttcgaaggcattagaagaattggttaagctgatgccatctgaagcccatcgaatcaatgaagatggcgagattgaggatgttcctacatctgaattaaatgagggggaccatgttctcattaaaccaggtgaaaaggttcctgtagacggattgattgtaaaagggaagtcctccatcgatgaatcaatgttgaccggagaatcggttcctgttgaaaaagaaaaagaagatgaagtgatcggggcttccatcaacggtgaaggatcattaaccgtgaaggttgagaacacgggtgaagatagctatctatcacaagttgtcacgatggtaaaggaagcacaagaatctaaatcaaaaacacaaaatttttcagatcgtgcggctaaatggctgttctaccttgcgcttggtgcgggtataacgacgttgatcgtctggttggtactcggttatgactttgtttatgcgcttgaacgtatggtcacggtaatggtaattgcatgtcctcatgctttaggattggcagctccacttgttgttgcaaggtcgactgcgttatctgctaaaaaaggtctgcttataagaaaccgcgcaagcttcgaaggagcgcgtaacttagaagccgtagtatttgataagacgggtaccttaactgagggaaagtttggtgtcacggacgttgtaacagaaaacgaagatgaaaatcagatttttcaactggctgcttccattgaagcagagtctgagcaccctattgcgaggggtatcgtggaggaagctaagaatagaagtctgactcttaaggatgtagatgaatttagttccatcacaggtaaaggcctagaaggaacagttgatggcaaaaaagtgatggttgtgagtcctggctatatgaatgatgaggagatcgactatcacaaagaacgatacatggaactttctgaacaaggaaagacagttgtattcgttttagtagatggaaaattagaagggatgtttgcattagccgatatgattcgagacagtgctaaaaatgccatccaacaacttaagaacatgaatatatcttccattatgctgactggagataaccaacaggtggctgattgggtcgcaaatcaattagatttaaatgaagtatacgctgaggtactcccacacgaaaaagctgatcaaattatgaaagttaaaggaaaaggcttgaatgtggcaatgacaggtgatggagtgaatgatgcaccagctctagccaatgctgatctaggtattgcgattggagcgggaactgatgtagcgatggaaacagccgatattgtcttagtaaaaagcaatccagaagatgtggtttccattattgagctctcgaaagcaacgtataagaaaatgattcaaaatttgtggtgggcggcgggctacaatattattgccattccactcgctgcaggtattttatatccgataggggttgtactcagcccagcagtgggagcagttctaatgtctctaagtactgttattgtagcgattaatgcaaagttattaaaaggttagtcttaataaagggtgtataagaaggaaactatcttatttggggagtttcctttttaccttttgttaagaacaaaaggtacccgtcggcttatatatgtttttttacgatatgcacactatctgcaaacattatgggaacgagttgaaaagctggggtaacaaatgagggaaacgacgtgccgttttaacggcaagaaaaaaatatgagtttattaaaggaggagcctgtatgttaacacctgataataatcaactattcggagaaatcaaggatggggtaaaacattttgtactaacagcggagccagtaaagcaagaagtattggatggtatttatattgaagggtggggttataatggatcaatccctggacctactttagtagtgaatccaagagatgaggtatcaattagggtatacaacgaattgccagaagctacaagtgtacactggcatggaatggatattcacgaaaatgtggacgggggagtggaacttcaatcatctcctagtatagaaccaggagattatgttgattacaatttcaatatcaacaatccggcaggcacacacatgtaccatactcatgttaattcgatgaaacaattgatgatgggccttggtggaggattgatcattaaggaaaaagatgatgagatcaacgatgactacttcctgctcttacaagaattcgcagttaaaaatctcgaacatggagagttggagaaaggtacttatccgataaatccacattcccactcgtttaacttctacacgattaatggtcggtgctttcctgatttaagtcaccttcaaacaaagcatggtgaaaaggtgagaattcggtttggtagtttaggtcacggttcgcatcccatgcatattcacggacatcagtttgtcattgaaacgcaggatggtaatccacttccagaagcgatgaaaatgaaaagaaatagtattactctagcttcgggagaaacgtttgatttaatggtcaatgctaacaatcctggtacttggccgctccattgccattcgcctcatcatatgtccaataatggaagagaaggtcatggaggtatgatgacagctttagaatataaataatgtcatgtatttatagactgacaaccacattaaaacttgccatccttcaagggggatgacatgttttaaatctattctttatagtctcatttccagcactatcattttcgatgcaagaaaaggaacgatcattagtagaatttaattaaaatgattaagcaaatgacctgcatagcagaaaagtcgattccgtcaaggtcgagtgggtccagcgacggatgctatctgcgatgctcttgtgcgactgaattggaaaaggcttttttatataaattgttgctattaaatttatgtttttttggaaatgcatgaaatctgcataaagtaaggatatcaagctaagagaatattataggggtgagagtattgggagaatacaaagaaaatagtctatctttaattggagcaattggtttaggtactggagttatgatcagcgcaggaatttttgcgttacttggtcaagtggcagaactcgctggtatgtggtttccattgatctttatcgcaggaggaattgttactggatttagcgcttattcttatgtaaagatgagtaacgagtacccttctgcaggtgggattggaatgtttctcgttaaagcttatggaaaagggacattaactgcttcagcagctatgctgatggctgtttccatggtcattaatcagagtcttgttgcacggacatttggtacgtatacgcttcagatttttaacgttgaccaatcaaattatcttgttcctttgttaggtgtagggttattgcttttcgctttcttagtgaatatttcaggtaatagttttattcaaacatttacatcgatcgtatctcttttgaagataattggattagtaatttttgcgataggaggattatgggtagcaggattttcaatcactccagcagagggtggatccggtacgccagattcaacgatagctagcatgatcgctgccgttgcattaacaattctttcttttaaaggttttacaaccattaccaatagtggctctgaaatcgtaaagcctaagaaaaatgtgggacgagctattgtcgcttcaatcctgatcagtttactagtctatctggtcattgcttgggcagtatcaagtaatcttccgttaagtgaaattattaaagcgaaagattattccttagctgaggcagcgagaccagcctttggggagtatggtgtttggtttacagtcgcaatcgctattattgcaacgatctctggtataatcgcaagcgtttttgcggtctctcgaatgcttgcgatgttaacagatatgaagcttattccacataagcatttcggtatgccagggcgtattcaaaagcacactctggtctatacagtcgtactcgcaatggtgttagcagtcgcatttgatctgagtagaattgcttccgtaggggctattctatatctcgtgatggatatgatcgttcactggggagtcttaaagcatcttagtgaaaaggtaaatgcgaaatctgggattgtttggactgctttgattctcgatgccattgtattgcttgctttcatgtgggtgaaagctactactgactggttgattgtcgtagtttctgttttgtttatcatctttatttttattggagaacattttttcttgaagtacagacaagaagagtaattttactataaaaacattaaaggagcggattgaaatgatgaacggtggcggaatgggaggcatgggaggcggattctttggttttggcttcctctttctccttatcatcatagcaataattgttgtcgtcttctggatgaggaagcctggatcgaataataagtcaacttcaaatcacaattcaacggaaacgctgaaagaacgtttggcgaaaggtgaaattacagaagaagaatatgaccggttaaaaaggaaactaaataactaagttatagagacaggtttggtggagttcattcagtaaagagtgagctccctttttcggtctcgacattttctgcataattgctgggaatgatcatagaagataattggataagaggtgaagctagatgaaaagaaaagtaattggttcaatcgtaatcgttgttctactaattattggcggagtagttttcctcaattctcctttttatagtagtggggataagaccttaccagaggaggttaaacagggcgagatgagtattctagaagtgaatgcacagaagccagaggatcgacctgtcaaaaccttcaacctaactgccgaggagactgagtggaacattagtgaagataagcaaataaatgcctggacgtataatggaacggttcctggtaaacctttgcgtgttacggaaggagacttcattcgcataaatttaaagaacgaactagatgtgccagtcacgattcactggcatgggatgttacttcctaatgagatggacggtgttccaggtctcactcagaatgctgtgcagcctggaaaatcattcacatatgaatttattgcgaatgatgccggaacgtactggtaccattctcatcagcatagttccaagcaggtagataaaggtctttatggttctctcgttattgaagagaaacagaaagaatatgaaaaagatcaatctttcatccttgatgaatgggccgtcaatcaggagaaaagggatataacgaatatgggtggcatgatgaagggcgccatgtcagggaacggtgaagctgatactgaacagatgtatgatacgttcacagtgaatggaagagcaggagacgccgttgaaccattggtaatgaaagaaggcgaaacagcaagattacgttttgtaaatgctggttaccagcaacatctattagttttcccagggaaaacaatgaaagtgatcgagattgatggtgagaaggttaagaatccaaatgggacttcgaatgtactagagattgcaccaggagaacggatcgatgtagcatacaccagacagagtagtgaacctgctgtaataagagagaaccgcggagaaaatgcagacgatatggtgattccagttgtgtccagtgaaggtgcagaatctgtaaaaaataatcaatcgacatcatcttccaactctgatattgcaaccggtacttcatttggaagtgaagaggtgatttttaaagaagtacctgaacctgacgtcacatataatatggaattgaatatggggatggatatgggcgaaggagtagccttccaaattaatgaacaagtcttccctaatacccctcctattaatgtgaaagagggagatatcgttaaggtgaaaataacgaattcaggaaacatgaaccaccccatgcatttgcatggccaccggttccaggtagcctcaaaaaatggaaagaaatatgatgcaccgctcgtgaaggatttaatacacgttaaaccaggagaagaatacaccatctacttcaaagcagataacaaaggggaatggttgtttcattgtcatgataacaaccatgctaatcgaggaatggtaacaatcttagattacgaaggtgtctattcaccatttaatcttggtggagactataataatcagccaaattaaaattatttctggacgactttggtacaaaaccgtggtcacttttatttgataatactattttctttgttcgtataagaaagagttataaaacaaccaagatacagtgactaacaataaagtttttccgattacaattagtatcacaaattaatcgatagttgtcttaaaaagtaaagtcttaggcaaaataataaaaaattacgaaagtaggaggagtactgtgaagaataaaagcgcaatagctattacctttgccatcctttcattattattggtggcatgcggtaataatgaaaacatgaatgagggtacaaatatgggggcgtcacaaatgaattctgattcagaggaaagtatggaaagcatgaaccattcaggatctagtgatattccaaaaggcttaaaggaagcaaacaacccaaattatgaagttgatagtaaagccatcatcacagcaagtcacatgaaagggatggaaggtgctgaagctacaattaaaggtgcttatcaaacgacagcctatgtgatttcgtatacgcctacttttggtggtgagaaagtagataaccataagtggataatacaagaggaagttgaagaagctggagataagaacttagaagaaggaatggaagttaccattacagcttcacacatggagggtatgaacggagctaaaggcatcatcgaatcggcaaatcctaccactgtctacatggtggattatatgcctacgactgggggaaaggaagtaaccaatcataaatgggttacagaatctgaactaaccgttaaatagagcgatattatttacgtaacattaatgagctttttaatatttgcaggatctatggaatttgtcgcagggcatttgttgcttgcgggcagtcttctactaataagtatcttagaatttctttggctgctacaaattcctttgaggaattgaacgagggtttagatagacttaaaatccatcttagcaaccaacattagctttttaactatgctgacttttaaacaacaagataaggtatttactattatttttggtattcgtttcgtggtctttatttttatggtgatttaatcttcaacaaaatcagggcttatattctacatacctacttacagaaaagaacggtcaggggctactgcctctgatcgttctttgtgggattaccttattgtattccataatcgacatccattcacttgaacacttaaactattagacgatatcagtctgtttttgatttggtaacgagtgcctggagggtattgctaaacgatcggcgcatcgatgtttttaacagaatcgacgtttgaggagaggctagctgaccgagaagagaaagtaatgccgcctgagttgttacgttatgaatcgctttcgggttcatcccccgcttagcggcttcaaggcaaatcggataagcattctttccaacggcgatgagcacatcaacgttcttctctgcggcaagagcgccgactttgcgatgctcctgctccgcgtaatccccaagttcttcaatttcccctaagacggcaaccgtttttcttccttctgctgtttcaacgagaacttctaacgccgcttcgatggaagtgggatttgtattccacgtgtcgtcgatgagcaggctccctttttttccttcataaaactgcaaatgacttttaatgtgatggaacgtgtggaggcgacgaactgcatcctggatctttacaccgacaagggtggaagcaccaatcgcagcgagggcattggaaacgttgtgcgtgccgtagccaggtacaaaacaagcgaactcaccttcatggcaggcaagggtaaaatccatgccgtttttcctgagattaaattggatcgaatgggcccggtaatgcgctttcggatcctgaccatagtatagaacctttccagtaaactcacttaaatcaagactgcgaatcgtatcatcatcccgatttaaaaggatcgttccgttctttccaacggcttttaacatctttgccttttccgcaatatacgcctcctgacttcgaaatccctctatatgatcggtacctatcgctgtgataatgccgatttgtggccggaaataatgcgcagaatatagcagttgatttggtccagatacgcccatttcaaaaacggcataatccgttttttcatcgatttcaagcaaataatcaaggtttcttgcgagtccgttatgacttaatttcgttcgaacaacgtgatctttttctgagaggatccacgagatcatttctttcgttgtcgtttttccacacgtcccggtcacgccgatcacgggaagctggaataagtttcggtaaaacgaaataaatcggccatacgcttttctcacattctctacataaacaacggtcacatcatctcgtacactcttcacggcttttggatttgaggtgacgacagttaagttgtgaactgccggtaatggaaaggatgattttcttttcaatagaaacacgagcgatgaatctgtgatcagatgctcgccatacttcgccgcgttttgaatggttttggtcatgctacctgaaagaacctttccttctagcacaggcatcaattgacgtaatggaaggtttttcatcgtaaacctactctcgtattagacttctatgtatgttattcggattcatagaaatctgtacgggctaatccaccatcttaagggggagcacatcccttatttcctccaaaagcatatactaccttagagcttgccaactgtgaaaaatggagcgggggtagtaggatgtatgagatcaaagcatacgagaaaaaaggccaaatgatgatcgtttcgaaatcatcctttcctggtctagttggatattcaaataagcacgtgcgactacaattcggaatcaaaacgatagaagtgacgattcacttttctgatgctatcaacgatgaaaatgtgcatctttcaacaaatgtggtgaaacagcttggactaccattaacgtgcggctatgatttggttgtacaagggggcaagattacgatcggtccttttattgggattctttgtgaattaacgaatcgaaaattaacggaaatgttaccaacatacaaaagctttgtaaaaggttaccgctacattggcggcgcggtcgctgtgttttcgatagaaggaattcataaagaaaagcaaatgatttctggatatctctatcatccagagaaaaacacctgggaagtgaaatctttcccgtttccagccgtcgtgatgtcgattgcagagccgagtttaacctcctcatgggaagtctttcatgagcatatgaagaactttgactcactgctaggaggtcgcgttttcaactatccccatttctcgaaatgggagatgcatcaaatactgctaccggaattgaaggagtatttacctgaaacagccctttacagagatgtggaggacatttacgacatgctaaacaggtatcaaagcatctatgttaaaccggtacacggcaggttagggaaacgcatttttaatgttgtcaaaaatggcgatcaaataaaggtgaaatacgatgagaaacggaggagacatgaggaagtattcgcggctagagccgaaagcaatctcttttttcaaaagcatctcatcccagacggtttccttattcaacaaacgattccactaaaaacgcatgaaggaagcgtgattgattttcgtgtaatggttgcaaagaacgagaagggattgtgggagaacttaggaatctactcaaggtacggagcaagagggcaaatcgttagcaacataactgcgggtggccataccgaaatagcaagaagcacgttggaaactgtatggaaacttgaagataaagagattcaaagagtcgaacaggaaatggagcggatcgtgttacgttcgattcaagaattagaagaccagggctatcatttagggaatattggtgttgatattggactagatgacgaatgtaagatgtccattattgaaatcaatcatcaaaaccccgatccgtatattgcactgatggccaaggatcgcctggcattttacaagtgccggttacaattgatgaggtatggaaggtatttgggtgggttttaggtggaaaggctgctgatgaaggagagaatgaattgagctatccttttaacatacgggctttgaaaggagataagcaggtaagaaaaggatagctatcttattggttttgttattttcatagataacctcattcattggtggatttctgcaaattcaacgaatggatcgacgcgaaagaatagctgttccaactctttaaacgaacacatcacttggtcagatgattcatcaaagaagacaatcgcataatcatcgtcacctactgaccagacacgctgaccataggggagcgaatcatcatgctcaagagtaacttgtttaatatcaaatgtggcatgaatccattcttgaactcgttcgcgagcttccatgattttacctcctctaaaaagtgtttctcctattgttaccccaattatatgggggttaagcaaatatttttttgttttagttgaagcaagcgtatgaaaggcatggtgaatgtgagttaacggcggggaagtgaggacgaaaaagagagctctcggtaatgagggctctctatttgtatgtggagtgcttttgtttgtaagaatgaatctttttagctaataaaaagcgaatttggccaatataattgggagttagccaataaaaacggagattagccaatatatcaggattttggccaataaagagggggttcaccttatcgatcgtttatactattatttatcatggacgaatcattgaagctcaggagattgatcatgacagttcgatagattagaggacgaagaataagaaggagaagttatcatgccgacaacaatgagtaacacaagaattgaatctgattttttaggagaaaaggaagttccgattgaagcgtattatggtattcaaacgctacgcgcggtggagaattttccgattacgggctaccgcattcatgaagaattgattaaagggttcgcgatggtgaagaaagcggcggcgctcgccaacatggaagtgaagcatctgtatgctggcatcgggaatgcgatcgtggaagcagcggacgaattgttggaaggaaagatgcatgatcaaatcattgtcgatccaatccagggaggcgctggcacttccatcaacatgaacgtgaacgaagtgatcgcaaaccgcgcgattgaattgttaggagaagaaaaaggaaactacatcgtttgtagcccgaatacgcatgtgaacatgtcgcagtcgacaaacgactcttttccaactgccattcacctatccgttttaaatatgatggagcaattactaagcacgatggaagacatgcatgcggttttcgaacagaaagccgaagagtttaatcacattataaaaatggggcgtacccatcttcaggatgccgtgccgattcgacttgggcaggagtttcaagcatacagtcgcgtgattgcacgagatataaagcgaatcaaacaatcccgtcagcatttatatgaacttaacatgggcgcaacagcagttggaacgggattaaatgccgaccctcgttatattgaattcgtcgttaaggaacttgcagacattagcggtttaccacttgtaggagcggaagatatggtcgacgcgacgcaaaataccgacgcgtatactgaagtttccggtgcgttaaaagtgtgcatgatgaacatgtcaaaaatcgcaaatgacctgcgtttaatggcgtctggaccaagagcaggattaggcgaaatcagcttacctgcaaggcagcccggctcttcgattatgcctggtaaagtcaatcctgtgctaccagaagtgattaaccaggtcgctttccaggtcatcggaaacgacaacaccatctgtctcgcttcagaagcaggtcagctcgaattaaacgtgatggagccagtgcttgtcttcaatcttcttcaatcactaagcattatgaagaacgcgttccgcacgtttacagacaactgcttaaaaggcattgaagcgaatgaagatcgtctcaatgagtacgtggaaaaaagcgtcggcgtactaacggccgtgaacccgcacattggttatgaagtagcggcgcgaattgcgagagaagcgattctaagtggcgcctcgattcgagagctttgcataaagtacgatgtgctcacggaagaagaactgaacttaatcttagatccttatgagatgacgcatccaggaatcgctggcgtgtcgttgtttgagcgggagtagtcgtaaagccgcacttcgtagttaagcgaagtgcggctttttcttgtgagaagattcgtttggattgatggatagtgctgttaattcctggacgttagaatcattctagttagctaataaaatcggcttttggccaaaatattttggttttagccaataaagcgcgatgcactcgctcaccgcaactcttattaaggaaaccggtttaccaaacaaaacttgaaaaattagaaaagtcccacatttaccattgaaatcggatacattatgtggtttaatcataactaacgaaccattccggctattttttttgctggtttacgaaaccggtttccttaacttgttttgttcatctatgggtcaatcattttaatggaggggatattttatgaaaggcaaaaagaagtttctttccgtgctgttgctcagtacagctttagtattagctgcttgtaacgggggcggagaagagtcatctggagatggcaaagtgaaattgaacttttggacgtttggggcaacaaactatcaatctctagcggaagagtatatgaaagaaaatccggatgttgagattaatgtgaaaacgtctgagctaggcgatcatcataacagcttatttacatccatttctgcaggaactggcgctccagatcttgcgatgatcgaagtggatcagcttgatcgttaccgtgaagcgcaggagcgatttgtgaacctgtatgatcttggtgcagaagaagttcaaagcgattacctcgattggaaatggaatatggcagagagtacggatggcgacttcttgttcggtcttccgacagatattggtccgaaagcgatgtattacaacgttgatgtttttgaagaagcaaacttaccaactgaaccagagaaagtaaaggaaatgatttcctcacctgatcaatttgcagacgctgcgaaaacattgcttgatgaaacaggaaagcctatggtcgatagcatggaaatggcttaccgcgccaatatggatgctttggagaaaagttacttcaatgagaaagatgaactgatcattgaccaggaaggtaatgaagtaaaagacgcttatgactacgctgtgtctctttatgaaaagggttacgtaggaaattatgaaatgtggacgcctgaatgggcaacggctcttaacaaaggtgattttgccgtcgagatggccccagcgtggttgaaaggctacatgacagaaaatgctccagaaggaaaaggcaactggcgcgtatcaacactaccaagcgagtttgctggtaactggggtggatcttacgtcgcgatcccggcagaaacagagcatagtgaagaagcatatgagtttgcaaaatggctcgtttctcctgaaaaccagttgaaatcattcgaagagagcggacttttcccttctgcgccatctgtgtacgaaatggacgagtttgtgaataatgaagacgaatacttcggtggtcaaaatacagcggctacttttgcggaagcagcgaaagaaattccagctgtctacaaaggaccaaaatacgtaacagtcaatgatgaagtactgactgctctaagaaacgttcaagaaggcgctgaccctgagaaagaatggaaagatgcggttaagcgtatcgagggcttagtgaaacgataaacagaaagctgcttaaaggctggcgggggaaaactcttccggcctttaactttggagggggttaaggttttggaggatgtgcaaaagcaagcaaaagctcggaaaacaatcaaaactagtaaactgtctgaaaagaagaaagacatgatttcaggctatctctatgttgcaccattctttattgtgtttgggattattgggttatatccagctctgttcagcattgttctagcttttcaggaatggaacgggcttggtgagatggagtttgttggacttagtaactttgcagtcgttttacaagatccattattttggaagtctttatataacacggtcatcatcggattaatgggaacggccccgcagttaattgttgggatagttcttgcttatttcctgaatctcgctgtgatccgtttcaccaatttcttcagagtaacgatttttatgccatacatcacgtcgatggttgccgttgctctcgtgtttggggttttctttagtagtaatgaaacggcactcgcaaactacgtaattggcttgttcggcgttgatccggtgagctggaaaacgtctgaatggggagcgaaaattgccattgcgctcatggtattctggcgctgggtcggctataatacgatcatttatcttgctggtctacaaagtatttcgaaggatctgtatgaagcggctacgattgatggagcgaataagcttgagcagtttatctatattacgattccattattgaaaccattcattattctaacggtgtttatgtcaactgttggagcactacaattatttgcggaaccaaccgtgttcttaggctcgtctgcattcagtcgcgatgaagcgatgacagtggtgatgtacttgtaccgtgatgcctttaaccttggctcattcggaaccgcatctgctacggcagtattgttgcttattatcattatcggtgctgcagcgatcaatacttggttaacatctggaattggcaataagaagaagagaggtgcgtaaggaatgaaacaaaaacgtaagaaacaatcaaaagcgggcacgttaccgatttatcttatcctgggctttacctctctcttttctctgtttcctttttactggatgttcgtcatggcgacgcagccgagtgcggcgtataactccattccgccgacgcttttacctggtggaaagctagtcgagaacttccagaaagtgctggatacaattccatttttccaggcgatgtggaatacaattcttctttgtacggttgtcacgttagccgtattgctaattagttcgttggctggatttgcatttgcgaaattcacattccctgggaaaaactttttgttcattctaattttgttaacaatggttattccgccacagctgggattgattccacagtattatctcatttctcagcttggctggcttgattcgttattaggagcggggatcttattcttactaaatccgctcggaattttcctgatgcgtcaatatatcagtgaatccgtacctgacgaattaatggaagcggcgaagcttgatggctgttccaacttcaggatttattggagtatcgtcattccgattatcaagcctgcttttgcgacgcttggaattattgtctttacgttagtttggggagaattcctgtggcagttcaccgttttgcgtgatccttcttcttatacgctacaggtggcgcttgcttctctaaataatgctttccgagtcgatttcggaatgttactttcaggcgtgttctgggcaacggttccattgatcattattttccttattttcaacaagtggtttatttcgagcattacggaaggatctgttaaataatcggctgtctctcctccgtattttgatacaataagtgagaatacgttagcgatgttgctaaggagatgaacgcgatgaatttaacgattagggatattgctagaatggctggggtctctccagcgactgtatccaaaattatgaacaattacggagggatcagtgaggccactcgtcagaaagtatataaaattattgaagacacaaaataccagccaactttttcagcgaaatcgttggctactaaaaaatcgaacttaatcggtttgatctacgccggaaaaatcaacgtcgatttcaaacaccctttcttcaatgaagtgatgaatacatttaagaaagcagtaggggcgctcggatatgatctccttctgttttccaatgaaaagttctatcaaggtgaaagcaaatacctagagcgatgcaggcatttccatgtggatggatgcttaatcgtggccggtgatgaaattgaagcggctgttcatgaaatcgcgcaaagtgagattccgtgtattggcatcgatttaaagctagaaggaccaaaatccagctatattatgacggataatgccaagattggcatgaaagtcgttgagaatttctatttaaataaagtaaaaaaggtcgcctatattggtgggaaacaagattcgcttatttcgggcatccgaaacgaaggattcatggatgcgatgaagcagttcggtcttccgttgaatgaaaaatggattcactatggagatttctttgaggagagcggataccgcgccatgaaaaagattcttcaggatgatgaacgccctgaagccgtgttcgccgcttctgatatgatggcgctcggtgcgttgaaagcgatgaaggagcacgggataaaggttccagaagacattcaactgatcggctgtgatgacattgaatcttgtcgctatagcgatccccctcttacgaccgtgaaacaggacaaacaaaagttaggaaagctcgcagcctacatgctggatgatttaatacaagggaacgaagagatccatccagtgaaagtcgaccctgagcttgtcattcgatcatctagtatagaaaggtaagaggtatccgactacaggaggctaccaacatgacaaccattcaatttccaaaaacactcaaatggggagcagcaaccgcttcttatcaaatcgaaggtgcagcaaatgaagacggccgatcgccatccatttgggacacgttctcccatgcgccaggcaatgtaagaaatggagatcatggagacgaagcgtgcaacagctatcatttatataaagaagacgtgcaacatctgaagaaactaggcgtagacctctaccgcttctcaattgcttggccgcgggtaatgccacagggaagaggtgagttgaatccgaagggcgtcgcctactaccaaaacctaatcgatgagcttatcgaaaatggcattgagccgatgattaccctttaccactgggatcttcctcaagttctccaggatgaaggtggatgggagaatcgtagcacgatcgatgcgtttaacgaatatgccgtagcgatgtttaaagagttcggtgacaaggtatcgaagtggattaccatcaacgaaccgtggtgcgcttcttttctatcaaactacttaggtgctcacgctccaggtaaaacggatttacaagcgggcgtcgacgtcgctcaccatctgatgcttgcgcacggaaaagcggtgcaatcattcagagagtttttaccagatggtgaaatcggctatgccccgaacactggatggctcgagccgttcagtaacaagcaagaagatatcgatgcctgcaagcgagcgatgatgtggcagaaggaatggttcatggatccagtcttcaaaggatcgtatccagaaacgttgatcacgattttcgaaaaccataacgcaaagctcaagattgaggacggcgacctcgaactgatttctcagccgatcgatttcatgggcatcaactattacacaggtagccttggacgatacaaagaaggagaaggtcttttcgaagtagaggagattccacttgattatcgaaaaaccgatatcggctggccaatctatgcagacggtttctacaatgtcttaaccgatcttcacgaaacgtatggtgatgtgccgatctatattacagaaaacggtgcgtgctacaaccatgaagtagaagacggtagcgttcaggatcaggagcgtgttgattacttaaagcagcatctaacttctcttcatcgtgccattcaatctggtgtgccgatcaaaggctacatcgtatggtcgcttctcgataacttcgagtgggcatttggctacgaaaagcgtttcggcatcattcatgtgaactatcgcacgtttgagcggacgccaaaggacagctactactggtatcgccagacgattacgaatggctggtttgaggtttaggtctgagggctaaggcctgatgttttaggcttgaagtgagagcaggactcgcggatgcggggtttgctcaatcatgaataaccaggcagagatacacgttgtgtgtggattgcctggttttttgtttgagggagttgtgtgatttatgctgggatagggaggggtgcgagtgggcggtgcgtggagccgttcggtagttagaatgattctagttagctaataaaatcggattttggccaatatatttcgtttttggccaaaaaaaatagagtttggccaatatagtaggattttagccaataaatagcggggcgctggaacgtgagaagctaagaaagtaagctgaggacgccatgtcgacaccattcgccatataacgggtggtgacaggcaccattgcaccgtttctgcactttcctgtgtgaaagcgccaaaaagcggaaggactatgttaccattaatattgttgtgtttaggaataaaaaggacagggaggtgtaaatttggaaaaatggatgaagtttcttgaagtaaattcttctcgcatttttgatttgacgattgagcacgccattttagtagggttagctattctagtagcgctcctcattggtgtaccgctaggaatctatttaacgacaaatgactatctggccgaaacagttctacagattgcgtctgttatgttaacgattccaagtattgcgttatttggtgttatgattcccgtcttttcgattgtgaatcaggggatcgggtttgtaccagcttttgtggcattagttctttatgcccagcttccgattattcggaatacatacaccgcaattcgtaacgttaatcctcaaatgagagatgctgcgattggactcggaatgaaaccccttcaacgtttgttccgtgtcgagattccaaatgcgtttccagtcattatggctggtattcgtaccgctgttgtgatcaatatcggcattggtgtcatcgctgcatacatcggagcgggggggcttggcgtattaattacacaaggcatttcacgaggagataactacttgatcattaccggctcggttgctgttgcgattctagcaatgattgctgatggcatcttactatggattcaaaaacggtacacaccgaagagcattgctaattaaggagtgaggtgtagggatgattacgtttgacaaaacaacgaaaacatatgaaggcaatgtcaccgccgtcaaaggggtagattttaccgtagaaaaaggtgagattgttgttctgttaggcccttccggctgcggaaaaacaacattgctacgaatggttaaccgacttgagtcgatttcagatgggaaaatcaacattgatggacaagattcaatgtcactgaaccaaacggctttaagaagaaaaattggctacgtgattcaaagcaatggtttgtttccgaatatgaccattgaagagaatacgatgatcgttccggatctcttaggctggagtaagaaggataagaaagagcggttccataagctcatggagatgattggattaagcggagagaaatttggaaagcggtatcctcatgaactttccggaggacagcagcagcgcatcggagttatccgggcactagcggcagatccaccggttatgcttatggatgaaccttttggagcacttgatccgattatccgggaaaaaattcaggacgaatttttgcaaattcaaaaggaagtcaagaaaacgattttgtttgtgagtcacgatattgacgaagcgattaaaatggccgataagattgtgctccttcgtggaggagagttgatgcagtatgacacgccttccgagatgctggtccgtcctaagaatgaattcgttcgagagttctttggaaaagacagggctattaaaagcttaagtttacatacgatcgaggaccttcgagagatgattggtctggcagaatttgatgatgcgattgctgacacaaagacgattaatgtaaaccatgacctgcggaacacattatccatgttacttaatcaggaagcggatcaggttattgttagtgatgatgatggaaagaagctcggtgcgatcacgattgatattgttcagaaataccttcattacgaaatcaaagcaaaaccagccccagttctagagggggtataacatgaataagaagagggttattagtcttgttgtacgctattcggtctacgggctggtcgcgttgttcttcttttgggcgatcagcaaccactatttcgattacatttttactgaatcaacaacattttggcatttaattaaacagcacttacagcttgtgcttgtttcatcggtgctagccttactcattgccatacctggtgggatactcgttacacggaagcaatttagacgagcagaatgggttgtatcaaataccgtaaacctcggtcaaaccattcctagtcttgccgtgctagctctgatgatcagtattcttgggattggatttcaaacagccgtatttgcgctgtttatctattctcttctaccgatgtatcgaaataccgtcgctggaattgattccattgatgaaaatttaattgatgcagcgagaggaatggggatgaagccgatccaaattcttttcagaatcgaattaccgaatgcagcctactccatattagcgggtgttcgaacggcgattgtcttaaatatcggaacggctgctcttgcttatgtcgtcggtggaggcggtcttggggtgtggattttcactgggattcagctatttgataatggctacttaatttccggtgcgatccccgtcacgctactcgccatttttgttgactatctgcttcgacttctcgagcgtctgatcgttcctgaagggtcaaaaccgtcacaagaattgtaatgtgttaggaggtgtttatgtgaaaagtaagatgcttagtggaatcatcatcgttgtgatcttaacgatggtaacatcctgctcaacggttggaattggcgggaaacaaatttctgttggtgggaaaaactacaccgaacagtacttgctctcagaaatgacggctttccttcttgaggatgcaggttatgatgtgaagcaaatgaataacttgagtagtaccgttgtgcgtaaggcccttgagaatgagcaggttgatttgatgtgggagtacacgggaacggcgcttcttacctacatgggacaggacaccatcgctgatcctgccaaagcctttcagaaggtaaaagagattgatggcaaagagaatgatatccattggatgaatatgtctaacgtaaacaacacctatgctctcgccatgagagaagagcaggcaaaggagttaggtatccaatccatcagtgatctcgcagcctatatgaatgaccatcccggagagctttccattgcctctgacgcagagtttgcgaaccgtcccgatggcatccctggtgtagagaaaacgtacggatttgaattcaatacaaatcagattaatcaaatggatattggattaacacaacgagcattagacaatggcgatgttgacatatcggtcgcttttgaaaccgatcccaccattgtcgaatataacttaattacattggaggatgacaagaatttctttcctccttacacagcagcagtcaccattaatgaagacgtctatgagaaatatcctgaagtaaaagaaatcacccaaccacttgctgaacagttaaacagcgacatcatgcgagaattaaactacaaggtagacattgaaggaaacagtgtttccgttgttgcgcatgattggcttgtggagaatgggttattggaagagtagtgaatgaccactaaaaaaaggcctttccctcagtgtaatgaggagaaaggccttttcgtgtagagagaagcttcaactggtgaacaaaggtatctactatttcaatgatttcttcattagaaagcgagatgtcccttgtacgctgaacatgggggtccaatcgattggcgttcgtgcaccgcggttagaatgattctagttagccgataaaatgcggatttggctaatataattgggatttggacaataaaaacgcgatttagccaatatatcaaaatgttggccaataaactgaccagcataccgtcatgaaccaacattcttcttcaaatagctctcaaacagtaaatcaattaagagcattaacgtcgaacgggcagtgatgtcatagccgccgaacttcacctttccaaccgtcatgctgaggtttgtttttaccatccgaccgagtgtggagtctgatgaattcgtgattgctgctgtatccacgaccataaaggaaagcttttctgccgcatgaatgagcgttttcgtttcaccacttgtggagatgaaaaagacaaggtcatcaggtttcaccatgtttggaagtaagtcaatcatgtgtgattcatatgtataatgcgtttgtttattcgtttgcataagcaatttactgaagtattcggccatcatttttgataaaccaaccccaacgacaatgacgcgcgcggctttggcaaccttctcgcttagtcgatcgagttcatctagttgaatggtttcgaaggcttgtataaaactctttttatagctttccaccggatgatcatttaacatcctttgctggtcatcgctggtcttcaatcggtacttcagttctgaaaagccctctaatcctagcttgtgagacatgcggacgattgtcgtcgtactcacattattcacttttgcgatttcagtgagagagaggtttttcgcttcgcttaaatgctggtcaatgtaatacagcacctgcttctctgtaggcgtcagttgtgcaaggtgattcccaaattgatcaatgatctgtcccataataaactcctcttttacgtgtatgctaggtcaagtatagcatgcgctttcatgagtctgtacaattgtacagactatgtacataaacaaccaatcattctatggtacaacataactataaggatttgtaagtgttttcaacacaagaaagttaggagtgaatgggatatggaactaaagaatatgacggatccaaatttaatcatgttcgatgtggaagcggatcacaaagagcaagtaattaagcaactcacatcaacattatttaaagaaggctacctagaatccgaacagccatttttggaagcggttttacaacgagaagacgtatcaccaactggaatggagcgagggcttgcgattccgcatggtaaatcaactgttgtaaaaaaagccgtctttgcggttgcgaggttaacaacccctctcgacgattgggaaagtattgaccctaacaacaaagttcaactggtcttcttaattgcgattccagaaagtgaagcgggaaccacacatttaaaagtattgtctacgttaagtacgaatttaatgcgcgacgggtaccttgaaggactcatggcatcaaacacaacagaagaatttctgaacggtctggatgttgacgagaagaaagaagccaaaagcgaccagaacttcacaaaaacagtcgtcgcagtaactgcctgtgcaacaggaatcgctcacacgtacatggcggcagaagcactcgaaaaagccgggcgtgaacttggtgtgaacgtcctagttgaaaagcagggtgcaaacggaattgaagacgcgctcacggcttcggtcatcgaaaaagcagacgccgtgattttagcaacggatatcgctccgaaacaaaaagaacgttttgcagggaaaccgtatgtgcaaacacgtgtagctgaaccgcttagacgcggaaaagaaatgattcaaaaagcgttaacgaatccagacggcgttgttgagaaaaacgaatcagacgacgcagcagccccctcttctcagagtggtggtgggtttctaaaagacaccgtccaagccgttatgaccgggatctcttacatgattccagttatcgttgcagcagggttaatgatggggattgcgaagcttggcgcgatgccgtttggtcttgtgaatgagttaggcgatccgaaatacgcgacgcatccgaacgagttattcgtgatcttgcaccatcttgatatgtttggcggattaatctttaagttcatgtatccgatctttgctgcttttgttgcgtattcattagctgaccgcgttgggttagtatccggatttattggaggagcttttgcaggtggacttcattacaccttctggggaattgcggatggcattccttctggcttcttaggcgccttaattctcggtctagctgcaggatatatttcacgattcttgaaccagaagattcaactcagtaagaacttccaggcgatgaaaccgatgtttctcatccctgcgatcagtgtattatcgatcttctttttaaacttctacattgttgaccctgtatttggcgggttgaatgttgtcttaagaacttggattgaatcagctcaaggaacaggtgatgttgttcttgcatccatcatcgctgcagcgactgcatttgaccttggtggaccgattaataaagcagcaggagcaattgcgattggtcttgcggcggatgaggtttatccattaacggcacgcgtgttggcaatcgttatcccgccaatcgggcttggtttagcaacggttattgataaatatgttgtgggacgtcgcgtttttgaagcagatcttcgtgtcgctgggaacaccgcgctactactaggatttatcgcgattagtgaaggtgcaattccatttatgcttcggaatccgcttatcacgataccaatcaacattatcggcgcgattcttggcgctagtacagccgttttattaggcgcagtgcaatggctgccgctacccgctttctggggatggccgctcgttgaaaacctgtgggcttacttgctaggacttattgtcggtgcagcctttatcgcattcgccaacatctttgttcgctttacgattttaaagaaaaaagaaagtcacgcttaaaataaatataggggcacatcttgcagaagagtgacccctctttctattaacgaggcatccttggagggaaaccgaatgaagcagaaaaaagtatacgtcgtcccacactcacattgggaccgcgaatggtattttacaatagaagattcgaacttattgttagttgaaaatatggatcgtctgatggacgttatggaaaaggatcaggagtacacaggctatgtgttcgacgcgcaatcgtctattcttgatgaatacttgaaaattcgtcctgaagagaaagagcgtctcgcaggattgatcaaagacaagcgtatctttgttggtccgtggtatacgcaggccgattcgctattagtaaacaaagagtcgctcatccgaaatttgctgtatggcacgcgcattgcagaaaaaatgggtcacagcatgaacgttggttatctcccagatatcttcgggcaaaacacgtacttgccatcgatttttaacgagttcggcatcgattacagcattctgcagcgtggcctttataccgatcagctaaaaggggatttgaatttcacatggaagtctccagacggaaaaagtgtgaaagccaataacatctactttgggtatggacctggaaaattcttgtctcctgaagaggattatatggaagaacgactgctccccatcttagataaaatttctgccctcaacaaaagcacggataacttgctgttacctgcaggaggcgatcaagtgcttattcgggagcatttccctgaaaccgtgaaagcactgaatgagaaggatgagaaacatgagtacatcctttcagattatgaaacgttcatgaacgaaacgttcgatgaagcggatcgcttcacgaatgagatcgaaggagaactgatcggaacgcagaaatcacgtattcacaacacgatccgttcacagcgttatgacattaagaagctgaatgatatcgctgaaaagaagttgattcatgagctagagccacttggaagcattgcgagcacgctcggattacgctatccaaacgtgtggcttgatgaaatgtggaaaatgctcttcgatgtgcatgcgcacgacagcatcggcggctgtaattcagacgatacgaatcgggaaatcgtcaaccggttaacgaaagtgattcgcatggcggatggctgcttgaatttgttggaaaagcaaatcacggaagcgattagccgtaacctgaataacgataacattttggttctgttccaactacttcctactcctttcgaaggggcacaaaaggcgatcttgtttacgagagaaaaggcgttttcagttaaagatttgtacggaaacactgtcgagatggacaacctgaaccaggaatatatgagcggtggaaagacgatcgtcgtaacagctgaaggcgaaaagcaagtagaagcgccgggatattaccgaaatgaagtgctgctgcagaaccttgagttgcctgcaatggggtatcaaacgtatgaagttgttgatggcgttgaagcgagtactgaaaagccaggtcaggtggacaaaacgaagatcgaaaatgatcatctggccattttcgtagaggacgagtccttgaagctcgcaatgaaatcaaacggacaaatcattcctgacttcttgacgttcgagaacgtagcagatgcaggggactcgtacgatttctctccattaaaaggggacgagccgatctacagtcgcgttcaatccgtcaacgtgagtgccaaaaagggcgtgcaaatgatgaacgtccagcacgagcttcatgtacctgcaaacctggaagagcgggaatccggcatccggacgaaagagctcgtcattcattcgacgttcgagcttcgtacgggagaagatttccttcgcgtgacgcacagcgtaaacaatgacgtaaaagatcatcgtgttagagtattgctgcaaacgtcgctagatcagccagagcattcattcggcgatcagggctttagcttcatccagcgcccgactgtgaatccttatatggcgagctggaaagatcagaagttcgcggaagcaccagtgccgatctacccgcttgaaaatttggcgggtgctacagatggcaagctaaccgctgcggttgtgacgaagggaatcaaagaatatcagctaataaaagagacaggcgaacttgcattaacattatttagaagtgtcgggctacttggtcgagatgacctagaatggcgcccgggtagagcatcagggattaacaacaaagtcgtctacactcctgacgcgcagatgcagggtaagatgacgtttgaatacgcggttcacttttcagagagctatgatgagtgcgcactatttaagacgatcgatcgctacaatgatcatgcggttagctaccaaaaacaatcgctaaacacgtttgaagaacgattggatcgttttgaaattccttatcctgttacgtcgctaccagcatcgttaagtttgatgcaaacatcgaacgagaatgttttcttcagttccatgaaacaagcacatgatgatcggacaatcatgatcaggctctttaatccaagcactcaagaacagaaggtccaactgcttggtgagcacattcaatcgataacacaaacgacattggatgagaaaaatggcatcgaaatgaacaatgatgtcaccgtcccatcaaaagggtacgtgaccctgaaactgacgacaaaggtggatgtgcaatgagctttttaaacaaggtcgagaacctgttaatgacgatttacggtgaagactacacaccagcatacaaagaacagctaatgaaaaccgtcgaagcatggaaacaaaaagtgtggaaagagtcgggcccactttccgagaaaaatgtctatctcatcacgtatggcgatgctattcaagaggaaggggagcctaccttaaagacgttaaacaaatttattcaggagcacgcaaaagatgaaatcacagacgttcatttattgccgatgttcccttacacttcggatgacggattttccgttgtcgattaccgtgagattcatccagagcttggcgactggtcggatgttgaaagactttcgaaca

SEQ ID NO: 3 - DNA, 60 bp, Alkalihalobacillus sp.
  source 1..60: mol_type = genomic DNA; note = AEJDLFGP_03285 16S ribosomal RNA
tcggagagtttgatcctggctcaggacgaacgctggcggcgtgcctaatacatgcaagtc

SEQ ID NO: 4 - DNA, 60 bp, Alkalihalobacillus sp.; identical to SEQ ID NO: 3
  source 1..60: mol_type = genomic DNA; note = AEJDLFGP_03323 16S ribosomal RNA

SEQ ID NO: 5 - DNA, 60 bp, Alkalihalobacillus sp.; identical to SEQ ID NO: 3
  source 1..60: mol_type = genomic DNA; note = AEJDLFGP_03383 16S ribosomal RNA

SEQ ID NO: 6 - DNA, 60 bp, Alkalihalobacillus sp.; identical to SEQ ID NO: 3
  source 1..60: mol_type = genomic DNA; note = AEJDLFGP_03396 16S ribosomal RNA

SEQ ID NO: 7 - DNA, 60 bp, Alkalihalobacillus sp.; identical to SEQ ID NO: 3
  source 1..60: mol_type = genomic DNA; note = AEJDLFGP_03473 16S ribosomal RNA

SEQ ID NO: 8 - DNA, 60 bp, Alkalihalobacillus sp.; identical to SEQ ID NO: 3
  source 1..60: mol_type = genomic DNA; note = AEJDLFGP_03569 16S ribosomal RNA

SEQ ID NO: 9 - DNA, 60 bp, Alkalihalobacillus sp.; identical to SEQ ID NO: 3
  source 1..60: mol_type = genomic DNA; note = AEJDLFGP_03604 16S ribosomal RNA

SEQ ID NO: 10 - DNA, 60 bp, Alkalihalobacillus sp.; identical to SEQ ID NO: 3
  source 1..60: mol_type = genomic DNA; note = AEJDLFGP_03813 16S ribosomal RNA

SEQ ID NO: 11 - DNA, 60 bp, Alkalihalobacillus sp.; identical to SEQ ID NO: 3
  source 1..60: mol_type = genomic DNA; note = AEJDLFGP_04083 16S ribosomal RNA
